United States Patent Application Publication US 2018/0126003 A1 - sequence listing, part 101

SEQ ID NO: 182438 - DNA, 9886 bp, Artificial Sequence
  derived and/or modified sequence
atttagcgcggagagtttcccgggtggacgcggctcctctctcggccactccgcacccccatcttcggtgacagaaggcgcctggtgggggtggctgctcttttctctccctgttccccctcacccagtcctctaggtctcctctcctcttgcctcagagaagcagcggagctcgggccccgcggtgagcggccctcccctccccgccgttccctcctccgtcagcccccggcaccggcccgggaggagacgggtttgccaggcctggggcgggcggggaggcctcggggaagggggggcccgctcctcaggcgccgaggctccgaggctccggcccttcgcctctgggcgatgggcgacctgtgaggccggtccccatcgctgggggcgcgtgtgggaggaggcggccgcccgagtgaccgggagccgggccgcggccttccctcgcccgcctcggcccctcccactcctctgccccggggccgccaccgcccgggcgtcggacctggtcccgtgctcgcggtgccgccgccctctgggcctagcccgcccagctcggcgagcggcggcagtgggagccgcgtccgccgcatccgcctcgactcggtgccggcccctggccctcccctcatgactgcggcgcctctgctgccaccgcccgcccggccgccgctcgccgcaggatggatgcggaccgtgcggcgctaacccccgtggctcagctcccgaatcgcccgccttcgagccctcctcgtgagccgcagcagcctcggtgccagcccccgccgcagctgggcccagcggtccgcctgtccctcgttgcggcttgtcggtgctgagtgaggcgtcgtccgggtcggcgcgaacccgcccggccgcggttccctgcagacctctgcgcgggcggctcggcccttcacgcccttttcgttcacgaatccgagcccgctcgcctctctccagcgaaccgaccatgtctggcggcgccgcagagaagcagagcagcactcccggttccctgttcctctcgccgccggctcctgcccccaagaatggctccagctccgattcctccgtgggggagaaactgggagccgcggccgccgacgctgtgaccggcaggaccgaggagtacaggcgccgccgccacactatggacaaggacagccgtggggcggccgcgaccactaccaccactgagcaccgcttcttccgccggagcgtcatctgtgactccaatgccactgcactggagcttcccggccttcctctttccctgccccagcccagcatccccgcggctgtcccgcagagtgctccaccggagccccaccgggaagagaccgtgaccgccaccgccacttcccaggtagcccagcagcctccagccgctgccgcccctggggaacaggccgtcgcgggccctgccccctcgactgtccccagcagtaccagcaaagaccgcccagtgtcccagcctagccttgtggggagcaaagaggagccgccgccggcgagaagtggcagcggcggcggcagcgccaaggagccacaggaggaacggagccagcagcaggatgatatcgaagagctggagaccaaggccgtgggaatgtctaacgatggccgctttctcaagtttgacatcgaaatcggcagaggctcctttaagacggtctacaaaggtctggacactgaaaccaccgtggaagtcgcctggtgtgaactgcaggatcgaaaattaacaaagtctgagaggcagagatttaaagaagaagctgaaatgttaaaaggtcttcagcatcccaatattgttagattttatgattcctgggaatccacagtaaaaggaaagaagtgcattgttttggtgactgaacttatgacgtctggaacacttaaaacgtatctgaaaaggtttaaagtgatgaagatcaaagttctaagaagctggtgccgtcagatccttaaaggtcttcagtttcttcatactcgaactccacctatcattcaccgcgatcttaaatgtgacaacatctttatcaccggccctactggctcagtcaagattggagacctcggtctggcaaccctgaagcgggcttcttttgccaagagtgtgataggtaccccagagttcatggcccctgagatgtatgaggagaaatatgatgaatccgttgacgtttatgcttttgggatgtgcatgcttgagatggctacatctgaatatccttactcggagtgccaaaatgctgcacagatctaccgtcgcgtgaccagtggggtgaagccagccagttttgacaaagtagcaattcctgaagtgaaggaaattattgaaggatgcatacgacaaaacaaagatgaaagatattccatcaaagaccttttgaaccatgccttcttccaagaggaaacaggagtacgggtagaattagcagaagaagatgatggagaaaaaatagccataaaattatggctacgtattgaagatattaagaaattaaagggaaaatacaaagataatgaagctattgagttttcttttgatttagagagagatgtcccagaagatgttgcacaagaaatggtagagtctgggtatgtctgtgaaggtgatcacaagaccatggctaaagctatcaaagacagagtatcattaattaagaggaaacgagagcagcggcagttggtacgggaggagcaagaaaaaaaaaagcaggaagagagcagtctcaaacagcaggtagaacaatccagtgcttcccagacaggaatcaagcagctcccttctgctagcaccggcatacctactgcttctaccacttcagcttcagtttctacacaagtagaacctgaagaacctgaggcagatcaacatcaacaactacagtaccagcaacccagtatatctgtgttatctgatgggacggttgacagtggtcagggatcctctgtcttcacagaatctcgagtgagcagccaacagacagtttcatatggttcccaacatgaacaggcacattctacaggcacagtcccagggcatataccttctactgtccaagcacagtctcagccccatggggtatatccaccctcaagtgtggcacaggggcagagccagggtcagccatcctcaagtagcttaacaggggtttcatcttcccaacccatacaacatcctcagcagcagggaatacagcagacagcccctcctcaacagacagtgcagtattcactttcacagacatcaacctccagtgaggccactactgcacagccagtgagtcagcctcaagctccacaagtcttgcctcaagtatcagctggaaaacagagtactcagggagtctctcaggttgctcctgcagagccagttgcagtagcacagacccaagctacccagccgaccactttggcttcctctgtagacagtgcacattcagatgttgcttcaggtatgagtgatggcaatgagaacgtcccatcttccagtggaaggcatgaaggaagaactacaaaacggcattaccgaaaatctgtaaggagtcgctctcgacatgaaaaaacttcacgcccaaaattaagaattttgaatgtttcaaataaaggagaccgagtagtagaatgtcaattagagactcataataggaaaatggttacattcaaatttgacctagatggtgacaaccccgaggagatagcaacaattatggtgaacaatgactttattctagcaatagagagagagtcgtttgtggatcaagtgcgagaaattattgaaaaagctgatgaaatgctcagtgaggatgtcagtgtggaaccagagggtgatcagggattggagagtctacaaggaaaggatgactatggcttttcaggttctcagaaattggaaggagagttcaaacaaccaattcctgcgtcttccatgccacagcaaataggcattcctaccagttctttaactcaagttgttcattctgcgggaaggcggtttatagtgagtcctgtgccagaaagccgattacgagaatcaaaagttttccccagtgaaataacagatacagttgctgcctctacagctcagagccctggaatgaacttgtctcactctgcatcatcccttagtctacaacaggccttttctgaacttagacgtgcccaaatgacagaaggacccaacacagcacctccaaactttagtcatacaggaccaacatttccagtagtacctcctttcttaagtagcattgctggagtcccaaccacagcagcagccacagcaccagtccctgcaacaagcagccctcctaatgacatttccacatcagtaattcagtctgaggttacagtgcccactgaagaggggattgctggagttgccaccagcacaggtgtggtaacttcaggtggtctccccataccacctgtgtctgaatcaccagtactttccagcgtagtttcaagtatcacaatacctgcagttgtctcaatatctactacatccccgtcacttcaagtccccacatccacatctgagatcgttgtttctagtacagcactgtatccttcagtaacagtttcagcaacttcagcctctgcagggggcagtactgctaccccaggtcctaagcctccagctgtagtatctcagcaggcagcaggcagcactactgtgggagccacattaacatcagtttctaccaccacttcattcccaagcacagcttcacagctgtgcattcagcttagcagcagtacttctactcctactttagctgaaaccgtggtagttagcgcacactcactagataagacatctcatagcagtacaactggattggctttctccctctctgcaccatcttcctcttcctctcctggagcaggagtgtctagttatatttctcagcctggtgggctgcatcctttggtcattccatcagtgatagcttctactcctattcttccccaagcagcaggacctacttctacacctttattaccccaagtacctagtatcccacccttggtacagcctgttgccaatgtgcctgctgtacagcagacactaattcatagtcagcctcaaccagctttgcttcccaaccagccccatactcattgtcctgaagtagattctgatacacaacccaaagctcctggaattgatgacataaagactctagaagaaaagctgcggtctctgttcagtgaacacagctcatctggagctcagcatgcctctgtctcactggagacctcactagtcatagagagcactgtcacaccaggcatcccaactactgctgttgcaccaagcaaactcctgacttctaccacaagtacttgcttaccaccaaccaatttaccactaggaacagttgctttgccagttacaccagtggtcacacctgggcaagtttctaccccagtcagcactactacatcaggagtgaaacctggaactgctccctccaagccacctctaactaaggctccggtgctgccagtgggtactgaacttccagcaggtactctacccagcgagcagctgccaccttttccaggaccttctctaacccagtcccagcaacctctagaggatcttgatgctcaattgagaagaacacttagtccagagatgatcacagtgacttctgcggttggtcctgtgtccatggcggctccaacagcaatcacagaagcaggaacacagcctcagaaggtttctcaagtcaaagaaggccctgtcctagcaactagttcaggagctggtgtttttaagatgggacgatttcaggtttctgttgcagcagacggtgcccagaaagagggtaaaaataagtcagaagatgcaaagtctgttcattttgaatccagcacctcagagtcctcagtgctatcaagtagtagtccagagagtaccttggtgaaaccagagccgaatggcataaccatccctggtatctcttcagatgtgccagagagtgcccacaaaactactgcctcagaggcaaagtcagacactgggcagcctaccaaggttggacgttttcaggtgacaactacagcaaacaaagtgggtcgtttctctgtatcaaaaactgaggacaagatcactgacacaaagaaagaaggaccagtggcatctcctccttttatggatttggaacaagctgttcttcctgctgtgataccaaagaaagagaagcctgaactgtcagagccttcacatctaaatgggccgtcttctgacccggaggccgcttttttaagtagggatgtggatgatggttccggtagtccacactcgccccatcagctgagctcaaagagccttcctagccagaatctaagtcaaagccttagtaattcatttaactcctcttacatgagtagcgacaatgagtcagatatcgaagatgaagacttaaagttagagctgcgacgactacgagataaacatctcaaagagattcaggacctgcagagtcgccagaagcatgaaattgaatctttgtataccaaactgggcaaggtgccccctgctgttattattcccccagctgctcccctttcagggagaagacgacgacccactaaaagcaaaggcagcaaatctagtcgaagcagttccttggggaataaaagcccccagctttcaggtaacctgtctggtcagagtgcagcttcagtcttgcacccccagcagaccctccaccctcctggcaacatcccagagtccgggcagaatcagctgttacagccccttaagccatctccctccagtgacaacctctattcagccttcaccagtgatggtgccatttcagtaccaagcctttctgctccaggtcaaggaaccagcagcacaaacactgttggggcaacagtgaacagccaagccgcccaagctcagcctcctgccatgacgtccagcaggaagggcacattcacagatgacttgcacaagttggtagacaattgggcccgagatgccatgaatctctcaggcaggagaggaagcaaagggcacatgaattacgagggccctggaatggcaaggaagttctctgcacctgggcaactgtgcatctccatgacctcgaacctgggtggctctgcccccatctctgcagcatcagctacctctctaggtcacttcaccaagtctatgtgccccccacagcagtatggctttccagctaccccatttggcgctcaatggagtgggacgggtggcccagcaccacagccacttggccagttccaacctgtgggaactgcctccttgcagaatttcaacatcagcaatttgcagaaatccatcagcaaccccccaggctccaacctgcggaccacttagacctagagacattaactgaatagatctgggggcaggagatggaatgctgagggggtgggtgggggtgggaagtagcctatatactaactactagtgctgcatttaactggttatttcttgccagaggggaatgtttttaatactgcattgagccctcagaatggagagtctcccccgctccagttattggaatgggagaggaaggaaagaacagcttttttgtcaaggggcagcttcagaccatgctttcctgtttatctatactcagtaatgaggatgagggctaggaaagtcttgttcataaggaagctggagaactcaatgtaaaatcaaacccatctgtaatttcgagtgggtggagctcttgcttttggtacatgccctgaatccctcactccctcaagaatccgaaccacaggacaaaaaccacctactgggctctctcctaccctgccctcctcccttttttttacccctctcttttttattttttctttgctctttagaacccagtgaaaaataccagggtactggggtgcaactctttcttatgataggtcattagtgctttaagcaaaagatattagcagctttgactgcagcattagcaattaggaaaaaaaaaaaattaagttccctgcggacatgtaactttgccatcagttttgatgtggaaacactgtgatatataaaatgttgttggacaacagtagttttaagagtaaaatatgaaacgtttaaaaagttccaaaaaaagctagctctgtcctttacttattgagacactttaactttttcctttgtatttccattgtattagataaataaatgtgaatgtaaaattgtataaattactgtacttgaatacttctgtttcccagtgttgcttgctggacattttagtgccttggacttctattgcttctgccattagcatcaacttaccagaccccagatcaataaagggcatgtggaaggaaatcgtaggtccatgtgaccccagcagtccagcagtggttatgccaaagggaaattgaaaaagtatttttttaagtcattcaacaactttgtctagagcaggtgtaagatgagtagggtgggaagttaggttggcatcagtggttaaaaacagaaagttctgtttcgggaatagtgaggagggggtgttgtaacaaaattggacaacttaaaagaatggtgtgtgctgggtgaaagacaaagactaaagaatgaggaaacaaacgtgatgcctggccagtgactgtcatataaacctttcttatttgagctaggcttgaacagacgtgacctagaagaaactgaacataaagagaagggggtggggggctagttttcaagttggggaacctgatagtgaaaagtcacagatggagaaaattgctctcagaaaaactgtttggattgctttcctcttgttgcacatgtaccatgcatttctcagcttggggtactacattttgtggaaagttaatctatctatctttccacatctgaattaatcattctaggaaagaatacttattcctactcatttcctttatgatgtccaaatggttgcaggatcataatctattgtgccacctttatttctagaagtacaactaatatgttcacattttcaaataaataatactccccgtaagtaataactgcaaccaatcagtgttattcagtgctatgcctccttgtaatgggtagttattaattattttcagagctttccggaaatactgtcctaactggctatgtttaggatctttgttatctctgaagacaaagaaagaagctaggactcttaattttggggtgcttcttgactcttagttgggaaactgaaaatatttccaaccttttacccacgtcaatggcatattctgggaatcaccaccaccaccaccactaccacagaaagaggctggaggctcctgtaccctgttcattccttaagggccctgcttcccttagtaagtaagtaagttggtctacggccctaaatatgcaaatgagagctgaaggtttttaaaaggtagaaaggaaaagggcaagggcttccacccctgctttaaaatgatttatttattctctgcttgtatttcttgtggagagagtaaggatagaaccaacaaggggctgagtagctgagaaaggggccacccaagagtgaaacatactttataccagaggagcagtggagcctcatgcagcacattatcatttgttatttgggtttaataataattttgacatcttttcactcatacacaaaaaaagtcagaactggtgttatttactgttgatttcatcctcctgtgtatgaaataacaagcctagaggaatgaactagtgctactgaactgtttaaattatttttgtgttaatagtacactttgagtatctttttccacattaaaaactttctgaattataaatgttttccttacattatttaacaatgtacactgttaaaaataaaaataaaaattcaaa

SEQ ID NO: 182439 - protein, 740 aa, Artificial Sequence
  derived and/or modified sequence
MQPPPRKVKVTQELKNIQVEQMTKLQAKHQAECDLLEDMRTFSQKKAAIEREYAQGMQKLASQYLKRDWPGVKADDRNDYRSMYPVWKSFLEGTMQVAQSRMNICENYKNFISEPARTVRSLKEQQLKRCVDQLTKIQTELQETVKDLAKGKKKYFETEQMAHAVREKADIEAKSKLSLFQSRISLQKASVKLKARRSECNSKATHARNDYLLTLAAANAHQDRYYQTDLVNIMKALDGNVYDHLKDYLIAFSRTELETCQAVQNTFQFLLENSSKVVRDYNLQLFLQENAVFHKPQPFQFQPCDSDTSRQLESETGTTEEHSLNKEARKWATRVAREHKNIVHQQRVLNDLECHGAAVSEQSRAELEQKIDEARENIRKAEIIKLKAEARLDLLKQIGVSVDTWLKSAMNQVMEELENERWARPPAVTSNGTLHSLNADTEREEGEEFEDNMDVFDDSSSSPSGTLRNYPLTCKVVYSYKASQPDELTIEEHEVLEVIEDGDMEDWVKARNKVGQVGYVPEKYLQFPTSNSLLSMLQSLAALDSRSHTSSNSTEAELVSGSLNGDASVCFVKALYDYEGQTDDELSFPEGAIIRILNKENQDDDGFWEGEFNGRIGVFPSVLVEELSASENGDTPWMREIQISPSPKPHASLPPLPLYDQPPSSPYPSPDKRSSLYFPRSPSANEKSLHAESPGFSQASRHTPETSYGKLRPVRAAPPPPTQNHRRPAEKIEDVEITLV

SEQ ID NO: 182440 - DNA, 2055 bp, Artificial Sequence
  derived and/or modified sequence
atgcagaagctggccagccagtacctgaagagagactggcccggcgtgaaggccgacgacagaaacgactacagaagcatgtaccccgtgtggaagagcttcctggagggcaccatgcaggtggcccagagcagaatgaacatctgcgagaactacaagaacttcatcagcgagcccgccagaaccgtgagaagcctgaaggagcagcagctgaagagatgcgtggaccagctgaccaagatccagaccgagctgcaggagaccgtgaaggacctggccaagggcaagaagaagtacttcgagaccgagcagatggcccacgccgtgagagagaaggccgacatcgaggccaagagcaagctgagcctgttccagagcagaatcagcctgcagaaggccagcgtgaagctgaaggccagaagaagcgagtgcaacagcaaggccacccacgccagaaacgactacctgctgaccctggccgccgccaacgcccaccaggacagatactaccagaccgacctggtgaacatcatgaaggccctggacggcaacgtgtacgaccacctgaaggactacctgatcgccttcagcagaaccgagctggagacctgccaggccgtgcagaacaccttccagttcctgctggagaacagcagcaaggtggtgagagactacaacctgcagctgttcctgcaggagaacgccgtgttccacaagccccagcccttccagttccagccctgcgacagcgacaccagcagacagctggagagcgagaccggcaccaccgaggagcacagcctgaacaaggaggccagaaagtgggccaccagagtggccagagagcacaagaacatcgtgcaccagcagagagtgctgaacgacctggagtgccacggcgccgccgtgagcgagcagagcagagccgagctggagcagaagatcgacgaggccagagagaacatcagaaaggccgagatcatcaagctgaaggccgaggccagactggacctgctgaagcagatcggcgtgagcgtggacacctggctgaagagcgccatgaaccaggtgatggaggagctggagaacgagagatgggccagaccccccgccgtgaccagcaacggcaccctgcacagcctgaacgccgacaccgagagagaggagggcgaggagttcgaggacaacatggacgtgttcgacgacagcagcagcagccccagcggcaccctgagaaactaccccctgacctgcaaggtggtgtacagctacaaggccagccagcccgacgagctgaccatcgaggagcacgaggtgctggaggtgatcgaggacggcgacatggaggactgggtgaaggccagaaacaaggtgggccaggtgggctacgtgcccgagaagtacctgcagttccccaccagcaacagcctgctgagcatgctgcagagcctggccgccctggacagcagaagccacaccagcagcaacagcaccgaggccgagctggtgagcggcagcctgaacggcgacgccagcgtgtgcttcgtgaaggccctgtacgactacgagggccagaccgacgacgagctgagcttccccgagggcgccatcatcagaatcctgaacaaggagaaccaggacgacgacggcttctgggagggcgagttcaacggcagaatcggcgtgttccccagcgtgctggtggaggagctgagcgccagcgagaacggcgacaccccctggatgagagagatccagatcagccccagccccaagccccacgccagcctgccccccctgcccctgtacgaccagccccccagcagcccctaccccagccccgacaagagaagcagcctgtacttccccagaagccccagcgccaacgagaagagcctgcacgccgagagccccggcttcagccaggccagcagacacacccccgagaccagctacggcaagctgagacccgtgagagccgccccccccccccccacccagaaccacagaagacccgccgagaagatcgaggacgtggagatcaccctggtgtag

SEQ ID NO: 182441 - DNA, 2223 bp, Artificial Sequence
  derived and/or modified sequence
atgcagcccccccccagaaaggtgaaggtgacccaggagctgaagaacatccaggtggagcagatgaccaagctgcaggccaagcaccaggccgagtgcgacctgctggaggacatgagaaccttcagccagaagaaggccgccatcgagagagagtacgcccagggcatgcagaagctggccagccagtacctgaagagagactggcccggcgtgaaggccgacgacagaaacgactacagaagcatgtaccccgtgtggaagagcttcctggagggcaccatgcaggtggcccagagcagaatgaacatctgcgagaactacaagaacttcatcagcgagcccgccagaaccgtgagaagcctgaaggagcagcagctgaagagatgcgtggaccagctgaccaagatccagaccgagctgcaggagaccgtgaaggacctggccaagggcaagaagaagtacttcgagaccgagcagatggcccacgccgtgagagagaaggccgacatcgaggccaagagcaagctgagcctgttccagagcagaatcagcctgcagaaggccagcgtgaagctgaaggccagaagaagcgagtgcaacagcaaggccacccacgccagaaacgactacctgctgaccctggccgccgccaacgcccaccaggacagatactaccagaccgacctggtgaacatcatgaaggccctggacggcaacgtgtacgaccacctgaaggactacctgatcgccttcagcagaaccgagctggagacctgccaggccgtgcagaacaccttccagttcctgctggagaacagcagcaaggtggtgagagactacaacctgcagctgttcctgcaggagaacgccgtgttccacaagccccagcccttccagttccagccctgcgacagcgacaccagcagacagctggagagcgagaccggcaccaccgaggagcacagcctgaacaaggaggccagaaagtgggccaccagagtggccagagagcacaagaacatcgtgcaccagcagagagtgctgaacgacctggagtgccacggcgccgccgtgagcgagcagagcagagccgagctggagcagaagatcgacgaggccagagagaacatcagaaaggccgagatcatcaagctgaaggccgaggccagactggacctgctgaagcagatcggcgtgagcgtggacacctggctgaagagcgccatgaaccaggtgatggaggagctggagaacgagagatgggccagaccccccgccgtgaccagcaacggcaccctgcacagcctgaacgccgacaccgagagagaggagggcgaggagttcgaggacaacatggacgtgttcgacgacagcagcagcagccccagcggcaccctgagaaactaccccctgacctgcaaggtggtgtacagctacaaggccagccagcccgacgagctgaccatcgaggagcacgaggtgctggaggtgatcgaggacggcgacatggaggactgggtgaaggccagaaacaaggtgggccaggtgggctacgtgcccgagaagtacctgcagttccccaccagcaacagcctgctgagcatgctgcagagcctggccgccctggacagcagaagccacaccagcagcaacagcaccgaggccgagctggtgagcggcagcctgaacggcgacgccagcgtgtgcttcgtgaaggccctgtacgactacgagggccagaccgacgacgagctgagcttccccgagggcgccatcatcagaatcctgaacaaggagaaccaggacgacgacggcttctgggagggcgagttcaacggcagaatcggcgtgttccccagcgtgctggtggaggagctgagcgccagcgagaacggcgacaccccctggatgagagagatccagatcagccccagccccaagccccacgccagcctgccccccctgcccctgtacgaccagccccccagcagcccctaccccagccccgacaagagaagcagcctgtacttccccagaagccccagcgccaacgagaagagcctgcacgccgagagccccggcttcagccaggccagcagacacacccccgagaccagctacggcaagctgagacccgtgagagccgccccccccccccccacccagaaccacagaagacccgccgagaagatcgaggacgtggagatcaccctggtgtag

SEQ ID NO: 182442 - DNA, 1548 bp, Artificial Sequence
  derived and/or modified sequence
atgcagaagctggccagccagtacctgaagagagactggcccggcgtgaaggccgacgacagaaacgactacagaagcatgtaccccgtgtggaagagcttcctggagggcaccatgcaggtggcccagagcagaatgaacatctgcgagaactacaagaacttcatcagcgagcccgccagaaccgtgagaagcctgaaggagcagcagctgaagagatgcgtggaccagctgaccaagatccagaccgagctgcaggagaccgtgaaggacctggccaagggcaagaagaagtacttcgagaccgagcagatggcccacgccgtgagagagaaggccgacatcgaggccaagagcaagctgagcctgttccagagcagaatcagcctgcagaaggccagcgtgaagctgaaggccagaagaagcgagtgcaacagcaaggccacccacgccagaaacgactacctgctgaccctggccgccgccaacgcccaccaggacagatactaccagaccgacctggtgaacatcatgaaggccctggacggcaacgtgtacgaccacctgaaggactacctgatcgccttcagcagaaccgagctggagacctgccaggccgtgcagaacaccttccagttcctgctggagaacagcagcaaggtggtgagagactacaacctgcagctgttcctgcaggagaacgccgtgttccacaagccccagcccttccagttccagccctgcgacagcgacaccagcagacagctggagagcgagaccggcaccaccgaggagcacagcctgaacaaggaggccagaaagtgggccaccagagtggccagagagcacaagaacatcgtgcaccagcagagagtgctgaacgacctggagtgccacggcgccgccgtgagcgagcagagcagagccgagctggagcagaagatcgacgaggccagagagaacatcagaaaggccgagatcatcaagctgaaggccgaggccagactggacctgctgaagcagatcggcgtgagcgtggacacctggctgaagagcgccatgaaccaggtgatggaggagctggagaacgagagatgggccagaccccccgccgtgaccagcaacggcaccctgcacagcctgaacgccgacaccgagagagaggagggcgaggagttcgaggacaacatggacgtgttcgacgacagcagcagcagccccagcggcaccctgagaaactaccccctgacctgcaaggtggtgtacagctacaaggccagccagcccgacgagctgaccatcgaggagcacgaggtgctggaggtgatcgaggacggcgacatggaggactgggtgaaggccagaaacaaggtgggccaggtgggctacgtgcccgagaagtacctgcagttccccaccagcaacagcctgctgagcatgctgcagagcctggccgccctggacagcagaagccacaccagcagcaacagcaccgaggccgagctggtgagcggcagcctgaacggcgacgccagcggcaaggactag

SEQ ID NO: 182443 - DNA, 2055 bp, Artificial Sequence
  derived and/or modified sequence
atgcagaaactagccagccaatatttaaagcgcgactggcctggtgttaaagccgatgaccgtaatgattatcggagcatgtaccctgtgtggaagtctttcctggagggaacaatgcaggtcgcccagtctcgaatgaatatctgtgagaactataaaaactttatctctgaacccgccagaacagtgaggagcctgaaagagcagcaactaaagcggtgcgtcgatcagctgacaaaaattcagaccgagctccaagaaacagtgaaagacctcgccaaggggaagaagaaatacttcgagaccgaacaaatggcgcatgccgttagggagaaagcagacatcgaggccaaatcaaagttgagcctctttcaatctcggatcagccttcaaaaggcgtcagtgaaactcaaagcgagacgttcagagtgtaattccaaagctacccatgctcgcaacgattacctcctgactcttgccgccgccaacgcccaccaggaccgctattaccagacggatctggttaatattatgaaagcactggatggtaacgtttatgatcacctcaaagactatctgattgcctttagcagaaccgaactggaaacttgccaggcagtgcagaacacatttcagtttcttctggagaacagctccaaagtggtcagagattataacctgcagttgtttctacaggagaacgcagtgttccataaaccacagccctttcagttccagccgtgcgactccgacacaagtaggcagctggaatccgaaaccggcactacagaagagcacagcctgaacaaggaagctagaaaatgggccacgcgcgttgccagggagcataagaacattgtgcaccagcagagggttctgaatgaccttgagtgtcacggtgccgccgtgtccgagcagagccgcgccgagctagaacagaagatcgacgaggccagggaaaatattcgaaaagccgaaataattaagcttaaggctgaagctcgcctggacctgctgaagcagatcggcgtgtccgtcgacacatggttgaagagcgccatgaaccaagtgatggaagagttagagaacgaacgttgggcccggcctcctgcggttacctctaacgggactttacacagtctgaatgctgatacggagcgggaggaaggagaggaatttgaagacaacatggacgtcttcgatgacagttctagtagtcctagcggcaccctgcgcaactaccctctgacctgtaaagtggtgtattcctacaaggcctcacagcctgacgagttgacgatcgaggaacatgaggtgctggaagttattgaagatggggatatggaagactgggttaaggcccgtaacaaggttggtcaagtcggctatgtgcctgagaagtacctgcaattcccaaccagtaactcgctcctgtcaatgctccaatccctggccgccctggatagccggtcccacaccagctcaaatagcactgaggcagagctcgtgagtgggagcctcaacggggatgcctcagtgtgcttcgtgaaagccctgtacgactatgaagggcagaccgatgacgagttgagcttccctgagggtgcgatcattcgcattctaaataaagaaaaccaagatgacgatggtttttgggaaggagagttcaacgggcggatcggggtgttcccctccgtgttggtggaggagctgagcgcttctgaaaatggggacaccccgtggatgcgggagatacagatttcccccagtcctaagccccatgcttctctcccccccctgcccctgtacgaccagcctccctccagcccttatccctcacctgataaacggtctagcctgtattttccccggtcaccttctgccaatgagaaaagcttgcatgcagagagcccaggctttagccaggctagcagacatacgccagagacgtcttacggaaagttgcggccagttcgcgccgcgccaccccctccaacgcagaaccatcggcggccggcagagaagatcgaagatgtcgagatcacactggtttag

SEQ ID NO: 182444 - DNA, 2223 bp, Artificial Sequence
  derived and/or modified sequence
atgcagccacctccacggaaggttaaagtgacacaggaactaaagaatatccaggtcgaacagatgacgaagttgcaggccaaacatcaggcagaatgcgatttactcgaagatatgcggacttttagtcagaagaaagccgccatagagcgagaatatgcacagggaatgcagaaactggcctcacaatatttgaaaagggactggcctggtgtaaaggctgatgatagaaacgactatcggtcaatgtacccggtctggaaatcctttctggagggaaccatgcaagtggctcagtctcgaatgaatatatgcgaaaactataaaaactttatctccgaaccagcgagaacagtgcgttctctgaaagagcagcagctgaagcgctgcgtggatcaactgactaaaatccagactgagttacaggagaccgtcaaggatctcgccaagggaaagaaaaagtatttcgaaactgagcagatggctcatgccgtgcgcgagaaggcagatattgaagctaagagtaagctgagtctgttccagtccaggatatcattgcagaaagcctctgtgaaactcaaggcgcgtcggtccgagtgcaatagcaaggctacccacgctcgcaacgattacctcctgacgctcgctgccgctaatgcacaccaggacagatattatcagaccgacctggtgaatattatgaaagcactggacggaaacgtgtatgaccatctgaaagactacctgatcgccttcagtcgcactgaactcgagacctgccaggcggtccagaatacatttcagtttttactcgaaaactccagtaaggtggttagagactacaacctgcaactgttcctgcaggagaatgcagtgttccacaagccacagccctttcaatttcagccttgtgactcagacacatccagacaactagagagcgaaaccggtaccactgaagaacactcattgaacaaagaggcccggaagtgggcgactagagtggcgagggagcacaaaaatatagtgcaccagcaacgagtactcaatgacctcgaatgtcacggcgcggcagtctccgagcaatctcgggccgaactggaacaaaagatcgacgaggccagagagaacatcagaaaagctgagataatcaaattaaaggctgaggcgagactggacctgttgaagcaaatcggtgtgagcgttgatacttggctgaaatctgctatgaaccaggttatggaagaactggagaatgagaggtgggcacgccctccagcagtgactagcaatggaactctgcactccttgaatgctgataccgagagggaagaaggcgaagagtttgaggacaatatggacgtttttgatgactcctcaagttctcctagtggcacattgaggaattatcccctgacatgcaaagtggtgtatagttacaaagcctctcagccagacgaactgaccatagaggaacatgaagtgcttgaggtgattgaagatggagatatggaagactgggtgaaagcccgcaataaagtcggccaggtcggctatgtgcccgaaaagtatctgcagttccccactagtaactccttgctcagcatgctgcagagccttgctgcattagattcccgcagccacacgtcttccaacagtactgaggctgaactcgttagcgggagtctcaatggggatgcatcggtgtgtttcgtgaaggcactgtacgactatgaaggacaaaccgacgacgaattgagctttccagagggagcaattattcggatcctgaacaaggagaaccaggacgacgacggcttctgggagggggaattcaatggacgtattggagtatttccctctgtactggtcgaggaactgtctgcatcggaaaacggcgacactccctggatgagagagatccagatttcgccttccccaaaaccacatgcttccctgccacccctgcctctctacgatcagcccccctcttccccatacccttccccagataaaaggagctccctctattttcctagatcgccttcggccaacgaaaagtccctccatgcagagagcccaggcttttcccaggctagtaggcacacccctgaaacctcctacggcaagctgaggcctgtgcgagcagccccccctcccccaacgcagaaccacaggcggcctgccgagaaaattgaagacgtggagattactctggtctag

SEQ ID NO: 182445 - DNA, 1548 bp, Artificial Sequence
  derived and/or modified sequence
atgcagaagctggcttcgcaatacctgaaacgagattggcctggcgtgaaggccgacgaccgcaatgactatcgtagtatgtaccctgtctggaagtctttcctggagggaacaatgcaggtggctcaatcacgcatgaacatttgcgagaactataaaaactttataagcgagccagctaggaccgtaaggtctctcaaagagcagcagcttaagagatgcgtagatcagttgaccaagatccagaccgagctgcaagaaactgtgaaagacctagccaaaggcaagaaaaaatacttcgaaactgagcagatggctcacgcggtccgcgaaaaggctgatatagaagctaagagtaagctgtctctgttccagtcgcggattagtcttcagaaagcttcggttaagctcaaggccagacgctcagagtgcaactctaaggccactcatgctaggaatgattacttgctgactctggctgcggcgaacgcacatcaggatcgttattaccagaccgatctggtgaatattatgaaggccctggacggaaatgtgtatgatcacctgaaggactaccttatcgcattctctcgaactgagctcgaaacttgtcaggccgtccaaaatacattccagttcctgttagagaactcgagcaaggttgtcagagactataacttgcagttgtttcttcaagagaatgcagtcttccataaaccccagccatttcagtttcaaccgtgcgactccgatacctcaaggcagctggaaagcgaaacagggacaaccgaagagcatagcctcaataaagaggcacgtaagtgggcgactcgagtggccagagagcacaaaaacatcgtccatcagcagcgtgtgctgaacgacctggagtgccatggagcggcagtgagcgaacagtccagagcggagctggagcagaagatcgatgaagcccgggaaaacattcgcaaggccgagataattaaactgaaagctgaggcgcgacttgacctgttgaaacagataggagtgagcgttgacacatggctcaaaagcgctatgaaccaggttatggaagagctggaaaatgaacgatgggcgcgtccacctgccgtgacctcgaatggcacgcttcattccctcaatgcggacactgaacgtgaagaaggtgaagagtttgaagataacatggacgtctttgatgactcatcctctagcccctcgggaacgctccgtaactatcctctaacctgcaaagtagtctactcatataaagcatctcagccagatgaactgacaatagaagagcacgaggtactagaagtgattgaggatggggatatggaggattgggttaaggcccgcaataaagtcggccaggtcggctacgtgcccgaaaaatatctccagtttccgacaagcaacagtttactgtccatgttgcagagcttggcggctctagatagccgttctcacacaagcagtaacagcaccgaggctgaactcgtgtccggctcacttaatggggacgccagtgggaaagactag

SEQ ID NO: 182446 - DNA, 4340 bp, Artificial Sequence
  derived and/or modified sequence
gtccgcctgccgcccgctggcctgctccctccggggcaagtcttgcttcttaagcgctcctttcacacacgcgcgcgctcgctgggccgtcccctcctctccggccctcctcctcctcctggtccttgctaacgctgccgtcggggaggattgatgtcccttcagcatcatgcagccgccgccgaggaaggacattcagtcagaagaaggctgctattgaaagagagtatgcacagggtatgcagaagttggctagtcaatacctgaagagagattggcctggagtaaaagctgatgatcggaatgattacaggagcatgtatcccgtttggaaatcttttctcgagggaacaatgcaggtagcccagtctcggatgaatatatgtgaaaactataaaaacttcatttctgagcctgcaaggacagtgagaagcttaaaagaacagcaactaaaaaggtgtgtggaccagttgacaaagatccaaactgaattacaagagacagtgaaagatttagctaaaggcaaaaagaaatactttgagactgaacagatggctcatgcagtacgagagaaagctgacatcgaggcaaaatctaaacttagtctttttcaatcaagaatcagtttacagaaggcaagtgtaaagttaaaagcccggcgatctgagtgtaattccaaagctacccacgcaaggaatgattatcttcttaccctagcggcagcaaatgcacatcaggatcgctactatcaaacagatttagttaacattatgaaggctcttgatggaaatgtgtatgatcatctcaaggattatttaatagccttcagccggactgagctagaaacatgccaagctgtgcagaacacattccagtttttattagaaaactccagcaaggtggtccgggactacaatcttcagctgtttttgcaagaaaacgctgtatttcacaaaccccagcccttccagttccagccttgtgacagtgatactagccgacagttagaatcagaaactgggaccacagaggagcacagtctaaataaggaagctcgaaaatgggccacacgtgtggcacgtgagcataaaaacattgttcaccaacaacgggttctaaatgatctggagtgtcatggagctgctgtatcagaacaaagccgagcagagctagaacagaaaatagatgaagctagagaaaatattcgtaaagcagagataattaaattgaaagctgaagcccggttggacctgctaaagcagattggtgtttctgtggacacatggctaaagagtgccatgaaccaagtaatggaagaactggaaaatgagcgatgggcccgccctcctgcagtgaccagtaatggcactttacactcgcttaatgcagataccgaaagagaagaaggcgaagagtttgaagataacatggatgttttcgatgacagcagttccagcccttctggcaccttaagaaattatccactcacctgcaaagttgtttattcctacaaggcttctcaaccagatgagttgaccattgaggaacatgaggtgttagaagtgattgaagatggagatatggaagactgggtaaaggctcgaaataaagttggccaagtgggttatgtgccagaaaagtacctacagtttcccacctcgaacagcctcctgagcatgctgcagtccctggccgctttggacagtcggtcacacacgtccagcaattccacggaagcagaactcgtttcaggcagcctcaacggagatgccagtgtatgttttgtgaaagcactttatgattatgagggccagacagatgatgagttatcttttcctgagggagcaataatccgtatcttgaacaaagaaaaccaagatgatgatggcttctgggaaggggaattcaatgggcgtattggagttttcccatcggtgctagtggaagaactttcagcctcagaaaatggtgacactccatggatgagagagattcagatctctccttcccccaagccacacgcctccctgcctccactgccgttgtacgaccagcctcccagcagcccctaccccagcccagataagaggagctccctgtactttccccggtctccttcagcaaacgaaaaaagccttcatgctgagtcaccaggattctcacaggcatcaaggcatactcctgagacctcatatggcaaactgcgacctgtccgggcagctccccctccacctacacagaatcaccgaaggccagcagagaagattgaagatgtggaaatcacactggtgtgatgatgggcttgcccatccattactgctacaatcaaggccaggcttggagtttggccagtcttgttttttaggcacctttgcatgatgatgactcttgaacagagcaaaaaacaaggaggattatgtgtgactgggtggcctggtagactcctcccacgttttgaatatttcgtgccttttttttttgttgtcattttctatgtcatttctcctaccatagcacaaatcctagcggaccctaggagcaaagaggggggcagccctcatgcctaacagtggtctgtttttatatgagactcaagaacaggcctcattccagggcacagtccctaaattactgatcatgtgcactcgtacagtatattactgtgaccacaaggatgtggcaaagattctcatctttcttcaagtggcttttgctcatctgattgagaattaatcagatcatgttggctacataaggaaacagaaggagggatttcaggagaggctggctcctccccaaggttagtccccagactgagaaagtgaaaccttattgggaaaaattggactgccctgaatttagcaccaattgcattaacgcacatctcttccacaactaacagacttaaaataacagtgtccttcgtattaatatctgtgccattcatttagaattagcagagctaatatggaggggctgaactagtagccacatcttgttcatcacatagactaatagaaaggaggctgtggctaaagcagaaatggaacttccggatctgaaattagccaatataatgttcttttgtatttgggtatttttcatcttaatttttacagcatatactcttcttaccagtatccttagaatccaaatgtctagataagttgaggacacatacctgcattgttgagcttctctactggggacgccccggcattattttattcccaagccagcagaccggcccagacagccaggctgtggctggtccagaccaactgctatggtggaaaatgcagcttccaggtcccactaccctgacatttccgtggaaggaagaacctggtggctcgtggaggaaaccagctttctatgagaaaggactgaaggattgcgcaccctgcacaagtacagattgaccaggaaaagacaagtgtcttctgtgtgtcacagggaaagccaggagtggccttctctgcaggccagcaagcctgcagcagcaggtgcccccacgtcaggtgctgactgtctgctgtccgctcctgtagaaggtagggagcacaatacctagggactaagggatgttcgccggttgtggtttgttttttttttttttccttggttaagaaatcaaatttgcagaatttaatctacaagttgtattatgctttgaaaactccatccctcctaagaatcttaaaaaacttgaaatgctcgccaaatgtccccatgggatttttgaccaaaagtaaggtgataactgaagaaatttttagttctttgatcacttcagtgacaatacccattaatgaatcttctccatgatttggggttttttttcgttgttgttttttacacttcttaacctgttgatctatttgaggtcttttgtgtttatcaaacttattcttaagtttaaaaaagaaattaaaagggtggtttttttaagattttaaagtttgctaacatattaaaaatcttcaaatgcttattaaatagagcagttcttgccacccagtcttgtattctgtctttagctagccaaattgtccttgaatttgggttttccacaacctcaaagggttatttgaaatcttttgttgtattttaaaatattttttggaagagctgctaattttattttaaaaaacaaagttgtgaaaacatgcctcctttttaaaaaataacccctccatccaggatatggaatccagcaccacagtgcacaggtcagggctcggagggagcctctgtgcagatgtgctttctttacagtggctgtaaaaagtttgtatttattatgtataaaatgttgaataataaaaaaaatggaatta

SEQ ID NO: 182447 - DNA, 3154 bp, Artificial Sequence
  derived and/or modified sequence
ggcggcgcaggcggccgaccgggagcgcggacaacgcggctgcggctaacccgccgcccggccggctgagaccctcgcgcccctgctcctggggcccccgccccctcgccgtctccgcctccttcctcacacacccccgggccgcccgggccgcccgggccccaagccttcccggtgctcctccctcgtctcctcacactcgctctctggctggggtccgcctgccgcccgctggcctgctccctccggggcaagtcttgcttcttaagcgctcctttcacacacgcgcgcgctcgctgggccgtcccctcctctccggccctcctcctcctcctggtccttgctaacgctgccgtcggggaggattgatgtcccttcagcatcatgcagccgccgccgaggaaggtgaaagttacacaagaactgaaaaacattcaagttgagcagatgacaaaacttcaagccaaacatcaagcagaatgtgatttgcttgaagatatgaggacattcagtcagaagaaggctgctattgaaagagagtatgcacagggtatgcagaagttggctagtcaatacctgaagagagattggcctggagtaaaagctgatgatcggaatgattacaggagcatgtatcccgtttggaaatcttttctcgagggaacaatgcaggtagcccagtctcggatgaatatatgtgaaaactataaaaacttcatttctgagcctgcaaggacagtgagaagcttaaaagaacagcaactaaaaaggtgtgtggaccagttgacaaagatccaaactgaattacaagagacagtgaaagatttagctaaaggcaaaaagaaatactttgagactgaacagatggctcatgcagtacgagagaaagctgacatcgaggcaaaatctaaacttagtctttttcaatcaagaatcagtttacagaaggcaagtgtaaagttaaaagcccggcgatctgagtgtaattccaaagctacccacgcaaggaatgattatcttcttaccctagcggcagcaaatgcacatcaggatcgctactatcaaacagatttagttaacattatgaaggctcttgatggaaatgtgtatgatcatctcaaggattatttaatagccttcagccggactgagctagaaacatgccaagctgtgcagaacacattccagtttttattagaaaactccagcaaggtggtccgggactacaatcttcagctgtttttgcaagaaaacgctgtatttcacaaaccccagcccttccagttccagccttgtgacagtgatactagccgacagttagaatcagaaactgggaccacagaggagcacagtctaaataaggaagctcgaaaatgggccacacgtgtggcacgtgagcataaaaacattgttcaccaacaacgggttctaaatgatctggagtgtcatggagctgctgtatcagaacaaagccgagcagagctagaacagaaaatagatgaagctagagaaaatattcgtaaagcagagataattaaattgaaagctgaagcccggttggacctgctaaagcagattggtgtttctgtggacacatggctaaagagtgccatgaaccaagtaatggaagaactggaaaatgagcgatgggcccgccctcctgcagtgaccagtaatggcactttacactcgcttaatgcagataccgaaagagaagaaggcgaagagtttgaagataacatggatgttttcgatgacagcagttccagcccttctggcaccttaagaaattatccactcacctgcaaagttgtttattcctacaaggcttctcaaccagatgagttgaccattgaggaacatgaggtgttagaagtgattgaagatggagatatggaagactgggtaaaggctcgaaataaagttggccaagtgggttatgtgccagaaaagtacctacagtttcccacctcgaacagcctcctgagcatgctgcagtccctggccgctttggacagtcggtcacacacgtccagcaattccacggaagcagaactcgtttcaggcagcctcaacggagatgccagtgtatgttttgtgaaagcactttatgattatgagggccagacagatgatgagttatcttttcctgagggagcaataatccgtatcttgaacaaagaaaaccaagatgatgatggcttctgggaaggggaattcaatgggcgtattggagttttcccatcggtgctagtggaagaactttcagcctcagaaaatggtgacactccatggatgagagagattcagatctctccttcccccaagccacacgcctccctgcctccactgccgttgtacgaccagcctcccagcagcccctaccccagcccagataagaggagctccctgtactttccccggtctccttcagcaaacgaaaaaagccttcatgctgagtcaccaggattctcacaggcatcaaggcatactcctgagacctcatatggcaaactgcgacctgtccgggcagctccccctccacctacacagaatcaccgaaggccagcagagaagattgaagatgtggaaatcacactggtgtgatgatgggcttgcccatccattactgctacaatcaaggccaggcttggagtttggccagtcttgttttttaggcacctttgcatgatgatgactcttgaacagagcaaaaaacaaggaggattatgtgtgactgggtggcctggtagactcctcccacgttttgaatatttcgtgccttttttttttgttgtcattttctatgtcatttctcctaccatagcacaaatcctagcggaccctaggagcaaagaggggggcagccctcatgcctaacagtggtctgtttttatatgagactcaagaacaggcctcattccagggcacagtccctaaattactgatcatgtgcactcgtacagtatattactgtgaccacaaggatgtggcaaagattctcatctttcttcaagtggcttttgctcatctgattgagaattaatcagatcatgttggctacataaggaaacagaaggagggatttcaggagaggctggctcctccccaaggttagtccccagactgagaaagtgaaaccttattgggaaaa

SEQ ID NO: 182448 - DNA, 1867 bp, Artificial Sequence
  derived and/or modified sequence
aagcagaatgtgatttgcttgaagatatgaggacattcagtcagaagaaggctgctattgaaagagagtatgcacagtattccattgtatggatataccacagtttatccattttcctgttgatggacatggtatgcagaagttggctagtcaatacctgaagagagattggcctggagtaaaagctgatgatcggaatgattacaggagcatgtatcccgtttggaaatcttttctcgagggaacaatgcaggtagcccagtctcggatgaatatatgtgaaaactataaaaacttcatttctgagcctgcaaggacagtgagaagcttaaaagaacagcaactaaaaaggtgtgtggaccagttgacaaagatccaaactgaattacaagagacagtgaaagatttagctaaaggcaaaaagaaatactttgagactgaacagatggctcatgcagtacgagagaaagctgacatcgaggcaaaatctaaacttagtctttttcaatcaagaatcagtttacagaaggcaagtgtaaagttaaaagcccggcgatctgagtgtaattccaaagctacccacgcaaggaatgattatcttcttaccctagcggcagcaaatgcacatcaggatcgctactatcaaacagatttagttaacattatgaaggctcttgatggaaatgtgtatgatcatctcaaggattatttaatagccttcagccggactgagctagaaacatgccaagctgtgcagaacacattccagtttttattagaaaactccagcaaggtggtccgggactacaatcttcagctgtttttgcaagaaaacgctgtatttcacaaaccccagcccttccagttccagccttgtgacagtgatactagccgacagttagaatcagaaactgggaccacagaggagcacagtctaaataaggaagctcgaaaatgggccacacgtgtggcacgtgagcataaaaacattgttcaccaacaacgggttctaaatgatctggagtgtcatggagctgctgtatcagaacaaagccgagcagagctagaacagaaaatagatgaagctagagaaaatattcgtaaagcagagataattaaattgaaagctgaagcccggttggacctgctaaagcagattggtgtttctgtggacacatggctaaagagtgccatgaaccaagtaatggaagaactggaaaatgagcgatgggcccgccctcctgcagtgaccagtaatggcactttacactcgcttaatgcagataccgaaagagaagaaggcgaagagtttgaagataacatggatgttttcgatgacagcagttccagcccttctggcaccttaagaaattatccactcacctgcaaagttgtttattcctacaaggcttctcaaccagatgagttgaccattgaggaacatgaggtgttagaagtgattgaagatggagatatggaagactgggtaaaggctcgaaataaagttggccaagtgggttatgtgccagaaaagtacctacagtttcccacctcgaacagcctcctgagcatgctgcagtccctggccgctttggacagtcggtcacacacgtccagcaattccacggaagcagaactcgtttcaggcagcctcaacggagatgccagtggtaaagactgaaacaaggcactctttatttggtcacgtttgacctaaactgtattgccctggagtaagccttcagtaggataaaaagcacaactttcctcctgtcctataatatgcttttctttatatggtcacgtttgtcctgcacagtagaaccctaaagttaatcattcatcagtgagtaaaaaaattacaact

SEQ ID NO: 182449 - DNA, 2055 bp, Artificial Sequence
  derived and/or modified sequence
atgcagaagctggccagccagtacctgaagagggactggccaggagtgaaggcagatgacagaaatgactaccgctccatgtaccctgtgtggaagagcttcctggagggcaccatgcaggtggcccagagcaggatgaacatctgtgagaactacaagaacttcatcagcgagcccgccaggacagtgcgcagcctgaaggagcagcagctgaagagatgtgtggaccagctgaccaagatccagacagagctgcaggagaccgtgaaggacctggccaagggcaagaagaagtactttgaaacagagcagatggcccatgctgtgcgggagaaggctgacatcgaggccaagagcaagctgagcctcttccagagccgcatcagcctgcagaaggcctctgtgaagctgaaggcccggcgctctgagtgcaacagcaaggccacccacgccagaaatgactacctgctgaccctggccgccgccaatgcccaccaggaccgctactaccagacagacctggtgaacatcatgaaggccctggatggaaatgtgtatgaccacctgaaggactacctgattgccttcagcaggacagagctggagacctgccaggccgtgcagaacaccttccagttcctgctggagaacagcagcaaggtggtgcgggactacaacctgcagctgttcctgcaggagaatgctgtgttccacaagccccagcccttccagttccagccctgtgacagcgacaccagccggcagctggagagcgagaccggcaccacagaggagcacagcctgaacaaggaggccaggaagtgggccaccagggtggcccgggagcacaagaacatcgtgcaccagcagagggtgctgaatgacctggagtgccacggggctgctgtgtctgagcagagcagagctgagctggagcagaagattgatgaggcccgggagaacatcaggaaggccgagatcatcaagctgaaggccgaggcccggctggacctgctgaagcagatcggcgtgtctgtggacacctggctgaagagcgccatgaaccaggtgatggaggagctggagaatgaacgctgggcccggcccccagctgtgaccagcaatggcaccctgcacagcctgaatgctgacacagagcgggaggagggggaggagtttgaggacaacatggatgtgtttgatgacagcagcagcagccccagcggcaccctgaggaactaccccctgacctgcaaggtggtgtacagctacaaggccagccagccagatgagctgaccatcgaggagcacgaggtgctggaggtgattgaagatggagacatggaggactgggtgaaggccaggaacaaggtgggccaggtgggctacgtgcctgagaagtacctgcagttccccaccagcaacagcctgctgtccatgctgcagagcctggccgccctggacagccgcagccacaccagcagcaacagcacagaggccgagctggtgtctggcagcctgaatggagatgcctctgtgtgctttgtgaaggccctgtatgactatgagggccagacagatgatgagctgtccttccctgagggcgccatcatccgcatcctgaacaaggagaaccaggatgatgatggcttctgggagggggagttcaacggccgcatcggggtcttccccagcgtgctggtggaggagctgagcgcctctgaaaatggagacaccccctggatgagggagatccagatcagccccagccccaagccccacgccagcctgccccccctgcccctgtatgaccagccccccagcagcccctaccccagcccagacaagaggagcagcctgtacttccccaggagccccagcgccaatgagaagagcctgcatgctgagagccctggcttcagccaggccagccgccacaccccagagaccagctatggcaagctgcggcctgtgcgggccgcccctcctccacccacccagaaccaccggcggcctgctgagaagattgaagatgtggagatcaccctggtgtag

SEQ ID NO: 182450 - DNA, 2223 bp, Artificial Sequence
  derived and/or modified sequence
atgcagcccccacccaggaaggtgaaggtgacccaggagctgaagaacatccaggtggagcagatgaccaagctgcaggccaagcaccaggccgagtgtgacctgctggaggacatgaggaccttcagccagaagaaggccgccatcgagcgggagtatgcccagggcatgcagaagctggccagccagtacctgaagagggactggccaggagtgaaggcagatgacagaaatgactaccgctccatgtaccctgtgtggaagagcttcctggagggcaccatgcaggtggcccagagcaggatgaacatctgtgagaactacaagaacttcatcagcgagcccgccaggacagtgcgcagcctgaaggagcagcagctgaagagatgtgtggaccagctgaccaagatccagacagagctgcaggagaccgtgaaggacctggccaagggcaagaagaagtactttgaaacagagcagatggcccatgctgtgcgggagaaggctgacatcgaggccaagagcaagctgagcctcttccagagccgcatcagcctgcagaaggcctctgtgaagctgaaggcccggcgctctgagtgcaacagcaaggccacccacgccagaaatgactacctgctgaccctggccgccgccaatgcccaccaggaccgctactaccagacagacctggtgaacatcatgaaggccctggatggaaatgtgtatgaccacctgaaggactacctgattgccttcagcaggacagagctggagacctgccaggccgtgcagaacaccttccagttcctgctggagaacagcagcaaggtggtgcgggactacaacctgcagctgttcctgcaggagaatgctgtgttccacaagccccagcccttccagttccagccctgtgacagcgacaccagccggcagctggagagcgagaccggcaccacagaggagcacagcctgaacaaggaggccaggaagtgggccaccagggtggcccgggagcacaagaacatcgtgcaccagcagagggtgctgaatgacctggagtgccacggggctgctgtgtctgagcagagcagagctgagctggagcagaagattgatgaggcccgggagaacatcaggaaggccgagatcatcaagctgaaggccgaggcccggctggacctgctgaagcagatcggcgtgtctgtggacacctggctgaagagcgccatgaaccaggtgatggaggagctggagaatgaacgctgggcccggcccccagctgtgaccagcaatggcaccctgcacagcctgaatgctgacacagagcgggaggagggggaggagtttgaggacaacatggatgtgtttgatgacagcagcagcagccccagcggcaccctgaggaactaccccctgacctgcaaggtggtgtacagctacaaggccagccagccagatgagctgaccatcgaggagcacgaggtgctggaggtgattgaagatggagacatggaggactgggtgaaggccaggaacaaggtgggccaggtgggctacgtgcctgagaagtacctgcagttccccaccagcaacagcctgctgtccatgctgcagagcctggccgccctggacagccgcagccacaccagcagcaacagcacagaggccgagctggtgtctggcagcctgaatggagatgcctctgtgtgctttgtgaaggccctgtatgactatgagggccagacagatgatgagctgtccttccctgagggcgccatcatccgcatcctgaacaaggagaaccaggatgatgatggcttctgggagggggagttcaacggccgcatcggggtcttccccagcgtgctggtggaggagctgagcgcctctgaaaatggagacaccccctggatgagggagatccagatcagccccagccccaagccccacgccagcctgccccccctgcccctgtatgaccagccccccagcagcccctaccccagcccagacaagaggagcagcctgtacttccccaggagccccagcgccaatgagaagagcctgcatgctgagagccctggcttcagccaggccagccgccacaccccagagaccagctatggcaagctgcggcctgtgcgggccgcccctcctccacccacccagaaccaccggcggcctgctgagaagattgaagatgtggagatcaccctggtgtag

SEQ ID NO: 182451 - DNA, 1548 bp, Artificial Sequence
  derived and/or modified sequence
atgcagaagctggccagccagtacctgaagagggactggccaggagtgaaggcagatgacagaaatgactaccgctccatgtaccctgtgtggaagagcttcctggagggcaccatgcaggtggcccagagcaggatgaacatctgtgagaactacaagaacttcatcagcgagcccgccaggacagtgcgcagcctgaaggagcagcagctgaagagatgtgtggaccagctgaccaagatccagacagagctgcaggagaccgtgaaggacctggccaagggcaagaagaagtactttgaaacagagcagatggcccatgctgtgcgggagaaggctgacatcgaggccaagagcaagctgagcctcttccagagccgcatcagcctgcagaaggcctctgtgaagctgaaggcccggcgctctgagtgcaacagcaaggccacccacgccagaaatgactacctgctgaccctggccgccgccaatgcccaccaggaccgctactaccagacagacctggtgaacatcatgaaggccctggatggaaatgtgtatgaccacctgaaggactacctgattgccttcagcaggacagagctggagacctgccaggccgtgcagaacaccttccagttcctgctggagaacagcagcaaggtggtgcgggactacaacctgcagctgttcctgcaggagaatgctgtgttccacaagccccagcccttccagttccagccctgtgacagcgacaccagccggcagctggagagcgagaccggcaccacagaggagcacagcctgaacaaggaggccaggaagtgggccaccagggtggcccgggagcacaagaacatcgtgcaccagcagagggtgctgaatgacctggagtgccacggggctgctgtgtctgagcagagcagagctgagctggagcagaagattgatgaggcccgggagaacatcaggaaggccgagatcatcaagctgaaggccgaggcccggctggacctgctgaagcagatcggcgtgtctgtggacacctggctgaagagcgccatgaaccaggtgatggaggagctggagaatgaacgctgggcccggcccccagctgtgaccagcaatggcaccctgcacagcctgaatgctgacacagagcgggaggagggggaggagtttgaggacaacatggatgtgtttgatgacagcagcagcagccccagcggcaccctgaggaactaccccctgacctgcaaggtggtgtacagctacaaggccagccagccagatgagctgaccatcgaggagcacgaggtgctggaggtgattgaagatggagacatggaggactgggtgaaggccaggaacaaggtgggccaggtgggctacgtgcctgagaagtacctgcagttccccaccagcaacagcctgctgtccatgctgcagagcctggccgccctggacagccgcagccacaccagcagcaacagcacagaggccgagctggtgtctggcagcctgaatggagatgccagcggcaaggactag

SEQ ID NO: 182452 - DNA, 2055 bp, Artificial Sequence
  derived and/or modified sequence
atgcagaagctggccagccagtacctgaagcgggactggcccggcgtgaaagccgacgatcggaacgactatcggagtatgtaccctgtgtggaagagttttctggagggaactatgcaggttgcacagagtcgtatgaacatttgtgaaaattataagaatttcattagtgagcccgcgaggacagttagaagcttaaaagagcaacaacttaagcggtgcgtggaccaactcaccaaaatccagacagagcttcaggaaaccgtgaaggacttggctaaaggtaaaaaaaaatacttcgagacagagcagatggctcatgcagttagggagaaagctgatatcgaagccaaatctaaactgtctctgttccagtcccgcatcagtctgcagaaggcatccgtaaaacttaaggcacgaaggtccgagtgtaattctaaagccacacatgctcgaaacgattaccttttgacgcttgccgccgccaatgcacatcaggatcggtactatcagacagacctcgtcaacataatgaaggccctagatggcaacgtgtatgatcacttaaaggactatctgatcgccttctctcgaacagaactggagacatgtcaggctgtccagaacacctttcagttcttgcttgagaattcatccaaagtggtaagggattacaacctgcagttattcttgcaggagaacgcagtgttccacaaaccccagccatttcagtttcagccatgtgattcggataccagccgacagctggaatccgaaacagggaccactgaggagcattctctgaacaaggaggcaaggaagtgggccacacgcgtggcaagagaacataagaacatagtccaccagcagagggttctgaacgacttggaatgccatggagctgccgtgtccgaacagagccgggccgagctcgaacagaaaatagacgaagcccgtgagaacattcgtaaggctgaaattatcaagctaaaagcagaagcacggctcgatctgctaaaacagattggagtgtctgtggacacttggcttaagagtgccatgaaccaggtgatggaggagctggagaatgagaggtgggcccgcccccctgccgtcacgagtaacggcacactgcactcgctcaatgctgataccgagagggaggaaggtgaagagttcgaggacaacatggacgttttcgatgactcctcctccagcccttccggtacactcagaaattacccactgacatgcaaagtcgtctactcgtacaaggcctcacagcccgacgagctaaccatcgaggagcacgaggtcttggaagtcatcgaggatggggacatggaagattgggtgaaagctcgcaataaagtaggtcaagtgggatacgtgcccgagaagtacctgcagtttccaacttccaacagcctactctccatgctccagtcactggcggcccttgactcccgcagccatacctccagtaactccaccgaagctgagttggtcagcgggtccctcaatggggatgcctcggtatgcttcgttaaggcactgtacgattatgaaggacagacagatgatgaattatcatttccagagggggccatcatcaggatattgaataaagagaaccaggatgacgatggcttctgggagggtgaattcaatggcaggatcggagtcttccctagtgtcctggttgaggagctttcggcgagcgagaatggcgataccccatggatgcgcgagatacaaattagtccttccccaaaaccgcacgcatctcttccccccttaccgctgtatgatcagcccccctcctccccctatccaagtcctgacaagcgctcaagcttatacttcccccggtcaccgtcggcaaacgagaaatccttgcatgcagaatcccccggtttctcacaggcatcacgccatacacccgaaacctcatacggcaagctaagacccgttcgggcagccccccccccgcccacccaaaatcatagaaggcctgccgagaagatagaggatgtggagatcaccctagtctag

SEQ ID NO: 182453 - DNA, 2223 bp, Artificial Sequence
  derived and/or modified sequence
atgcagccccccccccggaaggtgaaggtgacccaggagctgaagaatattcaggttgaacagatgaccaagctccaagccaaacaccaggctgagtgcgatcttttggaggacatgagaaccttctctcaaaaaaaggctgcaatagagagagagtacgcccaggggatgcaaaagctcgcatctcagtacctgaagcgggattggccaggcgtcaaagcggatgaccggaacgattaccggagtatgtatccggtctggaaaagcttcttagaaggaacgatgcaagtggcacaaagccgcatgaacatttgcgaaaattataaaaacttcattagtgaacctgcccgcacagtccggagcctgaaggagcagcaactcaaacggtgcgtcgaccagctaaccaagatacagaccgaactgcaagaaacagtgaaggacttggctaagggtaaaaaaaagtacttcgaaacagagcagatggcccatgccgttcgtgaaaaggctgacatcgaggccaaatccaagctctccctgttccaaagccggattagtcttcagaaggctagcgtgaaactaaaagcccgccgatctgagtgcaatagcaaggccactcacgcccgcaacgactatctgctgaccctggcagccgcaaacgcccaccaggatagatattaccagacagatctcgttaatatcatgaaggcactcgacggtaatgtctatgaccacctcaaagattaccttatagcgttttcacgcacagaattggaaacgtgtcaggctgttcagaatactttccagttcctgctcgagaacagctctaaggtggtcagggattacaatctgcagctcttccttcaggaaaatgcagtttttcacaaaccacagcccttccaatttcagccttgtgacagcgatacctcacgacaactggaatcagagaccggaactaccgaagagcactcattgaataaggaggctcggaaatgggccacaagagttgccagggaacataaaaatattgtacatcagcagagggttcttaatgatctagagtgtcatggcgctgctgtcagtgagcagtcacgggccgagctggaacaaaagattgacgaggcccgggagaacattcgaaaggccgagattattaagcttaaggccgaggcacgcctcgacctgctaaaacagatcggcgtatctgtggatacatggctcaagagtgccatgaatcaggttatggaggaactcgaaaacgaaagatgggctcgtcccccagctgtcacctctaacggtaccctacacagcctgaacgccgacacagaacgcgaggagggggaggagttcgaagacaatatggacgtttttgacgactcgtcatcttcaccaagtggcaccctgcggaattacccactcacatgcaaagtggtttattcatataaggcctctcaacctgatgaattaaccatcgaagaacacgaagtcctagaggtaattgaggacggagacatggaagactgggtgaaggcgaggaacaaagttggccaggtgggatatgttcccgagaaatatctccagttccccacatccaattcactgctgtccatgctgcagtcattggcagccctcgatagccgtagccatacctctagcaactcaacagaggcagagctcgtgagcggctcactgaacggggacgccagtgtgtgcttcgtcaaagcattatatgactatgaaggccagacagacgatgagctgagctttcccgagggagccattattaggatccttaataaagaaaaccaggacgacgatggtttctgggaaggcgagttcaacggcaggattggcgtgttcccatctgttctcgtggaggaacttagtgcatcagaaaatggtgatactccgtggatgcgagagattcagatttcgccctctcccaaaccccacgcatccctcccgccacttcctctgtacgatcagccaccttcctctccttacccttccccagataagcgctcaagcctgtacttcccccggtcgcccagcgccaacgagaaaagtctgcacgccgaaagccctggatttagccaggccagtaggcacacgccagagacgtcttatggcaagctgcgtcctgtgagagctgctccccctccacctacccaaaaccatcgtagacctgctgagaagatcgaagacgttgagattacactggtttag

SEQ ID NO: 182454 - DNA, 1548 bp, Artificial Sequence
  derived and/or modified sequence
atgcagaagctggccagccagtacctgaagcgggactggcccggcgtgaaggctgatgatagaaatgactatcggtcaatgtatcctgtatggaaatctttcctggaagggacgatgcaggtggctcagtctaggatgaacatctgcgaaaactacaagaatttcatatctgaaccggctagaactgtgcggagcctcaaagaacagcaactaaaaaggtgcgtagaccagcttaccaagatccaaacagagcttcaggagacggttaaggatctggctaaaggcaaaaaaaagtattttgaaacagaacagatggcccacgccgtgagagagaaggccgatattgaagccaaatctaaattaagcctcttccagtctagaatctcactgcagaaagcatccgtgaagcttaaggctcggaggtcggagtgtaatagtaaggccacacatgcccgcaatgactacctcctcacactggcagccgccaacgctcatcaggatcggtactatcagactgatctggtgaatatcatgaaagccctcgatgggaacgtttacgaccatctcaaggactatttgattgcctttagccgcacggaactggaaacatgtcaagccgttcagaacactttccagttcctccttgagaatagctctaaagttgtaagagattataacctccagctcttcctacaagaaaacgcagtttttcacaaaccccaaccttttcagtttcagccatgcgattcagatacctcgcgacagctggaatccgaaaccggtaccacagaagaacattctttgaataaggaagcgagaaaatgggctactagagtagcgagagagcataaaaacattgtgcaccaacagagagttctgaatgacctggaatgtcacggggctgcagtgtctgagcagtctagggccgaattagagcagaagatcgatgaggcaagggaaaacatcagaaaggccgagattattaaactgaaggctgaggccagactggacctcctcaaacagattggtgtttctgtggacacatggctgaagagcgctatgaaccaagtgatggaagaattagagaatgagcggtgggcacggccaccagccgtaacctctaacggcacccttcatagtttgaacgccgatactgaaagggaggagggggaagagtttgaagacaacatggacgtctttgacgatagctcatcgtctccatccggaacattaaggaactaccccctcacatgtaaggtcgtttatagttataaagcatctcagccagatgagttaaccatagaggagcatgaggtgctggaagtaattgaagacggcgatatggaggactgggtcaaggcacgaaataaagtgggccaggtcgggtacgtgcccgagaaatatctacagttccctaccagtaattctctcctctctatgcttcagagtctagccgctctggattctcggagccacacctctagcaacagcactgaagccgagctcgtctcaggctccctgaacggcgacgccagtggaaaggactag

SEQ ID NO: 182455 - DNA, 2055 bp, Artificial Sequence
  derived and/or modified sequence
atgcagaagctggctagtcagtatctgaaaagagactggccaggggtgaaagctgacgatcggaacgattataggtccatgtaccctgtgtggaaatccttcctggaaggcacaatgcaggttgcacaaagccgaatgaatatctgtgaaaattacaaaaacttcatctctgaacccgcacgaacggtgagatccctcaaggaacaacagctgaaacgctgtgtggatcaactgaccaagatacaaactgaacttcaagagaccgttaaagatctggctaaaggaaaaaagaagtattttgagacggaacagatggcccacgccgtgcgcgaaaaagcagatatcgaagcaaaatccaaattgtctttgttccagagcaggatctccttacaaaaagcatctgtgaagctgaaggctcgaagatctgaatgcaacagcaaggctacgcacgccagaaacgactatctgctgacactcgccgctgctaacgctcaccaggatcgttactaccaaacggatctggtcaacatcatgaaagctttggatggaaatgtctatgaccacctaaaggactacctgattgcctttagcagaacggagctcgaaacctgccaggcggttcagaacacattccagtttctcctggaaaactcatcaaaagtggtgagggactataacttgcagctctttcttcaagagaatgcagtcttccacaaaccacaacccttccagttccagccctgcgactcagatactagccgccagctagagagcgagactggaactacagaggagcactccttgaacaaggaggcacgcaagtgggctactagggtagctcgtgaacataagaatatcgtgcatcaacagagggtattgaatgatctggagtgtcacggagccgctgttagtgaacagagccgtgctgaactagagcagaaaatagacgaggccagagagaacattaggaaagcagagatcatcaaattaaaggcagaggcacggttggacctgctgaaacagataggtgttagcgtagatacttggctgaagtctgctatgaatcaggttatggaagagctagagaatgaaagatgggccaggccacccgctgtgacctccaacggcacactccacagtctcaacgcggacaccgaacgcgaagagggcgaagagttcgaggataacatggacgtctttgacgactccagtagctcgccatctggcactctgcgcaactaccccctcacatgtaaggttgtgtactcttataaagcatctcaacccgatgaattaacaatagaagagcatgaagtcttagaagtgatcgaggacggtgacatggaggactgggtgaaggccaggaacaaagtaggacaggtggggtatgtgcctgagaaatatctgcaattccccacctcaaatagcctgctgagcatgctgcaatccttagccgcactggattcgcgaagccacaccagtagcaattctacagaagccgagttagtctccggcagccttaatggggatgctagtgtatgtttcgtgaaagccttgtacgattacgaaggacagacagatgacgaactgtctttccccgagggcgcaattattagaattctcaacaaggagaatcaagacgatgacgggttttgggaaggcgaatttaatgggaggattggcgtttttccctccgtccttgtggaggaactctcagcatctgagaatggcgacaccccttggatgagagaaatccagattagtccgagtccaaagcctcacgctagcctgcctcctcttccgctgtatgatcagcctccttcatccccctatcccagccctgacaaacggtcctctctctactttccgcgttcaccttcagcaaacgagaagtccctacatgcggagagccctggcttttcccaggcatctagacacacaccagaaacatcctatggaaagctgcggcctgtgcgggctgcaccgcctccccctacgcagaaccatcgacggccagctgaaaagatcgaagacgtggaaattaccctggtgtag

SEQ ID NO: 182456 - DNA, 2223 bp, Artificial Sequence
  derived and/or modified sequence
atgcagcccccaccgaggaaggtgaaggttacgcaagagcttaaaaatattcaggtggagcagatgacaaagctgcaggccaagcaccaggcggaatgtgatctgttagaggacatgagaacatttagtcagaaaaaggctgccatcgagcgcgagtacgcgcaggggatgcagaagctggcttctcaatatctgaagcgggactggcctggcgtgaaggccgacgaccggaatgattatcgaagtatgtaccccgtatggaaatcttttttagaaggcactatgcaggtcgcccagtcaagaatgaacatatgtgaaaattataaaaattttatctccgagccagctcgtactgtgaggagcctcaaggagcagcagttaaagcggtgcgttgatcagctgactaaaattcagaccgagctccaggaaactgtcaaggatctggcaaaggggaagaagaagtacttcgagactgagcagatggcgcatgctgtcagagaaaaggccgatatagaagccaaatccaagctcagcctgttccagagtaggatatctctccagaaggccagcgtgaaattgaaggctaggagaagcgagtgtaatagcaaggctacacacgcccgaaatgattatctgcttaccttggctgccgcaaatgcccatcaagacagatactatcagaccgacctcgttaatattatgaaggcgcttgatgggaacgtctacgatcatctcaaagactatctcattgcattctcccggacagagcttgagacttgtcaggcagtgcagaacacatttcaatttctgctcgaaaactcctctaaagtggtacgggattacaatctgcagcttttcttgcaggaaaacgcagtgttccacaagccgcaacccttccagttccagccttgcgattctgacaccagccggcagctcgagagcgagactggcacaacggaggaacactcgttgaacaaggaggcacggaagtgggcaactagggttgctcgggagcataaaaatatcgtccaccaacagcgggtactcaatgacctggaatgccacggcgcagccgtgtccgagcaaagcagggctgaattggagcagaagattgatgaggcccgtgagaacattagaaaagccgagatcattaagctgaaggctgaggctaggctggatctactcaagcaaatcggtgtttccgtcgacacctggctgaaaagcgcaatgaaccaagtcatggaggaactggagaatgagcggtgggctaggcccccagccgtgacctctaacggtacccttcacagtctaaacgcggacaccgagcgagaggaaggcgaagagttcgaagacaacatggacgtgtttgacgactcgtcctcaagcccttccggaaccctgcgcaactaccccttgacttgcaaggtcgtttacagctacaaagcctcccagccagacgaacttaccatcgaagaacatgaggtacttgaagttattgaggatggcgatatggaggactgggtaaaagctcggaataaggtcggtcaggtgggctacgttcccgaaaagtacctgcaattccctacctcaaacagtctgctgtcgatgttgcaatcgctggctgccctcgattcaagatcccatacctctagcaattctaccgaggccgagctggtctctggttctctcaacggggacgctagtgtgtgctttgtgaaggcattgtatgactacgaggggcagaccgacgatgaactctcttttccggaaggggcaattatcagaattctgaacaaggagaatcaagacgatgatggtttttgggaaggagaattcaatgggaggatcggcgttttccctagcgtcttggtcgaggaactctccgccagcgaaaatggcgacacgccctggatgagagaaattcagatcagcccttctcctaagccccatgcttctttgcctcccttgccactttacgaccagccaccctcttccccttatcccagcccagacaagagatcatccctttactttccacgatctccttctgccaacgagaaaagcctccacgccgaaagtccagggtttagccaagcttccagacataccccagaaacttcttatggcaagctgcgccctgtgcgcgcagcccctccacccccaacccagaatcatcggaggcctgcagagaaaatcgaggacgtggaaattacattggtttag

SEQ ID NO: 182457 - DNA, 1548 bp, Artificial Sequence
  derived and/or modified sequence
atgcagaagctggcctctcagtatcttaagagagattggccgggagtgaaggccgacgacaggaacgactatagatcaatgtatcccgtctggaagagtttcctagaaggaaccatgcaggttgcgcaaagccggatgaacatctgtgaaaattataaaaatttcataagcgagccagccagaaccgttagatcactgaaggagcaacagctcaaacggtgtgtggaccagctcactaaaatccaaaccgagctccaggaaacggttaaagatctggcaaagggaaagaagaagtatttcgaaaccgaacagatggctcacgctgttagagagaaggctgacattgaagcaaagtccaaactcagcctctttcagagccgaatttcattgcagaaggcctctgttaagctaaaggctcgcaggtctgaatgcaactccaaggccacacacgccagaaacgactatctactcacgctggcggcagccaatgcacaccaggatcggtactaccagactgaccttgtcaacatcatgaaagctttggatggcaatgtctacgaccacctgaaggattatcttattgccttctctcgaacagaactggagacctgccaggctgtacagaacacctttcaatttcttcttgaaaatagctcaaaggtggtgcgcgattacaatctgcagctgttccttcaagagaacgctgtgttccacaaaccgcagcccttccaatttcagccatgtgattctgacacaagcaggcagttagagagcgagaccggcactactgaagagcacagcctgaataaagaggctaggaagtgggctacccgcgtagcaagagagcataaaaacatcgtacaccagcagcgggtgctcaatgacctggaatgtcacggtgctgccgtgtcggaacagtccagagccgagctggaacagaagatcgacgaggcccgagagaacattcgcaaagccgagatcatcaagctgaaggcagaagctagactggatcttctgaaacagattggcgtgtcagtcgacacttggctcaagagtgcaatgaaccaggtaatggaagagctggaaaatgaaagatgggcacggcctcctgctgttacttccaacgggaccctgcactccctgaacgccgacactgagagggaggagggcgaagagtttgaagataatatggacgtctttgacgactcctctagtagcccatcggggacgctcagaaattatcccctcacttgtaaagtggtgtactcttacaaggcctctcagcccgatgagcttaccatcgaagaacatgaggtcctggaagtcatcgaggacggagatatggaggattgggtgaaggcacgcaacaaggtgggccaggtcggatacgtgccggagaagtacctccaattccctactagtaactctctgctgtctatgctgcagtcacttgcggcactggacagccggagccatactagcagtaacagcactgaggcagagctagtatccggaagcttaaacggcgatgcttcgggtaaagactag

SEQ ID NO: 182458 - protein, 1638 aa, Artificial Sequence
  derived and/or modified sequence
MSGEVRLRQLEQFILDGPAQTNGQCFSVETLLDILICLYDECNNSPLRREKNILEYLEWAKPFTSKVKQMRLHREDFEILKVIGRGAFGEVAVVKLKNADKVFAMKILNKWEMLKRAETACFREERDVLVNGDNKWITTLHYAFQDDNNLYLVMDYYVGGDLLTLLSKFEDRLPEDMARFYLAEMVIAIDSVHQLHYVHRDIKPDNILMDMNGHIRLADFGSCLKLMEDGTVQSSVAVGTPDYISPEILQAMEDGKGRYGPECDWWSLGVCMYEMLYGETPFYAESLVETYGKIMNHKERFQFPAQVTDVSENAKDLIRRLICSREHRLGQNGIEDFKKHPFFSGIDWDNIRNCEAPYIPEVSSPTDTSNFDVDDDCLKNSETMPPPTHTAFSGHHLPFVGFTYTSSCVLSDRSCLRVTAGPTSLDLDVNVQRTLDNNLATEAYERRIKRLEQEKLELSRKLQESTQTVQALQYSTVDGPLTASKDLEIKNLKEEIEKLRKQVTESSHLEQQLEEANAVRQELDDAFRQIKAYEKQIKTLQQEREDLNKLEVHTEALAAEASKDRKLREQSEHYSKQLENELEGLKQKQISYSPGVCSIEHQQEITKLKTDLEKKSIFYEEELSKREGIHANEIKNLKKELHDSEGQQLALNKEIMILKDKLEKTRRESQSEREEFESEFKQQYEREKVLLTEENKKLTSELDKLTTLYENLSIHNQQLEEEVKDLADKKESVAHWEAQITEIIQWVSDEKDARGYLQALASKMTEELEALRNSSLGTRATDMPWKMRRFAKLDMSARLELQSALDAEIRAKQAIQEELNKVKASNIITECKLKDSEKKNLELLSEIEQLIKDTEELRSEKGIEHQDSQHSFLAFLNTPTDALDQFETVDSTPLSVHTPTLRKKGCPGSTGFPPKRKTHQFFVKSFTTPTKCHQCTSLMVGLIRQGCSCEVCGFSCHITCVNKAPTTCPVPPEQTKGPLGIDPQKGIGTAYEGHVRIPKPAGVKKGWQRALAIVCDFKLFLYDIAEGKASQPSVVISQVIDMRDEEFSVSSVLASDVIHASRKDIPCIFRVTASQLSASNNKCSILMLADTENEKNKWVGVLSELHKILKKNKFRDRSVYVPKEAYDSTLPLIKTTQAAAIIDHERIALGNEEGLFVVHVTKDEIIRVGDNKKIHQIELIPNDQLVAVISGRNRHVRLFPMSALDGRETDFYKLSETKGCQTVTSGKVRHGALTCLCVAMKRQVLCYELFQSKTRHRKFKEIQVPYNVQWMAIFSEQLCVGFQSGFLRYPLNGEGNPYSMLHSNDHTLSFIAHQPMDAICAVEISSKEYLLCFNSIGIYTDCQGRRSRQQELMWPANPSSCCYNAPYLSVYSENAVDIFDVNSMEWIQTLPLKKVRPLNNEGSLNLLGLETIRLIYFKNKMAEGDELVVPETSDNSRKQMVRNINNKRRYSFRVPEEERMQQRREMLRDPEMRNKLISNPTNFNHIAHMGPGDGIQILKDLPMNPRPQESRTVFSGSVSIPSITKSRPEPGRSMSASSGLSARSSAQNGSALKREFSGGSYSAKRQPMPSPSEGSLSSGGMDQGSDAPARDFDGEDSDSPRHSTASNSSNLSSPPSPASPRKTKSLSLESTDRGSWDP

SEQ ID NO: 182459 - DNA, 4917 bp, Artificial Sequence
  derived and/or modified sequence
atgtcgggggaagttcggctcagacagctcgagcaatttattcttgatggacctgcgcaaaccaacggtcagtgtttcagtgtggagacattactggatatcctaatctgcctctacgatgaatgtaataattcaccactgcgccgagagaagaacattttggaatacctggaatgggctaaacctttcacctccaaggtcaagcagatgcgactgcatagggaggacttcgagattctcaaggtgatcggtcgaggagcatttggggaagtggcagtggttaagctaaaaaacgctgataaagtgtttgctatgaaaattctcaacaagtgggaaatgttgaagcgcgccgagacagcttgcttcagggaggagagagacgtgctggtcaatggagacaacaaatggattacaactctgcattatgcattccaagatgataataacctgtacctggttatggactattacgtcggtggagacctgcttactttgctaagcaaattcgaggataggctgcccgaagatatggcacgcttctacctggcggaaatggtgatcgccatcgattctgtgcatcagttgcactatgtacatagagacatcaaaccagacaacatcctgatggatatgaatggccacatccgcttagccgatttcggatcatgcctgaagcttatggaggacggcacggtgcaaagctcagtggcagtcggaaccccagactacattagccctgaaatcctccaagccatggaggacggtaagggtaggtacggaccagaatgcgactggtggtcattaggggtctgtatgtatgagatgctctacggcgagactcctttttacgccgagtccttggttgaaacctatgggaagattatgaatcataaagaacggtttcaattccccgcccaggttacggacgtctccgagaacgccaaggacctgatccgtcgtctgatttgtagtcgagagcaccgcctgggtcagaatggaatagaggactttaagaaacatccttttttctccggaatcgactgggacaacatccggaattgtgaagctccatacatcccggaggtatcatcccctacggatacctccaattttgacgtggatgacgactgccttaagaattccgaaacaatgcctccgcccacccacaccgcatttagcgggcaccatctaccttttgtagggttcacgtacacaagctcatgtgtgcttagcgaccggagctgtctgagagtaaccgcaggaccaaccagcttagacctggatgtgaatgtccaacggacccttgacaacaacttggccaccgaggcctatgagcggcggatcaagagattggagcaggagaaacttgaactgagccgcaagctacaagaatctacccagacagtgcaagctctgcagtactcaactgtcgacggccctctgaccgccagcaaggacctagaaatcaagaacttgaaagaagaaattgaaaagctgcgcaagcaggtgaccgaatcttcacacctcgagcagcaattagaagaagccaacgcagtgcgacaggagctggatgacgcattcaggcagattaaggcctacgagaagcagatcaaaactctccagcaggaaagagaggacctcaataaactagaagtgcatacggaggccttggccgccgaagcgtccaaagaccgcaaactccgggagcagagtgagcactacagcaagcagctggaaaacgaactcgagggcctaaagcagaagcagatatcttatagcccaggtgtttgctcaatcgagcaccagcaggaaattaccaagctaaagacagacttagagaagaagtccatcttttatgaggaggagctttccaagagagagggaattcacgcaaacgagatcaagaatctgaagaaggaactccacgattctgagggacagcagttagcattaaacaaggagataatgattttgaaggataagttggagaagactagacgagaatctcaaagcgaaagagaggaattcgaatctgagttcaagcaacaatacgaacgtgaaaaagtgctgttgaccgaggagaataagaaactgacctcagagctggacaaactgaccacgctgtatgagaatctgagtattcacaatcagcaactcgaggaggaggtgaaggacctggctgataagaaggagtctgtggcccactgggaggcccagatcaccgagatcatccagtgggtgtcagatgaaaaagatgccagaggctatctacaggcgctcgccagtaaaatgaccgaagaactagaggctctccggaactcatcactcgggactcgggccactgacatgccttggaagatgagacggtttgctaagttagacatgagtgcgagactcgagctgcaaagtgctctagatgctgagatcagagctaagcaggctatccaggaggaactgaataaggttaaggcctccaacattataaccgaatgtaaactgaaagactccgagaaaaagaatttagagctactttccgagatagagcagttaatcaaggatacagaagagcttcgttctgagaaaggaatcgagcaccaggacagtcaacactcatttttggccttccttaacacgccaactgatgctttggaccagttcgagacggtcgatagtacacctctctcagtgcatacaccaactctgagaaaaaagggctgtccggggtcaacgggattcccacccaagcgaaagacacaccaattctttgttaaaagttttaccacccctacaaagtgtcaccaatgcactagcctgatggtcggcctgatccggcagggatgctcatgcgaagtttgcgggttctcctgccacattacctgtgtcaacaaggccccgacaacgtgtcccgtccccccagaacaaacaaaaggcccgctaggtattgatccccagaaggggataggcacagcctatgaggggcacgtgcggattcccaagcccgcgggcgtcaagaaaggttggcagcgtgctctggccatagtatgtgattttaaactcttcctctatgatatagccgagggtaaagcgtctcagcctagtgtcgtcatttcccaggtgattgacatgagggacgaggagttctccgtctcctcggtgctggccagtgatgtgatccacgcttccagaaaggacataccctgcatttttagagtgactgcctcccagctttccgcaagcaataacaaatgtagcatcctgatgcttgccgacacggaaaacgaaaaaaataaatgggtgggggtgctctctgagctgcacaagatactcaaaaagaataaatttagggatcggagcgtgtatgtgccaaaagaagcctatgactcgactctgcccctgatcaagactactcaggcagccgccattatcgaccacgagcgtatagccctgggtaatgaggagggtctgttcgtggtacacgttaccaaggacgagatcattagagtgggcgataataagaagatacaccagatcgagttaattcctaatgatcagctggttgccgtcatttctggccggaatcgtcacgttagactctttcccatgagtgcactggatggtcgcgagactgacttttataagctgagcgagaccaaagggtgtcaaacagtgaccagcgggaaagtgagacatggcgctctgacttgcttgtgtgtggcaatgaaaagacaagtgctctgctacgagttgttccagtccaaaactcgccacagaaaatttaaagagatccaggtgccctataacgtgcagtggatggccatattctctgagcaactttgtgtgggcttccagagcggctttttgcggtatcctttgaacggagagggaaatccctacagtatgcttcattctaatgatcatacactgtcattcattgctcaccaacctatggatgctatttgtgcagtggagatctcctcaaaggagtatctgctgtgttttaattctatcggcatatacactgattgccagggccggcgttcacggcagcaggaattgatgtggccagccaacccctccagttgttgctacaatgcaccttacctttccgtttatagtgaaaacgccgtggatattttcgacgtgaactctatggaatggatccagacgctgccgctgaagaaagtccggcctctaaataatgagggctctttgaacttactggggctcgaaacaatccggttaatctatttcaagaataaaatggccgagggcgacgaactggtggtgcctgaaacatcagataattctcgtaaacaaatggtccgtaatattaataacaagaggaggtactctttcagggtaccagaagaggaacgcatgcagcagcgcagagaaatgttgcgggaccccgagatgagaaacaagctgatctcaaaccctactaattttaatcacattgctcatatgggcccaggggatggtatccaaattctgaaggacctccctatgaatccccgacctcaggagtcaaggaccgtgttcagtgggagcgtatctatcccatcaattaccaaatctcgtcccgaacctggtcggagcatgagcgccagtagtgggctgtccgcacggagttccgcacagaacggcagcgccttgaagagagaattttctgggggatcatacagtgccaagcgccagccaatgccttcgccctccgagggatcgctgtcctcaggcggaatggatcagggcagtgacgcacccgcgcgcgatttcgatggcgaggactcagatagtccccggcatagtacagccagcaacagctcaaacctttcctcacctccatccccagcttcccctcggaaaacaaaatctctctctctagaatctacagatagagggtcttgggacccctag

SEQ ID NO: 182460 - DNA, 4917 bp, Artificial Sequence
  derived and/or modified sequence
atgtctggagaggtgcggctgcggcagctggagcagttcatcctggatggccctgcccagaccaacggccagtgcttctctgtggagaccctgctggacatcctgatctgcctgtatgatgagtgcaacaacagccccctgcggcgggagaagaacatcctggagtacctggagtgggccaagcccttcaccagcaaggtgaagcagatgaggctgcacagagaagattttgagatcctgaaggtgattggccgcggggccttcggggaggtggccgtggtgaagctgaagaatgctgacaaggtgtttgccatgaagatcctgaacaagtgggagatgctgaagagagctgagacagcctgcttccgggaggagagagatgtgctggtgaatggagacaacaagtggatcaccaccctgcactacgccttccaggatgacaacaacctgtacctggtgatggactactacgtgggcggggacctgctgaccctgctgagcaagtttgaggaccggctgcctgaggacatggcccgcttctacctggccgagatggtgattgccattgattctgtgcaccagctgcactacgtgcaccgggacatcaagccagacaacatcctgatggacatgaatggccacatccggctggccgactttggcagctgcctgaagctgatggaggatggcaccgtgcagagctctgtggccgtgggcaccccagactacatcagccctgagatcctgcaggccatggaggatggcaagggccgctatggcccagaatgtgactggtggagcctgggcgtgtgcatgtatgagatgctgtatggagagacccccttctacgccgagagcctggtggagacctacggcaagatcatgaaccacaaggagcgcttccagtttcctgcccaggtgacagatgtgtctgaaaatgccaaggacctgatcagaagactcatctgcagccgggagcaccggctgggccagaatggaattgaggacttcaagaagcaccccttcttcagcggcatcgactgggacaacatccggaactgtgaggccccctacatccctgaggtgagcagccccacagacaccagcaactttgatgtggatgatgactgcctgaagaacagcgagaccatgcccccacccacccacacagccttcagcggccaccacctgccctttgtgggcttcacctacaccagcagctgtgtgctgagtgacaggagctgcctgcgggtgacagctggccccaccagcctggacctggatgtgaatgtgcagaggaccctggacaacaacctggccacagaggcctatgaaagacgcatcaagaggctggagcaggagaagctggagctgagcaggaagctgcaggagagcacccagacagtgcaggccctgcagtacagcacagtggatggccccctgacagccagcaaggacctggagatcaagaacctgaaggaggagattgagaagctgaggaagcaggtgacagagagcagccacctggagcagcagctggaggaggccaatgctgtgcggcaggagctggatgatgccttccggcagatcaaggcctatgagaagcagatcaagaccctgcagcaggagcgggaggacctgaacaagctggaggtgcacacagaggccctggccgctgaggccagcaaggacaggaagctgcgggagcagagcgagcactacagcaagcagctggagaatgagctggagggcctgaagcagaagcagatctcctacagccctggggtgtgcagcattgagcaccagcaggagatcaccaagctgaagacagacctggagaagaagagcatcttctatgaggaggagctgagcaagcgggagggcatccacgccaatgagatcaagaacctgaagaaggagctgcatgacagcgagggccagcagctggccctgaacaaggagatcatgatcctgaaggacaagctggagaagacccggcgggagagccagagcgagcgggaggagtttgagagcgagttcaagcagcagtatgaaagagagaaggtgctgctgacagaggagaacaagaagctgaccagcgagctggacaagctgaccaccctgtatgagaacctgagcatccacaaccagcagctggaggaggaggtgaaggacctggccgacaagaaggagagcgtggcccactgggaggcccagatcacagagatcatccagtgggtgtctgatgagaaggatgcccggggctacctgcaggccctggccagcaagatgacagaggagctggaggccctgaggaacagcagcctgggcacccgggccacagacatgccctggaagatgagaagatttgccaagctggacatgtctgcccggctggagctgcagagcgccctggatgctgagatccgggccaagcaggccatccaggaggagctgaacaaggtgaaggccagcaacatcatcacagagtgcaagctgaaggacagcgagaagaagaacctggagctgctgtctgaaattgagcagctgatcaaggacacagaggagctgcggtctgagaagggcatcgagcaccaggacagccagcacagcttcctggccttcctgaacacccccacagatgccctggaccagtttgagaccgtggacagcacccccctgtctgtgcacacccccaccctgaggaagaagggctgccccggcagcacaggcttcccccccaagaggaagacccaccagttctttgtgaagagcttcaccacccccaccaagtgccaccagtgcaccagcctgatggtgggcctcatccggcagggctgcagctgtgaggtgtgtggcttcagctgccacatcacctgtgtgaacaaggcccccaccacctgccctgtgcccccagagcagaccaagggccccctgggcatcgacccccagaagggcattggaacagcctatgagggccacgtgcgcatccccaagccagctggggtgaagaagggctggcagagggccctggccatcgtgtgtgacttcaagctgttcctgtatgacattgctgagggcaaggccagccagcccagcgtggtgatcagccaggtgattgacatgagagatgaggagttctctgtgtcctctgtgctggccagtgatgtgattcatgccagcaggaaggacatcccctgcatcttccgggtgacagccagccagctgagcgccagcaacaacaagtgcagcatcctgatgctggccgacacagaaaatgagaagaacaagtgggtgggcgtgctgtctgagctgcacaagatcctgaagaagaacaagttccgggacagatctgtgtatgtgcccaaggaggcctatgacagcaccctgcccctcatcaagaccacccaggccgccgccatcatcgaccacgagagaattgccctgggcaatgaggagggcctgtttgtggtgcacgtgaccaaggatgagatcatccgggtgggggacaacaagaagatccaccagatcgagctgatccccaatgaccagctggtggccgtcatcagcggcaggaacagacatgtgcggctcttccccatgtctgccctggatggccgggagacagacttctacaagctgtctgagaccaagggctgccagacagtgaccagcggcaaggtgcgccacggggccctgacctgcctgtgtgtggccatgaagaggcaggtgctgtgctatgagctgttccagagcaagaccaggcacaggaagttcaaggagatccaggtgccctacaacgtgcagtggatggccatcttcagcgagcagctgtgtgtgggcttccagagcggcttcctgcgctaccccctgaatggagagggcaacccctacagcatgctgcacagcaatgaccacaccctgtccttcatcgcccaccagcccatggatgccatctgtgctgtggagatcagcagcaaggagtacctgctgtgcttcaacagcatcggcatctacacagactgccagggcagaagaagccggcagcaggagctgatgtggccagccaaccccagcagctgctgctacaatgccccctacctgtctgtgtacagtgaaaatgctgtggacatctttgatgtgaacagcatggagtggatccagaccctgcccctgaagaaggtgcggcccctgaacaatgaaggcagcctgaacctgctgggcctggagaccatccgcctcatctacttcaagaacaagatggccgagggagatgagctggtggtgcctgagaccagtgacaacagcaggaagcagatggtgaggaacatcaacaacaagaggcgctacagcttccgggtgcctgaggaggagaggatgcagcagaggcgggagatgctgcgggaccctgagatgaggaacaagctgatcagcaaccccaccaacttcaaccacatcgcccacatgggccctggagatggcatccagatcctgaaggacctgcccatgaacccccggccccaggagagcaggacagtgttttctggctctgtgtccatccccagcatcaccaagagcaggcctgagcccggccgctccatgtctgccagcagcggcctgagcgcccggagcagcgcccagaatggcagcgccctgaagcgggagttcagcggcggcagctacagcgccaagaggcagcccatgcccagccccagcgagggcagcctgagcagcggcggcatggaccagggcagtgatgccccagcccgggactttgatggagaagattctgacagccccaggcacagcacagccagcaacagcagcaacctgagcagcccccccagccctgccagccccaggaagaccaagagcctgagcctggagagcacagaccggggctcctgggacccctag

SEQ ID NO: 182461 - DNA, 4917 bp, Artificial Sequence
  derived and/or modified sequence
atgagcggcgaggtgcggctgcggcagctggagcagttcatcctggacggtcctgcccagacgaatggccagtgtttcagcgtcgagacccttttggacattctgatatgtctgtatgatgagtgcaataacagcccattgcgccgcgagaaaaatatcctcgaataccttgagtgggctaaaccctttaccagtaaggttaagcagatgagattacatagggaggactttgaaatcttgaaagttattgggcgcggggcctttggggaggtggctgttgtaaaactcaaaaatgctgataaagtgttcgctatgaagatcctgaacaagtgggagatgttaaagcgtgccgagacagcgtgcttccgagaagagcgcgacgtacttgttaatggagacaacaagtggattacaaccctccactacgccttccaggacgacaataacttgtaccttgtcatggactattacgtcggaggtgatcttctgaccctcctgtcaaagtttgaagatagattgccagaggatatggcacggttctatcttgccgaaatggtgatagccattgacagcgtgcatcaattacactacgtgcatcgcgatatcaagcccgacaatatcttgatggatatgaacggccacatccggttggccgatttcggaagttgcctcaaactgatggaagatgggacggtacagtccagtgtggctgttggtacccccgattacatctcccctgagatacttcaagcaatggaggatggcaagggacgttacggccccgagtgcgattggtggtctctcggggtttgtatgtacgagatgctctatggcgaaacccccttttatgcagaatccctggtagaaacttacggcaaaatcatgaaccacaaagagcggtttcaattccccgcccaggttaccgacgtgtccgagaatgccaaagacctcatcagacggctgatttgttcgcgggaacacagacttgggcaaaacggaatagaagactttaagaagcatccattcttcagtggcattgactgggataacattcgaaactgtgaagctccttacatccccgaagtgagcagtcccactgacacaagcaattttgacgtcgacgacgattgtttgaagaactctgaaactatgcctcctcccactcacactgccttcagcggccatcaccttccgttcgttggttttacttatacaagtagctgtgtgctgtctgaccggtcctgcctcagggtcacagccggcccaacctccctagatctggacgtaaacgtgcaaagaacactagataacaacctggcaacagaggcctatgaacggaggattaaacgactcgagcaggaaaagctcgaactcagtagaaagttgcaggagtccacgcagaccgtgcaagcgctgcagtactccactgtagacgggccgctgaccgcatccaaggacctggagattaaaaacctcaaggaggaaattgagaaacttcgcaaacaagtcacagagtcatcacacttagagcaacaacttgaggaagccaatgccgtgcgccaagagcttgacgatgccttccgccagattaaggcctatgagaaacagatcaagactttgcagcaggaaagagaagatctgaacaaactggaggttcacacggaagcactcgccgcagaggctagcaaggaccgaaaactccgggaacaatcagaacactactctaagcagctggaaaatgagctggagggcctgaaacaaaagcagatatcctactcccccggtgtgtgcagtatcgagcaccagcaggaaataaccaagcttaagacagacctggagaaaaaatccatattttatgaggaagaattgtcgaaaagggaaggaattcacgcaaacgaaatcaaaaacttgaaaaaggagctgcatgacagcgaaggacagcagttggctttgaacaaggaaataatgattctcaaagataagttggagaagactcgaagggagtcacagtcagagcgagaggaattcgagtctgaatttaagcagcaatatgagagagagaaagtcctcctgacagaggaaaacaaaaaactcaccagtgagttggacaagctgactacactctatgaaaatctgtcaattcataatcagcagcttgaagaagaagttaaggatttggcggataaaaaggagtcggtggctcactgggaggcccaaatcaccgaaattattcagtgggtttctgacgaaaaagatgcacgagggtatctgcaggctttggccagcaagatgactgaggaacttgaggctctcaggaatagcagcctgggtaccagagccaccgacatgccctggaagatgaggcgatttgccaagctcgacatgtctgcccggttggagcttcagtcagcgctggacgctgagatccgggccaagcaggctatccaagaagaactgaacaaggtgaaagccagcaacatcatcactgagtgtaagcttaaggactccgaaaaaaagaatctcgagctcctctccgagatcgagcagctaatcaaggacactgaagagctaaggtctgaaaaaggcattgagcatcaggacagtcaacatagtttcctggccttcctgaacacacccacagatgccctggatcaattcgaaacggtcgacagtacacccctctcagttcacaccccaaccttgcggaaaaagggatgccccggcagtaccggattccctcccaagcgtaaaacgcatcagttcttcgtaaagagcttcaccactcccacaaagtgccatcaatgtacgagcttaatggttggcctgatccgccagggatgttcttgcgaggtctgtggattctcctgccatatcacgtgtgtgaataaggcccccaccacatgcccagtcccacctgaacagacaaaaggacctttagggattgaccctcagaaagggataggcaccgcttatgagggccacgttcggatccctaaaccagcaggagtgaaaaagggctggcagagggcactggccattgtgtgtgattttaaattgttcctgtatgatattgccgagggcaaagcctcgcaacctagtgttgtcattagccaggtaatcgatatgcgcgatgaagagttctcggtcagtagtgtactcgccagtgacgtgattcatgctagcagaaaggatatcccttgcatcttcagagtcactgcttctcaactttcagcctcaaacaacaaatgctcaatcctgatgctggctgataccgagaatgaaaaaaataagtgggtaggggtcctgtctgagttacataaaatcctgaagaaaaataaatttcgggacagaagtgtgtacgttccgaaggaggcctacgacagcactttgcctttgatcaaaacaacacaggcagcagctatcattgaccacgagaggatcgcattaggcaacgaggaaggactgttcgtggtgcacgtgaccaaggacgaaatcatccgcgtgggcgacaacaagaagattcatcagatcgaacttatccccaacgaccagctggtagcagtaatcagtggaagaaaccgccacgtacggttgttcccaatgtctgctttggatggccgggaaactgacttctataaactctcagagacaaagggatgccagacggtcacctctggaaaagtacgtcatggggccctgacttgcctctgtgtcgcgatgaaacggcaggtgctctgctacgagttatttcagtcaaagacgcgccatagaaagttcaaggaaatccaagttccatacaatgtccagtggatggcaatcttctctgagcagttgtgtgttggattccagagcggtttccttcggtacccacttaatggcgaaggtaacccctattcaatgttgcacagtaacgaccatactctaagttttatagcccatcaacccatggatgccatctgcgcggtggagatttccagcaaggagtacctcttgtgcttcaattcaataggtatttatactgactgtcagggtcgcaggtcacgacagcaggagctgatgtggcctgctaatccttcctcctgctgctacaacgcgccatatttgagtgtgtattccgaaaatgccgtggacatcttcgacgttaattccatggaatggatccaaaccctgccgctcaaaaaagtgcgaccattaaataatgaaggcagcctgaatctgctgggtctggaaacaatcagactgatctactttaagaacaagatggccgagggcgacgaattggtcgtaccggagactagtgataactccagaaagcagatggtacgaaacatcaacaacaaaagacgatactcattccgggtaccagaagaagaacgaatgcagcagaggagggagatgctgagggatcctgagatgaggaataaactgatctccaaccccaccaattttaaccacattgctcacatgggcccgggagacggtatccagatcctgaaggacctgcctatgaacccccgtcctcaggaatcaaggaccgtgttcagcggctccgtaagcattccttcaataacgaagagccggcctgaacccggtaggagtatgagtgcttccagcggactgagcgcccggtcttcagcccaaaacgggtcagcactgaagagggaatttagcggcggctcctatagcgccaagcgtcagccgatgccatccccatctgagggaagtctgtcctctggcggcatggaccagggctcagatgcacctgcaagagacttcgatggggaggactccgactcacctcgccatagcaccgctagcaattcatccaaccttagctcccccccttctccagctagcccaagaaaaacgaaaagcctctctctagagtctacagatcgagggagctgggatccctag

SEQ ID NO: 182462 - DNA, 4916 bp, Artificial Sequence
  derived and/or modified sequence
atgtcaggtgaggtccgactccgacagttagagcagttcattctggacggaccggctcagacgaacggccagtgttttagtgtagagaccctgttagacattctaatttgtctctatgacgaatgcaataatagtcctctgcgtcgtgaaaagaacatcctggagtatctggaatgggctaagccatttacaagcaaggtcaagcagatgagattacatcgcgaggacttcgaaatccttaaggtcattggcaggggtgcctttggggaggtggccgtagtgaaactgaagaacgccgataaggtattcgctatgaagattttgaacaaatgggaaatgctaaagagagccgagacagcctgtttccgagaggagagagacgtacttgtcaacggggacaacaagtggatcacaaccttgcattacgcctttcaggatgacaataatctgtacctggtgatggattactatgtggggggtgacctgctaactctgctgagtaagtttgaggatcgtctgccggaggatatggcccgattctatcttgccgaaatggttattgctatcgactctgtgcaccagctgcactatgtacatcgcgacattaagcccgataatatccttatggatatgaacggtcacatcagacttgccgacttcggctcctgtctgaagctaatggaggacggcaccgtgcagtccagtgtggcagtcggaacaccggactacatttcccctgagatactccaagccatggaagatggaaagggcagatacggacccgagtgcgactggtggtcactgggggtatgtatgtacgagatgttatatggcgaaacccccttctacgcagagtcccttgtagaaacatatggcaagatcatgaaccataaggagcggtttcagttccccgctcaggtaacggacgtctccgagaatgccaaagacctcattcggagactgatttgctcacgtgagcatcgcctgggacagaacggaatcgaagattttaagaagcacccttttttctccggaatcgattgggataatattcgcaactgcgaagccccttacataccagaagtttcctccccaactgatacctcaaactttgacgtggatgatgactgcctgaagaactcagagacaatgcccccaccaactcatactgcttttagcggtcatcatctcccattcgtcggctttacatacacctcatcctgcgtactcagtgatagatcctgcttaagagtaaccgcaggcccaaccagtctagacctggatgtcaacgtgcaaagaactctcgacaacaaccttgccaccgaggcctacgagcgcaggatcaaaaggctggaacaggagaagctggagctttctcggaaacttcaagaatctacacagaccgtgcaggcgttacagtacagtaccgtggacggccctttgaccgcgtccaaagacttggagatcaaaaacttgaaggaggaaatcgaaaaactgcggaaacaggtgacagagtcctcccacctggaacagcagctcgaggaggcaaatgcggtgcggcaggagctggatgatgcatttcgccagattaaagcttatgaaaaacagatcaagactctccagcaggaaagggaagacctgaacaaactggaggtgcacacagaagctctggctgcagaagcgagcaaggatagaaagttgcgggaacaaagtgaacactatagcaaacagctggaaaatgaattggagggtctgaagcagaaacaaatcagctacagcccaggcgtgtgctctatcgagcaccagcaggaaattacaaaactcaagaccgacctggagaaaaaatccatcttctatgaagaagagttgtcgaaaagggagggaatccatgctaatgagattaaaaatctgaagaaggaactgcacgattctgaaggccagcagctagccctcaataaggagattatgatcttgaaagacaagcttgagaaaacacgcagagaatctcagagtgaaagggaagaattcgaatcggagtttaagcaacagtatgaacgcgagaaggtactgctgactgaagagaacaaaaaactgacatccgagctggacaagctgaccaccctctacgagaatctcagtatacataatcagcaactcgaggaggaggtaaaagacttggctgacaaaaaagagtcagttgcccattgggaagctcaaatcacagagatcatccagtgggtttccgatgagaaagatgctagaggctatctccaggcgttggcctctaaaatgaccgaagaactggaagccctgaggaattcatcccttgggaccagagccactgatatgccttggaaaatgcgaagattcgccaagttggatatgtcagctcggctggagctgcagtccgctttagatgcagaaattcgcgcaaagcaagctatccaggaggagctcaacaaggtgaaggccagcaacatcattacagagtgcaagctcaaagactcagagaagaaaaaccttgaactactctctgaaattgagcagttgatcaaagatacagaggaactccggagcgaaaagggaatcgagcaccaggacagccagcattcttttttggcattcctgaatacaccaactgatgccctcgatcagtttgaaacagtggattcaacccctctgagtgtgcatacaccaacgctgagaaagaagggatgtcccggtagtaccggatttccccctaaacggaaaacgcaccagttcttcgtcaagtcctttaccacacccactaagtgccaccagtgcaccagcttaatggtcggactaattcgtcagggctgttcctgcgaggtgtgtggttttagctgtcacatcacatgtgtgaacaaagcaccaacaacatgtcccgtccccccagagcaaaccaagggccctctgggtattgatccccagaagggcataggaactgcatacgagggtcacgtcagaataccgaaacccgctggagtgaagaagggctggcaaagagccctggccatagtgtgtgattttaagttgttcttgtacgatatcgctgagggaaaggcttcacagccatccgtggtcatttcccaagtgattgacatgcgtgatgaagaattcagcgtgagttctgttctggcttcagacgtgatacacgcatcccgaaaggacatcccgtgtatcttcagagtgacagcttcccaactgagcgcgagcaacaacaaatgcagtatccttatgcttgctgataccgaaaatgaaaagaacaaatgggtgggggtactctcagaacttcacaagattttgaagaagaataagtttagggacagaagcgtttatgtgccaaaggaggcgtatgactccactctgcctctgatcaagaccacacaagcagccgcaattattgatcacgagcggattgccctgggtaacgaagagggcctctttgttgtgcacgtgaccaaagatgagatcatcagggtgggggataacaagaaaattcaccagatcgagctgatacccaacgatcagctcgtggccgtgattagcggaagaaatcgtcacgtgaggttgtttcccatgtctgccctggacggtcgggagacggacttctacaagctgagcgagacgaagggctgccagacggtgaccagtgggaaggttcgccacggtgccctgacttgcctgtgcgtagcaatgaaacggcaggtcctgtgctatgaactgtttcagtcaaaaacacgacacaggaaatttaaggagatccaggtaccgtacaatgttcagtggatggcaatttttagcgaacaactttgtgtaggttttcagagcggcttcctgagatatccattgaacggagagggtaatccatacagcatgctgcacagcaacgaccataccctctctttcattgcccaccaacccatggacgccatttgcgccgtggagataagcagcaaggagtatctgctgtgttttaattccattgggatttatactgactgccagggtcggcgatctaggcagcaggaactaatgtggcccgcaaaccctagctcatgctgctacaacgccccttacctgtcagtgtactcggagaacgccgtggacatttttgacgtaaattctatggaatggatccagacactccccctcaagaaagtcagaccactcaataacgaaggcagccttaatctcttgggcttagagacaatcaggcttatctacttcaaaaacaaaatggctgagggggatgagctggttgtaccagagacatccgataacagtcgtaagcaaatggtccgcaatattaataacaaaagacgctactcctttcgggttccagaagaagagaggatgcagcagagacgagaaatgctgagggaccccgagatgagaaataaactgatcagcaaccctaccaattttaaccatatcgcccacatgggtccaggcgacggcattcaaatccttaaagatctacccatgaaccctcgcccacaggagtcccgcacggtgttctcaggctctgtgagcatcccttccataaccaaatcacgaccggagccaggtagatctatgtcggcatcatctggcttatccgcgcgaagtagcgcccaaaatggatccgcacttaagcgagaattctccgggggaagttactctgcaaaaagacagccaatgcccagcccctcggaaggaagtctgagctcgggtgggatggaccaggggtctgatgctccagccagagactttgatggagaggacagtgatagtcccaggcactcaacagcctctaattcttccaatttgtcaagtccacccagtccggcttctcctcgtaaaaccaaatccctaagtttagagtcaactgatcgagggtcttgggatccata

SEQ ID NO: 182463 - DNA, 9320 bp, Artificial Sequence
  derived and/or modified sequence
atgtctggagaagtgcgtttgaggcagttggagcagtttattttggacgggcccgctcagaccaatgggcagtgcttcagtgtggagacattactggatatactcatctgcctttatgatgaatgcaataattctccattgagaagagagaagaacattctcgaatacctagaatgggctaaaccatttacttctaaagtgaaacaaatgcgattacatagagaagactttgaaatattaaaggtgattggtcgaggagcttttggggaggttgctgtagtaaaactaaaaaatgcagataaagtgtttgccatgaaaatattgaataaatgggaaatgctgaaaagagctgagacagcatgttttcgtgaagaaagggatgtattagtgaatggagacaataaatggattacaaccttgcactatgctttccaggatgacaataacttatacctggttatggattattatgttggtggggatttgcttactctactcagcaaatttgaagatagattgcctgaagatatggctagattttacttggctgagatggtgatagcaattgactcagttcatcagctacattatgtacacagagacattaaacctgacaatatactgatggatatgaatggacatattcggttagcagattttggttcttgtctgaagctgatggaagatggaacggttcagtcctcagtggctgtaggaactccagattatatctctcctgaaatccttcaagccatggaagatggaaaagggagatatggacctgaatgtgactggtggtctttgggggtctgtatgtatgaaatgctttacggagaaacaccattttatgcagaatcgctggtggagacatacggaaaaatcatgaaccacaaagagaggtttcagtttccagcccaagtgactgatgtgtctgaaaatgctaaggatcttattcgaaggctcatttgtagcagagaacatcgacttggtcaaaatggaatagaagactttaagaaacacccatttttcagtggaattgattgggataatattcggaactgtgaagcaccttatattccagaagttagtagcccaacagatacatcgaattttgatgtagatgatgattgtttaaaaaattctgaaacgatgcccccaccaacacatactgcattttctggccaccatctgccatttgttggttttacatatactagtagctgtgtactttctgatcggagctgtttaagagttacggctggtcccacctcactggatcttgatgttaatgttcagaggactctagacaacaacttagcaactgaagcttatgaaagaagaattaagcgccttgagcaagaaaaacttgaactcagtagaaaacttcaagagtcaacacagactgtccaagctctgcagtattcaactgttgatggtccactaacagcaagcaaagatttagaaataaaaaacttaaaagaagaaattgaaaaactaagaaaacaagtaacagaatcaagtcatttggaacagcaacttgaagaagctaatgctgtgaggcaagaactagatgatgcttttagacaaatcaaggcttatgaaaaacaaatcaaaacgttacaacaagaaagagaagatctaaataagctggaagttcatacagaagctctagctgctgaagcatctaaagacaggaagctacgtgaacagagtgagcactattctaagcaactggaaaatgaattggagggactgaagcaaaaacaaattagttactcaccaggagtatgcagcatagaacatcagcaagagataaccaaactaaagactgatttggaaaagaaaagtatcttttatgaagaagaattatctaaaagagaaggaatacatgcaaatgaaataaaaaatcttaagaaagaactgcatgattcagaaggtcagcaacttgctctcaacaaagaaattatgattttaaaagacaaattggaaaaaaccagaagagaaagtcaaagtgaaagggaggaatttgaaagtgagttcaaacaacaatatgaacgagaaaaagtgttgttaactgaagaaaataaaaagctgacgagtgaacttgataagcttactactttgtatgagaacttaagtatacacaaccagcagttagaagaagaggttaaagatctagcagacaagaaagaatcagttgcacattgggaagcccaaatcacagaaataattcagtgggtcagcgatgaaaaggatgcacgagggtatcttcaggccttagcttctaaaatgactgaagaattggaggcattaagaaattccagcttgggtacacgagcaacagatatgccctggaaaatgcgtcgttttgcgaaactggatatgtcagctagactggagttgcagtcggctctggatgcagaaataagagccaaacaggccatccaagaagagttgaataaagttaaagcatctaatatcataacagaatgtaaactaaaagattcagagaagaagaacttggaactactctcagaaatcgaacagctgataaaggacactgaagagcttagatctgaaaagggtatagagcaccaagactcacagcattctttcttggcatttttgaatacgcctaccgatgctctggatcaatttgaaactgtagactccactccactttcagttcacacaccaaccttaaggaaaaaaggatgtcctggttcaactggctttccacctaagcgcaagactcaccagttttttgtaaaatcttttactactcctaccaagtgtcatcagtgtacctccttgatggtgggtttaataagacagggctgttcatgtgaagtgtgtggattctcatgccatataacttgtgtaaacaaagctccaaccacttgtccagttcctcctgaacagacaaaaggtcccctgggtatagatcctcagaaaggaataggaacagcatatgaaggtcatgtcaggattcctaagccagctggagtgaagaaagggtggcagagagcactggctatagtgtgtgacttcaaactctttctgtacgatattgctgaaggaaaagcatctcagcccagtgttgtcattagtcaagtgattgacatgagggatgaagaattttctgtgagttcagtcttggcttctgatgttatccatgcaagtcggaaagatataccctgtatatttagggtcacagcttcccagctctcagcatctaataacaaatgttcaatcctgatgctagcagacactgagaatgagaagaataagtgggtgggagtgctgagtgaattgcacaagattttgaagaaaaacaaattcagagaccgctcagtctatgttcccaaagaggcttatgacagcactctacccctcattaaaacaacccaggcagccgcaatcatagatcatgaaagaattgctttgggaaacgaagaagggttatttgttgtacatgtcaccaaagatgaaattattagagttggtgacaataagaagattcatcagattgaactcattccaaatgatcagcttgttgctgtgatctcaggacgaaatcgtcatgtacgactttttcctatgtcagcattggatgggcgagagaccgatttttacaagctgtcagaaactaaagggtgtcaaaccgtaacttctggaaaggtgcgccatggagctctcacatgcctgtgtgtggctatgaaaaggcaggtcctctgttatgaactatttcagagcaagacccgtcacagaaaatttaaagaaattcaagtcccatataatgtccagtggatggcaatcttcagtgaacaactctgtgtgggattccagtcaggatttctaagataccccttgaatggagaaggaaatccatacagtatgctccattcaaatgaccatacactatcatttattgcacatcaaccaatggatgctatctgcgcagttgagatctccagtaaagaatatctgctgtgttttaacagcattgggatatacactgactgccagggccgaagatctagacaacaggaattgatgtggccagcaaatccttcctcttgttgttacaatgcaccatatctctcggtgtacagtgaaaatgcagttgatatctttgatgtgaactccatggaatggattcagactcttcctctcaaaaaggttcgacccttaaacaatgaaggatcattaaatcttttagggttggagaccattagattaatatatttcaaaaataagatggcagaaggggacgaactggtagtacctgaaacatcagataatagtcggaaacaaatggttagaaacattaacaataagcggcgttattccttcagagtcccagaagaggaaaggatgcagcagaggagggaaatgctacgagatccagaaatgagaaataaattaatttctaatccaactaattttaatcacatagcacacatgggtcctggagatggaatacagatcctgaaagatctgcccatgaaccctcggcctcaggaaagtcggacagtattcagtggctcagtcagtattccatctatcaccaaatcccgccctgagccaggccgctccatgagtgctagcagtggcttgtcagcaaggtcatccgcacagaatggcagcgcattaaagagggaattctctggaggaagctacagtgccaagcggcagcccatgccctccccgtcagagggctctttgtcctctggaggcatggaccaaggaagtgatgccccagcgagggactttgacggagaggactctgactctccgaggcattccacagcttccaacagttccaacctaagcagccccccaagcccagcttcaccccgaaaaaccaagagcctctccctggagagcactgaccgcgggagctgggacccgtgagctgcctcagcactgggacctctcgctctccgctccctgccactcgcctcctctcactttcatctcttccctccacctcgcctgctcggcctgaaagccaccaggggctggcagcagtagcaggacagggattcaggagttctgacgacacgactctcagatccacgcccccagcctaacagcaacaacaaagacagactttccgtagcagcttagattaacgttgatttcattccatgcacttagagttgctttcagtaacattttacccctactcccaaaggtagcttaaatagacagattacacaaatgtaagtgataagaataagattagacagattttgctttcacagtagagtctcattatagtcctaaaatagctcatgggcttctccgcatccagaagggagaattggtccctggagtggctcactaagctcttaatcagcaaacgcagtgagtatcaacctgattgttgccaggaaatccttatgaattaaaacaatgcatattttactacagtacagagtttaaatgaatacataaatgtagaagtactgaatgtatatatttaaaaggagcctcttgtattcaacaaaagatggatgcatatataagagagatgatttaatttaaagaaatatgttgtttcttgtctgtaatgtaatgtaaagggtggaaaggcctcaagctcacatttgtagagagagagcgagagaaatcagagttccctttattgccctgtcctcaaactggtcataggctctagtcacctggggagctgtagaaaacacttgcagagccaggttttgctggtttggggcatgccctgggcaccagagctttaacatttgaagccacttcagcagcagcagcaaaaggcgaactcatctctacccaagatgtttcttttcctagtggtggaatttgaacacttctcactttttattgtattttatcttccgcagataaatgtagaaatacacgattctgtcacctctgatcccttccatctgaaaggttacaaggagtgttgtagcttctgaaggtgcagaaaacaatttctaaaaatgcttttattcctgggctaatcctgtccctccctaagtcacagcgaggtgtctgtcccagggctggagatgcttcccaaggaggagtctgttttgttgagagtgggcgtgggcttcttcacataagcctggggaaggaagaaaaaacggctttcattaccaaataatgtaaaacctcaaaagcaagggcttcaacagccttaaccaaatattattccccatagccagtggaaaatggatgtgacaaccccagtgcgcaggccagagtgagtgagcccagcacggcgctccgactggcttcctctctcaggtgctggattgtggggttagtggcatttccagctggattcctcctgttgtagttgccataaggaaatgagatgcagaatcagaaggatctatttctacagaatcatttcaccagttaagcacatgagtagagaaagagataaaaataaaagtatctcatgaaggaaagagattttgcctctcttttacttttcacctaagtttctctgagaaatagagacaggattctctctttaaaattcagtgaaaatgaagaaagttttcctgcagttgctaacctgagttgcagtgtttaaggccatcatttcactgctgctgtctgtgactccacgtctgtgtcactgaggtgacctgcgtgtcactgaggtggccaccatgctggcctgcggcatgtgcagggagctgaggctgtttccaggtgatgctgctgtgtggagaaggttctgagatgcagtgagggaagaaaggatcctgctggggattccattgtaagcacctataatcgggaattttcatgtaacagctttgacatttaaacattctgagtttggtgccagctcagatttgattatattttattttggatgggtgtaattcacagcacagttctaatctcccaaatctttctgctttttagaatgaagtataaaaatacttttctcacctgaataccaagggttggccctttagttggatcattgtcatatgacttggtagatccttgtcctcagcacctcacgtgagagaagggagtcagccagccggccccctgcttggtgctcgtgaccagctcgcaccccttctgtccacccttctctcctctcctccccactctccccaccctcctcactctccccaccctcctcactctccccaccctcccctcctctcctcctcactcttcccaccctccccatccccaccctccccatcctcctcttccctttccccttgccttctcctctctcccttctcttctcaggcagggaggaggccatcccaagccgagattaacaggacttgacataagccattagtttgtagctttgacaagtaattatgaatttttgttgcttataggtgcttattttgcaaaggatgcttttaagatcaaaataataaccctacctaaagtctagctccactgctatgggtcatactcttcagcctcccaacagggcagagagagagagctactgaggcttgtctaggttgccaggctaactgggcgacttgtccatattcaccccatggattgcaccatggcactctttgatttttccactgcaatggcaagtaatctcatcagtcataatagagcagtcccgaatgcgtgcagattctaaaagcagggctttaggagagaaacactgccagggggaatagttttggggagggttttcccaaaataacggtcatcctactgggtttatcccacccttaaatatgaagcctgttacctccagaagcttctgagaagaatgatgtgaaaagacagggagtgggttctaggcaaagaaaacataatgaccattcagaggagtcagtagcacagctcacagataaagtattttattactatctgaagttttcttttgttttcatgcaggacattttaaaaacgtatatggcagcagaaacctgtttctcaatagaaaaaatacattcagaggcatttctgggatagtctatctgtgttagtatttggtgctatctatgtccagccaagttatctaccctcaaattctgactaatcatgtttgtgctttgggtatttaaaattacatacatatatattctttttgccaaaaacaaaagtcttgcttcttgtcaaatgattgctaaagtagatcttacattttttgttattatgtatgtatttatacacatccccaacacacttagtgatttctgttatttcctagggagcacagctttaaggctatgagatacaactaaaaggagcccatctatttggttttccagccaattattgtactcacatttcaggggagaatctgaaattcctgtcatgtttacagcaacaatctatcattcctggctagctctcagcctctctctccttccataggttagaattatgtcattttgttacttagtggccacgtctatttctgagaaagactggttacatttatgtggcatctcaggtatcattaaggaaaagccagagcaggggtgagcagaggtcaaaaccacagacgcagcagggccatttgccgcctttggccgggatcacaaccactgcagtctcccagcaggtaggccttgccaagcctaaggctccccatccaatctagacagaggggcgctcagagcagactttgccgtagcccatgtctggtgagcacaacagggaatgaattgggcactccactcccccgtctctctggcccagccctgaactagatgagctgcatttcatggagcccattttaaaatctctttccttatgactttgttactcaagtccagagttctctgtgcacttctgctagataaggagtgtaagccctgccccccagcactggcagcacgctgggccctccccacacaggacaccgtgcagttccgggggaagctgactcaaatcaaccttgaaatctcatgaaaacaaaatgacttgtctttttatttgatagtgtaatatcattcattttataaattttttagggtttttctcgtaatattgtacagttttgcatggcctggtgtgatcattttttggttagaatataatgctgacaaatgtggatggaggggaagatactgctttagcctatcactccttattttattttgtttggttttatgccctcagtgtcttagggaactttttaagagatcctctgctaccaaacaatgatgtggattcttttgcacagaaatatttaaggtgggatggtaaaaaatgtcacaaaagactcctcaccaatactttatgttgatatcacttaatattaaccagactttgctgtattgcaataaaacagagaactgtta

SEQ ID NO: 182464 - DNA, 4917 bp, Artificial Sequence
  derived and/or modified sequence
atgagcggcgaggtgagactgagacagctggagcagttcatcctggacggccccgcccagaccaacggccagtgcttcagcgtggagaccctgctggacatcctgatctgcctgtacgacgagtgcaacaacagccccctgagaagagagaagaacatcctggagtacctggagtgggccaagcccttcaccagcaaggtgaagcagatgagactgcacagagaggacttcgagatcctgaaggtgatcggcagaggcgccttcggcgaggtggccgtggtgaagctgaagaacgccgacaaggtgttcgccatgaagatcctgaacaagtgggagatgctgaagagagccgagaccgcctgcttcagagaggagagagacgtgctggtgaacggcgacaacaagtggatcaccaccctgcactacgccttccaggacgacaacaacctgtacctggtgatggactactacgtgggcggcgacctgctgaccctgctgagcaagttcgaggacagactgcccgaggacatggccagattctacctggccgagatggtgatcgccatcgacagcgtgcaccagctgcactacgtgcacagagacatcaagcccgacaacatcctgatggacatgaacggccacatcagactggccgacttcggcagctgcctgaagctgatggaggacggcaccgtgcagagcagcgtggccgtgggcacccccgactacatcagccccgagatcctgcaggccatggaggacggcaagggcagatacggccccgagtgcgactggtggagcctgggcgtgtgcatgtacgagatgctgtacggcgagacccccttctacgccgagagcctggtggagacctacggcaagatcatgaaccacaaggagagattccagttccccgcccaggtgaccgacgtgagcgagaacgccaaggacctgatcagaagactgatctgcagcagagagcacagactgggccagaacggcatcgaggacttcaagaagcaccccttcttcagcggcatcgactgggacaacatcagaaactgcgaggccccctacatccccgaggtgagcagccccaccgacaccagcaacttcgacgtggacgacgactgcctgaagaacagcgagaccatgcccccccccacccacaccgccttcagcggccaccacctgcccttcgtgggcttcacctacaccagcagctgcgtgctgagcgacagaagctgcctgagagtgaccgccggccccaccagcctggacctggacgtgaacgtgcagagaaccctggacaacaacctggccaccgaggcctacgagagaagaatcaagagactggagcaggagaagctggagctgagcagaaagctgcaggagagcacccagaccgtgcaggccctgcagtacagcaccgtggacggccccctgaccgccagcaaggacctggagatcaagaacctgaaggaggagatcgagaagctgagaaagcaggtgaccgagagcagccacctggagcagcagctggaggaggccaacgccgtgagacaggagctggacgacgccttcagacagatcaaggcctacgagaagcagatcaagaccctgcagcaggagagagaggacctgaacaagctggaggtgcacaccgaggccctggccgccgaggccagcaaggacagaaagctgagagagcagagcgagcactacagcaagcagctggagaacgagctggagggcctgaagcagaagcagatcagctacagccccggcgtgtgcagcatcgagcaccagcaggagatcaccaagctgaagaccgacctggagaagaagagcatcttctacgaggaggagctgagcaagagagagggcatccacgccaacgagatcaagaacctgaagaaggagctgcacgacagcgagggccagcagctggccctgaacaaggagatcatgatcctgaaggacaagctggagaagaccagaagagagagccagagcgagagagaggagttcgagagcgagttcaagcagcagtacgagagagagaaggtgctgctgaccgaggagaacaagaagctgaccagcgagctggacaagctgaccaccctgtacgagaacctgagcatccacaaccagcagctggaggaggaggtgaaggacctggccgacaagaaggagagcgtggcccactgggaggcccagatcaccgagatcatccagtgggtgagcgacgagaaggacgccagaggctacctgcaggccctggccagcaagatgaccgaggagctggaggccctgagaaacagcagcctgggcaccagagccaccgacatgccctggaagatgagaagattcgccaagctggacatgagcgccagactggagctgcagagcgccctggacgccgagatcagagccaagcaggccatccaggaggagctgaacaaggtgaaggccagcaacatcatcaccgagtgcaagctgaaggacagcgagaagaagaacctggagctgctgagcgagatcgagcagctgatcaaggacaccgaggagctgagaagcgagaagggcatcgagcaccaggacagccagcacagcttcctggccttcctgaacacccccaccgacgccctggaccagttcgagaccgtggacagcacccccctgagcgtgcacacccccaccctgagaaagaagggctgccccggcagcaccggcttcccccccaagagaaagacccaccagttcttcgtgaagagcttcaccacccccaccaagtgccaccagtgcaccagcctgatggtgggcctgatcagacagggctgcagctgcgaggtgtgcggcttcagctgccacatcacctgcgtgaacaaggcccccaccacctgccccgtgccccccgagcagaccaagggccccctgggcatcgacccccagaagggcatcggcaccgcctacgagggccacgtgagaatccccaagcccgccggcgtgaagaagggctggcagagagccctggccatcgtgtgcgacttcaagctgttcctgtacgacatcgccgagggcaaggccagccagcccagcgtggtgatcagccaggtgatcgacatgagagacgaggagttcagcgtgagcagcgtgctggccagcgacgtgatccacgccagcagaaaggacatcccctgcatcttcagagtgaccgccagccagctgagcgccagcaacaacaagtgcagcatcctgatgctggccgacaccgagaacgagaagaacaagtgggtgggcgtgctgagcgagctgcacaagatcctgaagaagaacaagttcagagacagaagcgtgtacgtgcccaaggaggcctacgacagcaccctgcccctgatcaagaccacccaggccgccgccatcatcgaccacgagagaatcgccctgggcaacgaggagggcctgttcgtggtgcacgtgaccaaggacgagatcatcagagtgggcgacaacaagaagatccaccagatcgagctgatccccaacgaccagctggtggccgtgatcagcggcagaaacagacacgtgagactgttccccatgagcgccctggacggcagagagaccgacttctacaagctgagcgagaccaagggctgccagaccgtgaccagcggcaaggtgagacacggcgccctgacctgcctgtgcgtggccatgaagagacaggtgctgtgctacgagctgttccagagcaagaccagacacagaaagttcaaggagatccaggtgccctacaacgtgcagtggatggccatcttcagcgagcagctgtgcgtgggcttccagagcggcttcctgagataccccctgaacggcgagggcaacccctacagcatgctgcacagcaacgaccacaccctgagcttcatcgcccaccagcccatggacgccatctgcgccgtggagatcagcagcaaggagtacctgctgtgcttcaacagcatcggcatctacaccgactgccagggcagaagaagcagacagcaggagctgatgtggcccgccaaccccagcagctgctgctacaacgccccctacctgagcgtgtacagcgagaacgccgtggacatcttcgacgtgaacagcatggagtggatccagaccctgcccctgaagaaggtgagacccctgaacaacgagggcagcctgaacctgctgggcctggagaccatcagactgatctacttcaagaacaagatggccgagggcgacgagctggtggtgcccgagaccagcgacaacagcagaaagcagatggtgagaaacatcaacaacaagagaagatacagcttcagagtgcccgaggaggagagaatgcagcagagaagagagatgctgagagaccccgagatgagaaacaagctgatcagcaaccccaccaacttcaaccacatcgcccacatgggccccggcgacggcatccagatcctgaaggacctgcccatgaaccccagaccccaggagagcagaaccgtgttcagcggcagcgtgagcatccccagcatcaccaagagcagacccgagcccggcagaagcatgagcgccagcagcggcctgagcgccagaagcagcgcccagaacggcagcgccctgaagagagagttcagcggcggcagctacagcgccaagagacagcccatgcccagccccagcgagggcagcctgagcagcggcggcatggaccagggcagcgacgcccccgccagagacttcgacggcgaggacagcgacagccccagacacagcaccgccagcaacagcagcaacctgagcagcccccccagccccgccagccccagaaagaccaagagcctgagcctggagagcaccgacagaggcagctgggacccctag

SEQ ID NO: 182465 - protein, 810 aa, Artificial Sequence
  derived and/or modified sequence
MPNQGEDCYFFFYSTCTKGDSCPFRHCEAAIGNETVCTLWQEGRCFRQVCRFRHMEIDKKRSEIPCYWENQPTGCQKLNCAFHHNRGRYVDGLFLPPSKTVLPTVPESPEEEVKASQLSVQQNKLSVQSNPSPQLRSVMKVESSENVPSPTHPPVVINAADDDEDDDDQFSEEGDETKTPTLQPTPEVHNGLRVTSVRKPAVNIKQGECLNFGIKTLEEIKSKKMKEKSKKQGEGSSGVSSLLLHPEPVPGPEKENVRTVVRTVTLSTKQGEEPLVRLSLTERLGKRKFSAGGDSDPPLKRSLAQRLGKKVEAPETNIDKTPKKAQVSKSLKERLGMSADPDNEDATDKVNKVGEIHVKTLEEILLERASQKRGELQTKLKTEGPSKTDDSTSGARSSSTIRIKTFSEVLAEKKHRQQEAERQKSKKDTTCIKLKIDSEIKKTVVLPPIVASRGQSEEPAGKTKSMQEVHIKTLEEIKLEKALRVQQSSESSTSSPSQHEATPGARRLLRITKRTGMKEEKNLQEGNEVDSQSSIRTEAKEASGETTGVDITKIQVKRCETMREKHMQKQQEREKSVLTPLRGDVASCNTQVAEKPVLTAVPGITRHLTKRLPTKSSQKVEVETSGIGDSLLNVKCAAQTLEKRGKAKPKVNVKPSVVKVVSSPKLAPKRKAVEMHAAVIAAVKPLSSSSVLQEPPAKKAAVAVVPLVSEDKSVTVPEAENPRDSLVLPPTQSSSDSSPPEVSGPSSSQMSMKTRRLSSASTGKPPLSVEDDFEKLIWEISGGKLEAEIDLDPGKDEDDLLLELSEMIDS

SEQ ID NO: 182466 - protein, 50 aa, Artificial Sequence
  derived and/or modified sequence
MPNQGEDCYFFFYSTCTKGDSCPFRHCEAAIGNETVCTLWQEGRCFRQVC

SEQ ID NO: 182467 - protein, 756 aa, Artificial Sequence
  derived and/or modified sequence
MEIDKKRSEIPCYWENQPTGCQKLNCAFHHNRGRYVDGLFLPPSKTVLPTVPESPEEEVKASQLSVQQNKLSVQSNPSPQLRSVMKVESSENVPSPTHPPVVINAADDDEDDDDQFSEEGDETKTPTLQPTPEVHNGLRVTSVRKPAVNIKQGECLNFGIKTLEEIKSKKMKEKSKKQGEGSSGVSSLLLHPEPVPGPEKENVRTVVRTVTLSTKQGEEPLVRLSLTERLGKRKFSAGGDSDPPLKRSLAQRLGKKVEAPETNIDKTPKKAQVSKSLKERLGMSADPDNEDATDKVNKVGEIHVKTLEEILLERASQKRGELQTKLKTEGPSKTDDSTSGARSSSTIRIKTFSEVLAEKKHRQQEAERQKSKKDTTCIKLKIDSEIKKTVVLPPIVASRGQSEEPAGKTKSMQEVHIKTLEEIKLEKALRVQQSSESSTSSPSQHEATPGARRLLRITKRTGMKEEKNLQEGNEVDSQSSIRTEAKEASGETTGVDITKIQVKRCETMREKHMQKQQEREKSVLTPLRGDVASCNTQVAEKPVLTAVPGITRHLTKRLPTKSSQKVEVETSGIGDSLLNVKCAAQTLEKRGKAKPKVNVKPSVVKVVSSPKLAPKRKAVEMHAAVIAAVKPLSSSSVLQEPPAKKAAVAVVPLVSEDKSVTVPEAENPRDSLVLPPTQSSSDSSPPEVSGPSSSQMSMKTRRLSSASTGKPPLSVEDDFEKLIWEISGGKLEAEIDLDPGKDEDDLLLELSEMIDS

SEQ ID NO: 182468 - DNA, 2433 bp, Artificial Sequence
  derived and/or modified sequence
atgcccaaccagggcgaggactgctacttcttcttctacagcacctgcaccaagggcgacagctgccccttcagacactgcgaggccgccatcggcaacgagaccgtgtgcaccctgtggcaggagggcagatgcttcagacaggtgtgcagattcagacacatggagatcgacaagaagagaagcgagatcccctgctactgggagaaccagcccaccggctgccagaagctgaactgcgccttccaccacaacagaggcagatacgtggacggcctgttcctgccccccagcaagaccgtgctgcccaccgtgcccgagagccccgaggaggaggtgaaggccagccagctgagcgtgcagcagaacaagctgagcgtgcagagcaaccccagcccccagctgagaagcgtgatgaaggtggagagcagcgagaacgtgcccagccccacccacccccccgtggtgatcaacgccgccgacgacgacgaggacgacgacgaccagttcagcgaggagggcgacgagaccaagacccccaccctgcagcccacccccgaggtgcacaacggcctgagagtgaccagcgtgagaaagcccgccgtgaacatcaagcagggcgagtgcctgaacttcggcatcaagaccctggaggagatcaagagcaagaagatgaaggagaagagcaagaagcagggcgagggcagcagcggcgtgagcagcctgctgctgcaccccgagcccgtgcccggccccgagaaggagaacgtgagaaccgtggtgagaaccgtgaccctgagcaccaagcagggcgaggagcccctggtgagactgagcctgaccgagagactgggcaagagaaagttcagcgccggcggcgacagcgacccccccctgaagagaagcctggcccagagactgggcaagaaggtggaggcccccgagaccaacatcgacaagacccccaagaaggcccaggtgagcaagagcctgaaggagagactgggcatgagcgccgaccccgacaacgaggacgccaccgacaaggtgaacaaggtgggcgagatccacgtgaagaccctggaggagatcctgctggagagagccagccagaagagaggcgagctgcagaccaagctgaagaccgagggccccagcaagaccgacgacagcaccagcggcgccagaagcagcagcaccatcagaatcaagaccttcagcgaggtgctggccgagaagaagcacagacagcaggaggccgagagacagaagagcaagaaggacaccacctgcatcaagctgaagatcgacagcgagatcaagaagaccgtggtgctgccccccatcgtggccagcagaggccagagcgaggagcccgccggcaagaccaagagcatgcaggaggtgcacatcaagaccctggaggagatcaagctggagaaggccctgagagtgcagcagagcagcgagagcagcaccagcagccccagccagcacgaggccacccccggcgccagaagactgctgagaatcaccaagagaaccggcatgaaggaggagaagaacctgcaggagggcaacgaggtggacagccagagcagcatcagaaccgaggccaaggaggccagcggcgagaccaccggcgtggacatcaccaagatccaggtgaagagatgcgagaccatgagagagaagcacatgcagaagcagcaggagagagagaagagcgtgctgacccccctgagaggcgacgtggccagctgcaacacccaggtggccgagaagcccgtgctgaccgccgtgcccggcatcaccagacacctgaccaagagactgcccaccaagagcagccagaaggtggaggtggagaccagcggcatcggcgacagcctgctgaacgtgaagtgcgccgcccagaccctggagaagagaggcaaggccaagcccaaggtgaacgtgaagcccagcgtggtgaaggtggtgagcagccccaagctggcccccaagagaaaggccgtggagatgcacgccgccgtgatcgccgccgtgaagcccctgagcagcagcagcgtgctgcaggagccccccgccaagaaggccgccgtggccgtggtgcccctggtgagcgaggacaagagcgtgaccgtgcccgaggccgagaaccccagagacagcctggtgctgccccccacccagagcagcagcgacagcagcccccccgaggtgagcggccccagcagcagccagatgagcatgaagaccagaagactgagcagcgccagcaccggcaagccccccctgagcgtggaggacgacttcgagaagctgatctgggagatcagcggcggcaagctggaggccgagatcgacctggaccccggcaaggacgaggacgacctgctgctggagctgagcgagatgatcgacagctag

SEQ ID NO: 182469 - DNA, 1548 bp, Artificial Sequence
  derived and/or modified sequence
atgcccaaccagggcgaggactgctacttcttcttctacagcacctgcaccaagggcgacagctgccccttcagacactgcgaggccgccatcggcaacgagaccgtgtgcaccctgtggcaggagggcagatgcttcagacaggtgtgcagattcagacacatggagatcgacaagaagagaagcgagatcccctgctactgggagaaccagcccaccggctgccagaagctgaactgcgccttccaccacaacagaggcagatacgtggacggcctgttcctgccccccagcaagaccgtgctgcccaccgtgcccgagagccccgaggaggaggtgaaggccagccagctgagcgtgcagcagaacaagctgagcgtgcagagcaaccccagcccccagctgagaagcgtgatgaaggtggagagcagcgagaacgtgcccagccccacccacccccccgtggtgatcaacgccgccgacgacgacgaggacgacgacgaccagttcagcgaggagggcgacgagaccaagacccccaccctgcagcccacccccgaggtgcacaacggcctgagagtgaccagcgtgagaaagcccgccgtgaacatcaagcagggcgagtgcctgaacttcggcatcaagaccctggaggagatcaagagcaagaagatgaaggagaagagcaagaagcagggcgagggcagcagcggcgtgagcagcctgctgctgcaccccgagcccgtgcccggccccgagaaggagaacgtgagaaccgtggtgagaaccgtgaccctgagcaccaagcagggcgaggagcccctggtgagactgagcctgaccgagagactgggcaagagaaagttcagcgccggcggcgacagcgacccccccctgaagagaagcctggcccagagactgggcaagaaggtggaggcccccgagaccaacatcgacaagacccccaagaaggcccaggtgagcaagagcctgaaggagagactgggcatgagcgccgaccccgacaacgaggacgccaccgacaaggtgaacaaggtgggcgagatccacgtgaagaccctggaggagatcctgctggagagagccagccagaagagaggcgagctgcagaccaagctgaagaccgagggccccagcaagaccgacgacagcaccagcggcgccagaagcagcagcaccatcagaatcaagaccttcagcgaggtgctggccgagaagaagcacagacagcaggaggccgagagacagaagagcaagaaggacaccacctgcatcaagctgaagatcgacagcgagatcaagaagaccgtggtgctgccccccatcgtggccagcagaggccagagcgaggagcccgccggcaagaccaagagcatgcaggaggtgcacatcaagaccctggaggagatcaagctggagaaggccctgagagtgcagcagagcagcgagagcagcaccagcagccccagccagcacgaggccacccccggcgccagaagactgctgagaatcaccaagagaacctag

SEQ ID NO: 182470 - DNA, 2271 bp, Artificial Sequence
  derived and/or modified sequence
atggagatcgacaagaagagaagcgagatcccctgctactgggagaaccagcccaccggctgccagaagctgaactgcgccttccaccacaacagaggcagatacgtggacggcctgttcctgccccccagcaagaccgtgctgcccaccgtgcccgagagccccgaggaggaggtgaaggccagccagctgagcgtgcagcagaacaagctgagcgtgcagagcaaccccagcccccagctgagaagcgtgatgaaggtggagagcagcgagaacgtgcccagccccacccacccccccgtggtgatcaacgccgccgacgacgacgaggacgacgacgaccagttcagcgaggagggcgacgagaccaagacccccaccctgcagcccacccccgaggtgcacaacggcctgagagtgaccagcgtgagaaagcccgccgtgaacatcaagcagggcgagtgcctgaacttcggcatcaagaccctggaggagatcaagagcaagaagatgaaggagaagagcaagaagcagggcgagggcagcagcggcgtgagcagcctgctgctgcaccccgagcccgtgcccggccccgagaaggagaacgtgagaaccgtggtgagaaccgtgaccctgagcaccaagcagggcgaggagcccctggtgagactgagcctgaccgagagactgggcaagagaaagttcagcgccggcggcgacagcgacccccccctgaagagaagcctggcccagagactgggcaagaaggtggaggcccccgagaccaacatcgacaagacccccaagaaggcccaggtgagcaagagcctgaaggagagactgggcatgagcgccgaccccgacaacgaggacgccaccgacaaggtgaacaaggtgggcgagatccacgtgaagaccctggaggagatcctgctggagagagccagccagaagagaggcgagctgcagaccaagctgaagaccgagggccccagcaagaccgacgacagcaccagcggcgccagaagcagcagcaccatcagaatcaagaccttcagcgaggtgctggccgagaagaagcacagacagcaggaggccgagagacagaagagcaagaaggacaccacctgcatcaagctgaagatcgacagcgagatcaagaagaccgtggtgctgccccccatcgtggccagcagaggccagagcgaggagcccgccggcaagaccaagagcatgcaggaggtgcacatcaagaccctggaggagatcaagctggagaaggccctgagagtgcagcagagcagcgagagcagcaccagcagccccagccagcacgaggccacccccggcgccagaagactgctgagaatcaccaagagaaccggcatgaaggaggagaagaacctgcaggagggcaacgaggtggacagccagagcagcatcagaaccgaggccaaggaggccagcggcgagaccaccggcgtggacatcaccaagatccaggtgaagagatgcgagaccatgagagagaagcacatgcagaagcagcaggagagagagaagagcgtgctgacccccctgagaggcgacgtggccagctgcaacacccaggtggccgagaagcccgtgctgaccgccgtgcccggcatcaccagacacctgaccaagagactgcccaccaagagcagccagaaggtggaggtggagaccagcggcatcggcgacagcctgctgaacgtgaagtgcgccgcccagaccctggagaagagaggcaaggccaagcccaaggtgaacgtgaagcccagcgtggtgaaggtggtgagcagccccaagctggcccccaagagaaaggccgtggagatgcacgccgccgtgatcgccgccgtgaagcccctgagcagcagcagcgtgctgcaggagccccccgccaagaaggccgccgtggccgtggtgcccctggtgagcgaggacaagagcgtgaccgtgcccgaggccgagaaccccagagacagcctggtgctgccccccacccagagcagcagcgacagcagcccccccgaggtgagcggccccagcagcagccagatgagcatgaagaccagaagactgagcagcgccagcaccggcaagccccccctgagcgtggaggacgacttcgagaagctgatctgggagatcagcggcggcaagctggaggccgagatcgacctggaccccggcaaggacgaggacgacctgctgctggagctgagcgagatgatcgacagctag

SEQ ID NO: 182471 - DNA, 2433 bp, Artificial Sequence
  derived and/or modified sequence
atgccgaatcagggtgaggattgctattttttcttttattctacctgtacaaaaggggattcatgcccattcagacactgtgaagctgctataggtaacgagacagtctgtacgctatggcaggaggggcgctgcttccgccaggtctgtcgcttcaggcatatggagatagataaaaaacgttctgagattccatgctattgggagaaccagcctaccgggtgtcagaagctgaattgcgcgtttcaccacaaccgaggacggtacgtcgacggcctatttttgccaccaagcaaaacggtcctgcctaccgtgcccgaatcccccgaagaggaggttaaggcctctcaactatcggttcagcagaataaactctcagtgcagtccaacccaagcccacagctaaggagcgtgatgaaagttgagtctagtgagaacgtcccaagcccaactcatccacccgtcgtgatcaacgctgcagacgatgacgaagatgatgacgaccaattctccgaggaaggcgacgaaaccaagacccctactcttcaaccaacacctgaggtgcacaacggtctgagagtgaccagcgtgagaaagcctgcggtaaatatcaaacagggagagtgcttaaactttgggatcaaaaccctggaagagataaagtccaaaaagatgaaagagaagtccaaaaagcaaggtgaagggtcttccggggtttcttcattgttgctccaccctgaacccgtgcccggccctgaaaaagaaaacgtgagaaccgtcgtcaggacagtgaccctaagtaccaagcaaggtgaggagcctctggtacgcctctctcttactgagcgcctgggaaaaagaaagttttctgccggaggtgattcagaccctcccctcaaacgcagcctcgcacagcggctggggaagaaggtggaagcacctgaaacaaatatcgataagactcccaaaaaagcccaggtgagcaaatcacttaaagagagactggggatgtccgctgatcctgacaatgaagacgccacagataaggtgaataaagttggcgaaatccatgttaaaaccctcgaggaaatcttgctggagagagctagtcagaaacggggtgaactgcagactaagctcaagactgagggcccttcaaagacggatgattctacatctggcgcgagaagttcatctaccataaggatcaagaccttttctgaagttctggctgaaaagaaacacagacaacaagaggcagagaggcagaagtccaaaaaagacacaacctgcattaagcttaagatcgactccgagattaaaaaaaccgtcgtgctgcctccaatcgttgcctctagaggccaaagcgaggagcctgcaggaaaaactaagagcatgcaggaggttcatatcaaaaccctggaagagattaaactggagaaggcactccgcgtccaacagagcagcgagtcttccacttccagtccgagccaacacgaggcaacacctggggcacggcggcttctgcgtatcacaaaaaggactggcatgaaagaggaaaaaaatttacaggagggaaatgaagttgatagtcagtcttcgatcaggacggaggctaaagaagccagcggggagactactggcgttgacataactaagatacaggttaagaggtgcgaaactatgcgagagaagcacatgcagaaacagcaggagcgggagaagagtgtgttgactccactccggggcgacgtcgcatcctgcaacacccaggttgccgagaagccggtgctgactgccgtgccaggcattacacgtcatctcacaaagcgcctgccaaccaaaagttcacaaaaggtggaagtggaaacttcaggaattggggactctttgttaaatgtgaaatgcgccgcacaaacgttagagaagcggggcaaagccaaacctaaagtgaacgttaaaccaagcgttgttaaggtagtgtcttctcctaaactggctccaaaacgaaaagcagtggagatgcatgccgctgtgattgccgccgtgaaacctcttagttctagttccgtcctgcaagaaccaccggccaaaaaggccgctgtggcagtcgttccactggtcagcgaggataagtccgtcaccgtcccggaggccgagaacccgcgggactctctggtcctcccacccacacagtcctcctcagactcctcaccaccggaagtatccggcccctcgtcgagtcagatgtcaatgaagacacgccgacttagtagtgcctcgacagggaagccaccactcagcgtcgaagatgattttgaaaagttaatctgggaaatctcaggcggcaaactcgaagctgaaatcgatctcgaccctggaaaggacgaagatgacctgttgcttgaactctcagagatgatcgattcttag

SEQ ID NO: 182472 - DNA, 2433 bp, Artificial Sequence
  derived and/or modified sequence
atgccgaatcaaggcgaggactgctacttcttcttctattctacgtgtaccaagggcgatagttgccctttcaggcactgcgaggcagctattggtaacgaaacagtgtgcacgctctggcaagaaggcagatgcttccggcaggtgtgccgtttccgacacatggagattgataagaagcgctccgagattccatgttactgggaaaatcaacctactggctgtcagaagctgaactgcgcatttcatcataatcgcgggcggtacgtcgatggattgttcctcccaccctccaagactgtgcttccaactgtaccggaatctcctgaagaagaggtcaaagcctctcagctctctgttcagcaaaacaagttgtcagtgcagtccaaccccagcccccaattgcgtagcgtaatgaaagtcgagtcgagcgaaaatgtgcccagtcccacgcatcctcctgtggtgatcaatgcagccgatgacgacgaggacgatgacgatcaattcagcgaagaaggggatgagactaaaacacctacacttcagccaacccccgaggtacacaacggtctccgagtgacaagcgtccggaagccagccgtgaacattaagcagggagaatgtctgaactttggtatcaagacattagaggagatcaagagcaagaaaatgaaagagaagagcaagaagcagggtgaagggtcttccggggtctcgtccctcctcctgcacccagagcccgtcccgggtcccgagaaggagaacgttcggaccgtcgtaagaacagttaccctctcaacaaaacagggggaagagcccctagtccggctgagccttaccgaaaggctagggaagcggaagttttctgctgggggagactccgacccaccactgaagcggagtcttgcccagagattgggcaaaaaagtggaggccccagagaccaatattgacaagacacccaagaaagcccaggttagcaagtctctgaaagagcgcctgggcatgtccgcggaccccgataacgaggacgcaacagataaagtgaataaggtgggagaaattcacgtgaagacattggaagagattctgctcgagcgagcttcccaaaagagaggtgaactacagactaagctaaaaactgagggaccctctaagaccgatgactccacctccggggcacggtccagctccacaatcagaatcaaaactttttccgaagtgctggccgagaagaaacacaggcagcaagaggctgaacgccagaagtccaagaaggatactacttgtattaagctcaagattgacagtgaaatcaagaagacagtggtattgccccccatagttgcgagcaggggtcagtctgaggagcccgccggaaagaccaagagcatgcaggaagtacacatcaaaaccctggaggaaatcaagttggagaaggccctgcgagtccagcagtcctcagaatccagtacatcaagtcccagccaacacgaggcaactcccggagccaggcggttgctgcgtataacgaaacgaactggaatgaaagaagaaaagaatttacaggagggcaatgaagtggactcacagtcatctatcaggactgaggcaaaggaagctagcggagagactactggtgttgatataacaaagattcaggtaaagcgctgcgagacaatgcgggaaaaacatatgcagaagcagcaagaacgggagaaaagcgtgctgacccctttgagaggcgatgtggcgtcttgcaacactcaggttgcagaaaagccagtcctgaccgccgtgcctggcatcaccaggcatcttacaaaaagactgcccaccaagagctcccagaaggttgaagtagagacgagtggtatcggcgattcgctgctcaacgtgaaatgtgccgcccaaacactggagaagagaggtaaggccaaacccaaagtgaacgtgaaaccttccgtagttaaggtcgtaagttcccccaagttggcccccaagcggaaagctgtcgaaatgcatgccgcagtgattgcagctgttaagccactctcctcgtcttccgtgttacaagaaccccctgctaagaaggcagccgtcgcagtagtgcccttggtgtctgaggacaagtcggtaacggttccagaagctgaaaaccccagagatagtcttgtgctgcctcccacccagagcagcagcgacagctcgccacccgaagtgagtggaccctcctcaagccagatgagcatgaaaacgcgccgccttagttctgcgagtaccggcaagcccccactgtccgtggaggacgacttcgaaaaactgatctgggagatttctggcggtaagttggaagcagagatagacctagacccaggcaaggatgaagatgatttactgctggaactctctgagatgatcgactcttag

SEQ ID NO: 182473 - DNA, 2433 bp, Artificial Sequence
  derived and/or modified sequence
atgcccaatcagggggaggactgttactttttcttttatagtacctgtaccaagggagactcatgtcctttccgccactgcgaggctgcaataggcaacgaaactgtatgcaccctatggcaagaaggacgatgttttcgacaggtgtgtcggttccgtcatatggagatcgacaagaagagatcggagatcccgtgctactgggaaaatcaacctactggctgccagaagctcaattgcgcatttcaccataacagggggagatatgtcgacggcctcttccttccaccgtcgaagacagtactgccaaccgttccagaatcaccagaggaagaagtgaaggcttcccagctctccgtgcagcagaacaagctcagcgtgcagtctaatcccagtccgcaactcagatcagtcatgaaagttgaatcttcagagaacgtcccaagcccaacgcaccctccggtggtgatcaatgcagcagatgacgacgaagacgatgatgaccagttttccgaggagggggatgagactaagactcccacactgcaacccacccctgaagtccataacgggcttcgcgtaacaagtgtgagaaagcctgctgtgaacataaaacagggtgagtgcctgaacttcgggataaagacgctagaggaaatcaagtcaaagaagatgaaagagaaaagcaagaagcagggggaaggatcttcaggtgtgtccagccttttactccaccccgagccagtgcccggaccagagaaagagaacgtgcgcaccgtagtgcgcaccgtaaccctgagtaccaagcagggtgaagagccgctcgtgcggctaagcctgactgaacggttagggaagaggaaattctcagcaggcggggattccgacccccctctgaaaaggtcccttgcccagcgcctggggaagaaagtcgaggcccccgagacaaacattgacaagactcccaagaaggcacaggtttctaagtcactgaaggagcggctgggcatgtccgctgatcccgacaacgaagatgctactgataaagtgaacaaggtcggagaaatccacgtcaagactctggaagaaatcctcttggaacgtgcttcccagaagagaggcgaattacaaaccaagctgaaaacagaaggaccttccaagactgatgattcaacctccggggcgaggtcttctagtacaatccggatcaaaactttctcagaggtcctagccgaaaaaaagcatagacaacaggaagccgaacgccagaaaagtaagaaagatactacttgtatcaagctgaagatcgatagtgaaatcaagaagactgtggtcctgccccccatcgtcgccagtcgcggtcaatctgaggaaccagcgggcaagacaaagagtatgcaggaggtgcacattaagaccctggaggaaataaagttagagaaggcattgcgtgtacaacaaagctctgaatccagcacaagctccccttctcagcacgaggcgacaccgggggcccgccggctgctcaggattaccaaaaggacaggtatgaaagaagagaagaacctgcaggagggaaatgaagtggactcacagagttcaatcagaaccgaagcaaaagaagcttcaggtgagactacaggcgttgacatcacaaagatccaggtgaagagatgcgaaaccatgcgcgagaaacatatgcagaagcagcaggagcgggaaaagtctgtgttgacccctctgcgcggagatgtcgctagttgtaacacccaggtagcagagaagcctgtgctgacagccgtgccaggcatcacacggcatttgactaagcgactccctaccaaatccagccagaaggtggaggtggagacctcaggtattggggattctttattgaatgtcaaatgcgcggcccagaccttagagaaaagagggaaggccaaaccaaaagtcaatgtaaagccttctgtggtcaaggtcgtctcttcacccaagcttgcacccaagaggaaggccgttgagatgcacgccgccgtcattgccgcagtcaagcctttgagctcttcatccgtcctccaagagccccctgcaaaaaaggctgcagtggccgtagtcccgctggtttctgaggataagtctgttacagtgcctgaggcagagaacccaagagacagcctcgtactgcccccaacccaatccagctcagactcaagccccccagaagtgagcggccctagtagcagccagatgtcaatgaaaaccagaaggctgtccagcgcttccacaggaaaaccaccactcagcgtcgaagatgattttgagaagttgatttgggaaatcagcggcggcaagctggaggcagaaatagacttggacccggggaaagatgaagacgatctcctcttagagctctccgagatgattgattcttag

SEQ ID NO: 182474 - DNA, 2433 bp, Artificial Sequence
  derived and/or modified sequence
atgccgaatcagggggaggattgttacttctttttctacagcacctgcactaagggcgacagttgccctttccggcattgtgaggctgccatcggaaatgagactgtgtgcacattatggcaggagggcaggtgttttcgacaggtgtgtcgctttaggcatatggagatcgacaagaagcgaagtgagattccatgctactgggaaaatcagccaactggctgtcagaagctgaattgtgcctttcatcataacagaggccgttacgtggatggtctattcctgccaccttctaaaacagtgctgcccaccgtcccagagagtccagaggaggaagtaaaggctagccagctttccgtgcagcagaataagctcagcgtgcagagcaatccctcgccccagctcaggtccgtcatgaaggtcgagagctcagaaaacgtgccatcacccactcaccccccagttgtgatcaacgccgccgatgacgatgaggatgacgatgatcaattctctgaggaaggcgatgaaactaagacaccgactctccagccaacacctgaggtgcataatgggctgcgtgttacatcagtacgtaaaccagcagtgaacataaaacagggggaatgccttaactttggcatcaagacacttgaagaaatcaagtctaagaaaatgaaggagaaatcaaaaaaacagggcgaaggtagcagtggcgtgtccagcctgctgttgcatcccgagccagtcccagggcctgagaaggaaaatgtaaggaccgtcgtacgcacagtcacgttgtcgacgaagcagggcgaggaacccctggtgagattaagcttgactgagagacttggcaagaggaaattctccgccgggggagactccgaccctccattgaagaggagcttggcccagcgtttgggcaaaaaggttgaggcaccagagacaaacattgacaagacccctaaaaaggctcaggtcagcaaatctctgaaggagaggttgggtatgtcggcggaccctgacaacgaagatgcgaccgataaggtgaacaaggtcggagagattcatgtgaaaaccctagaggagatccttcttgagagagcatcacaaaagcggggcgagctccaaaccaaattaaagactgagggaccatctaaaacagacgactctacttccggcgcccgaagctcttccactattcgaattaagacattttctgaggtgctggccgaaaagaaacaccggcagcaggaagcagaacgtcaaaagtccaagaaggataccacttgcattaaattaaaaattgatagcgaaattaagaagacagttgtgctgcctccaatcgtggcctctcgtgggcagagtgaggagccagccggtaaaaccaagtctatgcaggaagtacacattaaaacgctcgaggagataaaactggaaaaagctctacgtgtgcagcagtcgagtgagtcttccaccagtagtccttcccagcatgaagcgacgcctggcgccaggaggctgctccggatcaccaaacgaacagggatgaaggaagaaaaaaatctgcaggagggcaatgaggtggactctcagagctcgattagaacagaagctaaggaggccagcggcgaaactactggcgtggatataaccaagatccaggttaaacgttgcgagacaatgcgggaaaaacacatgcagaaacagcaggagcgagagaaaagcgtgttgactcctctgcggggagacgtcgctagctgcaatacccaggtggccgagaaaccggtgttaacagctgtgcccggcattaccagacatttgactaaaaggctgccgaccaagagctcgcagaaggtggaagtggaaacttccggcattggcgattctttgcttaacgtcaaatgcgcagcccagacactggaaaaaagagggaaagccaagcccaaagtgaatgtcaagcccagtgtggtgaaagtcgtttcatcacccaaactggcccctaagcgcaaggcggtcgagatgcatgcagcagtgattgctgccgtgaaaccactctccagttcgtctgttctacaggaaccacccgctaaaaaggccgcagtggccgttgtccctcttgtctctgaggataagagcgtgacagtgccagaggcagaaaatccacgcgacagcctcgtgctaccacctactcaatcaagctccgacagcagtcccccagaagtatccggaccttccagcagccaaatgtctatgaagacaagaaggctctcatcggcctctactggaaaaccgcctttatccgtggaggatgatttcgaaaaactgatatgggaaatctcagggggcaaactcgaagcagagattgatctggatccggggaaggatgaagacgatctgctcctggagttgagtgaaatgattgattcgtag

SEQ ID NO: 182475 - DNA, 1548 bp, Artificial Sequence
  derived and/or modified sequence
atgcccaatcagggggaggattgctattttttcttttattcgacttgtacgaaaggagatagctgccctttccgacattgtgaggctgccatcggaaacgagacagtctgcacgctgtggcaagaaggtaggtgttttcgccaggtttgcagattcagacatatggaaatcgataaaaagcgaagcgagattccttgctattgggaaaaccagcccaccggatgtcagaagctgaattgcgcttttcaccataaccgcggcagatacgtggacggtctcttcctcccacctagcaaaaccgttttgcccactgtaccagagtcccccgaagaggaggtgaaagcgagccagttatccgtgcagcagaataaactctccgtgcaatctaacccttcccctcaacttcggtcagtaatgaaagtggagagttctgaaaatgtgcccagtcctacacatccacccgtcgtgatcaatgccgctgatgacgatgaagacgacgacgaccagttttcagaggagggagatgaaactaaaacaccaactttacagcctacgcccgaggtgcacaatggcctaagggtgacaagtgttaggaagcccgccgtgaacattaagcagggtgagtgtctaaactttggtatcaagaccctcgaggagatcaagagtaaaaaaatgaaagagaaatctaagaagcagggcgagggtagcagcggggtgagctctctgctgctccaccctgagccggtgccgggacccgagaaagaaaatgtccgtacagtcgtgcggacagtcaccctcagcaccaagcagggcgaggagccactggttcggctttccctgacagagcgcctcgggaaacgcaagtttagtgctggtggagactctgatccgccactgaaaaggagcctggctcagaggctggggaaaaaagttgaagcccctgaaactaatattgacaaaacacccaagaaagcccaggtctccaagtcacttaaggagcgcctcggcatgagtgccgaccctgataatgaggatgctacggacaaggttaataaggtaggcgagattcacgttaagaccctggaggaaatcctccttgagcgtgcaagccagaagcgcggcgaactgcagacaaagttgaaaaccgaaggccccagcaaaaccgatgattccacctcaggtgcaaggtccagttccactattaggatcaaaaccttctccgaggttttggccgaaaagaaacatcgccaacaggaggccgagcgccagaaatctaagaaggacactacgtgtattaagcttaagattgattcagaaatcaaaaagacagtggtgctgcccccaattgtagcctcccgggggcagtccgaagaacccgctggaaagactaagtcgatgcaagaggtgcacattaagaccttggaggagataaagttagagaaagcactgagagtccagcagtcaagtgaaagctccacttcctccccatctcagcacgaagccacacctggggctcgaaggctcctgcgaatcacaaaacgtacttag

SEQ ID NO: 182476 - DNA, 2271 bp, Artificial Sequence
  derived and/or modified sequence
atggagatcgataagaagcgtagtgaaataccttgctattgggagaatcaacccaccgggtgccagaagcttaattgtgcttttcatcataaccgtgggcgatacgttgacgggctgttcctgccgccctctaaaactgtattgccaaccgtaccagagagccctgaagaagaggtcaaagcgagtcagctgagtgtgcagcaaaacaagctgtcagtccaatctaatccctctccacagctcaggtcagtcatgaaggttgaatcgagcgaaaacgtgccctcccctacccatccccctgtggtcatcaatgctgcagatgacgatgaagacgatgacgatcaattctccgaggaaggcgatgagacgaaaacacccaccctccagccaaccccagaagtgcacaatggccttcgagttaccagtgtccggaagccagcagtgaacataaagcaaggagaatgcctgaactttgggataaaaacgctggaagaaataaagagtaagaaaatgaaggaaaaaagcaagaagcagggggagggcagttccggcgtgtcatctcttctactgcatcccgaaccagttcctgggccggagaaggaaaacgtaagaaccgtggttagaacagtcactctgtccaccaaacagggcgaagagccattggtgcggctgtcactcacagaacggctgggcaaacggaaattttccgctggaggtgatagcgaccccccactaaagcgcagtctcgcccagcggttaggcaaaaaggtggaagcaccagagacaaacatcgataagaccccaaagaaggctcaagtgagcaagtctctaaaagaaaggctcggaatgtcagcggaccccgataatgaagacgctaccgacaaggtgaataaggtcggcgagattcacgtgaagactctggaggaaattctcctggaacgagcttcgcaaaagaggggcgaactgcagacaaaactgaaaactgaaggaccttccaaaaccgacgattcaaccagcggcgctaggtcctcatccacgattcgtatcaaaaccttttctgaagttttggctgagaagaagcaccggcaacaggaggccgagaggcagaaatccaaaaaggataccacctgtataaagctgaaaatcgactcggagatcaaaaagaccgtcgttctgcctccaattgtcgcaagtaggggacagtctgaagaacctgcaggaaaaacaaaatctatgcaggaagttcatattaaaactctggaggaaatcaagttagaaaaagctctgcgtgtgcaacagtcaagtgagtctagcacttcaagccccagtcagcatgaagctacccctggagcacggagactgctgaggattacaaaaaggacagggatgaaggaagaaaaaaacctccaggagggtaacgaagtcgacagtcagtcctctatccgcaccgaggcaaaggaggccagtggagagacaacgggcgtggatatcaccaagatacaagttaagcggtgcgaaacaatgagagagaaacacatgcaaaaacagcaagaacgggaaaagagtgtgctaacgcccctccgtggggatgtggctagttgcaacacccaggtggccgaaaagccagtactcaccgccgtgccaggtattaccaggcatctgacgaagagattgcctaccaagagtagccagaaggtagaagtagagacttctggaattggtgattctcttttgaatgtgaagtgtgcagctcagactctagagaagcggggcaaggctaaaccgaaggtcaacgtcaaaccatctgtcgtaaaggtcgtttctagtcctaaactggcaccaaagcggaaagctgtggagatgcacgctgctgtgattgctgctgtaaaaccgctcagtagctccagtgtgttgcaggagccgccagctaagaaggctgctgtagccgtggttccgcttgtttccgaagacaaatccgtaacagtacctgaggcagaaaatccaagagattctttggtcctgcccccaactcagtcgtcctccgactccagtcccccagaagtttcgggtccaagctcatcgcagatgtctatgaaaaccagacgcttgtcttcagcttcgaccgggaaaccacctctgtcggtagaggatgattttgaaaaacttatctgggagatatcggggggcaaactggaagccgaaattgacctggatccagggaaagacgaggatgacctgctgctggagttgtcagagatgatagattcatag

SEQ ID NO: 182477 - DNA, 2433 bp, Artificial Sequence
  derived and/or modified sequence
atgccaaatcagggagaagactgctattttttcttttacagcacttgcacgaagggcgattcttgtccctttcgtcattgcgaggccgcaattggaaacgaaaccgtctgcacgctctggcaagaaggacggtgcttccggcaggtgtgccggtttcgacatatggaaatcgacaagaaaaggtcagagattccctgttactgggaaaaccagcccacaggctgccaaaagctgaattgcgcattccaccataatagaggacgctatgtggatggtctgtttctccccccctccaagacagtccttcctacagtccctgagtccccagaggaggaagttaaagcctcacagctttccgttcagcagaacaaactgtcagtacagtcaaacccatctcctcagctccggtccgtgatgaaggttgagagttccgaaaacgttccgagccccacccaccctcccgtcgttattaacgccgccgacgacgacgaagacgatgatgaccaatttagcgaggagggagacgaaaccaaaactccaacattgcagcccacacccgaagtgcataacgggttgagggtgacctctgtcagaaagccagccgtaaacattaagcagggggagtgtctcaactttggtatcaaaactctcgaggaaatcaaatccaagaaaatgaaggaaaaaagcaaaaaacagggcgagggatcgagtggcgtctccagtctgctgttgcatcctgagcccgtgcccggacctgaaaaggagaacgtgagaacagtcgttagaacagtaacgctttctactaagcaaggggaagaacctcttgtgcgcctcagccttactgaaagactggggaagaggaagttctctgcaggaggcgactctgaccctcccttaaagaggagccttgcgcagcggctgggcaagaaggtggaggcacccgagactaacatagataaaacccctaagaaggcacaggtttctaagtctttaaaagagaggctgggcatgtcagctgaccctgataatgaagatgccacggacaaggtgaacaaggtgggggagattcacgtgaaaaccttggaggaaatacttcttgagcgagcctctcagaaaagaggcgaattacagactaaacttaaaacagaaggtccatccaagacggacgatagcacctctggtgcccggagttcgtccaccatcaggataaagacgttcagcgaagtgctcgcagagaagaaacacaggcagcaagaagcagagcgccagaaatctaagaaagacaccacttgcatcaagctcaagatagactctgagataaagaagactgtcgtgctccccccgatagtggccagtagaggccaaagtgaagaaccagcaggcaaaacaaagtccatgcaggaggtacacatcaagacgttagaggagatcaagctcgagaaagccctgagagtccagcagtcgtcagagagttctacgtcctccccctcacaacacgaggcaaccccgggcgcaaggcggctgcttagaataactaagaggactggaatgaaggaagaaaagaacctgcaggagggcaacgaagtggacagccagagcagtatcaggaccgaggccaaggaggcatccggagaaactaccggggttgacatcactaagatccaagttaaaaggtgtgagacaatgagagaaaaacatatgcaaaagcagcaggagagggagaagtcggtgctgacacccttacgcggcgatgtggcttcatgcaatacacaggtggcagagaagcctgtgttaacggctgtccctggaattacgcgacacctgacaaaacggctgcccactaaatcctcacagaaggtcgaggtcgagaccagcggtatcggagactccctgctgaacgtgaagtgtgccgcgcaaacactggagaagcgtggcaaagctaagcctaaagttaacgtcaagcccagcgtggtgaaagtagttagttcacctaaactggccccgaaacgaaaagccgttgagatgcacgcggccgtgattgccgcagtaaaacccctgtccagttccagtgtgttacaggaacctccagctaaaaaggccgcagtggccgtggtgcctttggtctctgaggacaaaagcgtgactgttccggaggctgagaatcctagagacagcctggtactgcccccaacacagtctagttctgactcatcccctccagaagttagcggcccttctagcagtcagatgagtatgaaaacgaggcggctgtcttcagcttcaactgggaagccccctttatcagtggaggatgattttgaaaagctgatctgggagatctctggcgggaagcttgaggctgagatcgacctggacccgggaaaagacgaggacgaccttttattggagctgtccgagatgattgactcttag

SEQ ID NO: 182478 - DNA, 2433 bp, Artificial Sequence
  derived and/or modified sequence
atgcccaaccagggcgaggactgctacttcttcttctacagcacctgcaccaagggggacagctgccccttccgccactgtgaggccgccatcggaaatgaaacagtgtgcaccctgtggcaggagggccgctgcttccggcaggtgtgccgcttccgccacatggagattgacaagaagaggtctgagatcccctgctactgggagaaccagcccaccggctgccagaagctgaactgtgccttccaccacaacagaggccgctacgtggatggcctcttcctgccccccagcaagacagtgctgcccaccgtgcctgagagccctgaggaggaggtgaaggccagccagctgtctgtgcagcagaacaagctgtctgtgcagagcaaccccagcccccagctgcggtctgtgatgaaggtggagagcagtgaaaatgtgcccagccccacccacccccctgtggtgatcaatgctgctgatgatgatgaagatgatgatgaccagttcagcgaggagggagatgagaccaagacccccaccctgcagcccaccccagaggtgcacaacggcctgcgggtgacctctgtgaggaagccagctgtgaacatcaagcagggcgagtgcctgaactttggcatcaagaccctggaggagatcaagagcaagaagatgaaggagaagagcaagaagcagggcgagggcagcagtggagtgagcagcctgctgctgcaccctgagcctgtgcccggccctgagaaggaaaatgtgaggacagtggtgaggacagtgaccctgagcaccaagcagggcgaggagcccctggtgcggctgagcctgacagagcggctgggcaagaggaagttctctgctggaggagacagcgacccccccctgaagaggagcctggcccagaggctgggcaagaaggtggaggcccctgagaccaacatcgacaagacccccaagaaggcccaggtgtccaagagcctgaaggagcggctgggcatgtctgctgaccctgacaatgaagatgccacagacaaggtgaacaaggtgggggagatccacgtgaagaccctggaggagatcctgctggagcgggccagccagaagagaggagagctgcagaccaagctgaagacagagggccccagcaagacagatgacagcaccagcggggcccggagcagcagcaccatccgcatcaagaccttcagcgaggtgctggccgagaagaagcaccggcagcaggaggccgagcggcagaagagcaagaaggacaccacctgcatcaagctgaagattgacagcgagatcaagaagacagtggtgctgccccccatcgtggccagccggggccagagcgaggagcctgctgggaagaccaagtccatgcaggaggtgcacatcaagaccctggaggagatcaagctggagaaggccctgcgggtgcagcagagcagcgagagcagcaccagcagccccagccagcacgaggccacccctggggcccggcggctgctgcgcatcaccaagaggacaggcatgaaggaggagaagaacctgcaggagggcaatgaggtggacagccagagcagcatcagaacagaggccaaggaggccagcggggagaccactggagtggacatcaccaagatccaggtgaagagatgtgagaccatgagggagaagcacatgcagaagcagcaggagcgggagaagtctgtgctgacccccctgcggggagatgtggccagctgcaacacccaggtggccgagaagcctgtgctgacagctgtgcccggcatcaccaggcacctgaccaagaggctgcccaccaagagcagccagaaggtggaggtggagaccagcggcattggagacagcctgctgaatgtgaagtgtgccgcccagaccctggagaagaggggcaaggccaagcccaaggtgaatgtgaagcccagcgtggtgaaggtggtgagcagccccaagctggcccccaagaggaaggctgtggagatgcatgctgctgtgattgctgctgtgaagcccctgagcagcagctctgtgctgcaggagcccccagccaagaaggctgctgtggccgtggtgcccctggtgtctgaggacaagtctgtgacagtgcctgaggccgagaacccccgggacagcctggtgctgccccccacccagagcagcagtgacagcagccccccagaggtgtctggccccagcagcagccagatgtccatgaagacccggcggctgagcagcgccagcacaggcaagccacccctgtctgtggaggatgactttgagaagctgatctgggagatcagcggcggcaagctggaggccgagattgacctggaccccgggaaggatgaagatgacctgctgctggagctgtctgagatgattgacagctag

SEQ ID NO: 182479 - DNA, 1548 bp, Artificial Sequence
  derived and/or modified sequence
atgcccaaccagggcgaggactgctacttcttcttctacagcacctgcaccaagggggacagctgccccttccgccactgtgaggccgccatcggaaatgaaacagtgtgcaccctgtggcaggagggccgctgcttccggcaggtgtgccgcttccgccacatggagattgacaagaagaggtctgagatcccctgctactgggagaaccagcccaccggctgccagaagctgaactgtgccttccaccacaacagaggccgctacgtggatggcctcttcctgccccccagcaagacagtgctgcccaccgtgcctgagagccctgaggaggaggtgaaggccagccagctgtctgtgcagcagaacaagctgtctgtgcagagcaaccccagcccccagctgcggtctgtgatgaaggtggagagcagtgaaaatgtgcccagccccacccacccccctgtggtgatcaatgctgctgatgatgatgaagatgatgatgaccagttcagcgaggagggagatgagaccaagacccccaccctgcagcccaccccagaggtgcacaacggcctgcgggtgacctctgtgaggaagccagctgtgaacatcaagcagggcgagtgcctgaactttggcatcaagaccctggaggagatcaagagcaagaagatgaaggagaagagcaagaagcagggcgagggcagcagtggagtgagcagcctgctgctgcaccctgagcctgtgcccggccctgagaaggaaaatgtgaggacagtggtgaggacagtgaccctgagcaccaagcagggcgaggagcccctggtgcggctgagcctgacagagcggctgggcaagaggaagttctctgctggaggagacagcgacccccccctgaagaggagcctggcccagaggctgggcaagaaggtggaggcccctgagaccaacatcgacaagacccccaagaaggcccaggtgtccaagagcctgaaggagcggctgggcatgtctgctgaccctgacaatgaagatgccacagacaaggtgaacaaggtgggggagatccacgtgaagaccctggaggagatcctgctggagcgggccagccagaagagaggagagctgcagaccaagctgaagacagagggccccagcaagacagatgacagcaccagcggggcccggagcagcagcaccatccgcatcaagaccttcagcgaggtgctggccgagaagaagcaccggcagcaggaggccgagcggcagaagagcaagaaggacaccacctgcatcaagctgaagattgacagcgagatcaagaagacagtggtgctgccccccatcgtggccagccggggccagagcgaggagcctgctgggaagaccaagtccatgcaggaggtgcacatcaagaccctggaggagatcaagctggagaaggccctgcgggtgcagcagagcagcgagagcagcaccagcagccccagccagcacgaggccacccctggggcccggcggctgctgcgcatcaccaagaggacatag

SEQ ID NO: 182480 - DNA, 2271 bp, Artificial Sequence
  derived and/or modified sequence
atggagattgacaagaagaggtctgagatcccctgctactgggagaaccagcccaccggctgccagaagctgaactgtgccttccaccacaacagaggccgctacgtggatggcctcttcctgccccccagcaagacagtgctgcccaccgtgcctgagagccctgaggaggaggtgaaggccagccagctgtctgtgcagcagaacaagctgtctgtgcagagcaaccccagcccccagctgcggtctgtgatgaaggtggagagcagtgaaaatgtgcccagccccacccacccccctgtggtgatcaatgctgctgatgatgatgaagatgatgatgaccagttcagcgaggagggagatgagaccaagacccccaccctgcagcccaccccagaggtgcacaacggcctgcgggtgacctctgtgaggaagccagctgtgaacatcaagcagggcgagtgcctgaactttggcatcaagaccctggaggagatcaagagcaagaagatgaaggagaagagcaagaagcagggcgagggcagcagtggagtgagcagcctgctgctgcaccctgagcctgtgcccggccctgagaaggaaaatgtgaggacagtggtgaggacagtgaccctgagcaccaagcagggcgaggagcccctggtgcggctgagcctgacagagcggctgggcaagaggaagttctctgctggaggagacagcgacccccccctgaagaggagcctggcccagaggctgggcaagaaggtggaggcccctgagaccaacatcgacaagacccccaagaaggcccaggtgtccaagagcctgaaggagcggctgggcatgtctgctgaccctgacaatgaagatgccacagacaaggtgaacaaggtgggggagatccacgtgaagaccctggaggagatcctgctggagcgggccagccagaagagaggagagctgcagaccaagctgaagacagagggccccagcaagacagatgacagcaccagcggggcccggagcagcagcaccatccgcatcaagaccttcagcgaggtgctggccgagaagaagcaccggcagcaggaggccgagcggcagaagagcaagaaggacaccacctgcatcaagctgaagattgacagcgagatcaagaagacagtggtgctgccccccatcgtggccagccggggccagagcgaggagcctgctgggaagaccaagtccatgcaggaggtgcacatcaagaccctggaggagatcaagctggagaaggccctgcgggtgcagcagagcagcgagagcagcaccagcagccccagccagcacgaggccacccctggggcccggcggctgctgcgcatcaccaagaggacaggcatgaaggaggagaagaacctgcaggagggcaatgaggtggacagccagagcagcatcagaacagaggccaaggaggccagcggggagaccactggagtggacatcaccaagatccaggtgaagagatgtgagaccatgagggagaagcacatgcagaagcagcaggagcgggagaagtctgtgctgacccccctgcggggagatgtggccagctgcaacacccaggtggccgagaagcctgtgctgacagctgtgcccggcatcaccaggcacctgaccaagaggctgcccaccaagagcagccagaaggtggaggtggagaccagcggcattggagacagcctgctgaatgtgaagtgtgccgcccagaccctggagaagaggggcaaggccaagcccaaggtgaatgtgaagcccagcgtggtgaaggtggtgagcagccccaagctggcccccaagaggaaggctgtggagatgcatgctgctgtgattgctgctgtgaagcccctgagcagcagctctgtgctgcaggagcccccagccaagaaggctgctgtggccgtggtgcccctggtgtctgaggacaagtctgtgacagtgcctgaggccgagaacccccgggacagcctggtgctgccccccacccagagcagcagtgacagcagccccccagaggtgtctggccccagcagcagccagatgtccatgaagacccggcggctgagcagcgccagcacaggcaagccacccctgtctgtggaggatgactttgagaagctgatctgggagatcagcggcggcaagctggaggccgagattgacctggaccccgggaaggatgaagatgacctgctgctggagctgtctgagatgattgacagctag

SEQ ID NO: 182481 - DNA, 2433 bp, Artificial Sequence
  derived and/or modified sequence
atgcccaaccagggcgaggactgctacttcttcttctacagcacctgtacaaagggagattcttgccctttccgacactgtgaagccgcaattgggaatgagactgtgtgcacactctggcaagagggaagatgcttcagacaggtttgtcgcttcagacacatggaaatagacaagaagaggtccgagataccctgctactgggagaatcagcctaccggttgtcaaaagctcaattgtgcctttcaccataatagagggagatacgttgatggtttgtttctgcctcctagcaaaaccgtattacctactgtccccgagagcccagaggaggaagtcaaggcttctcagctgtcggtgcagcagaataaactctctgtacagtccaatccaagcccgcagttaagaagcgtgatgaaagttgagtcttccgagaacgtgcccagccctactcatccaccggtggtgatcaatgccgccgatgacgatgaagatgatgatgatcagttctccgaagagggggatgagactaaaacgccgactctccaacccacacccgaagttcacaacggactgcgtgtgaccagtgtgcggaaaccagccgtgaatattaaacagggcgagtgtctcaatttcggcatcaaaactcttgaagaaatcaaatcgaagaaaatgaaagaaaagtccaaaaagcaaggggaaggcagttcaggggtctcaagcctccttctgcaccctgagccggtgccaggccccgagaaggaaaatgtgagaaccgtcgttcgcactgttaccttgtctaccaagcagggagaagaacctctcgttagactgtcactgacggaaagactcggaaagcgcaagttttccgccggcggcgattcggaccccccactgaagaggagcctggcacagcgtcttggaaaaaaggtagaagcaccggagactaacattgataaaaccccaaagaaggcgcaggtgtctaagtctctgaaagaaaggttgggcatgtccgcagaccccgacaatgaggatgctaccgacaaggtgaacaaggtgggagaaattcacgtaaagacactagaggagatcctgctggagcgcgcatctcaaaaaaggggagagttgcagactaagctcaaaacggagggcccatccaagacagacgattctacgagcggagcccgttccagctctactatccggatcaaaaccttcagcgaggtgttagccgagaaaaaacatcggcaacaggaggccgagcggcagaaaagcaagaaggacaccacatgcatcaaactaaagattgattcagagatcaaaaaaactgtagtactgcctcctatcgtggcctcgagaggccagagcgaggagcctgcagggaagacaaagtctatgcaggaagttcacattaagacattggaggagattaaactggaaaaagccctgcgggtacagcaatccagtgagtctagcacgtcatccccatctcagcacgaggccactccaggggctcgacggcttctgcgaatcacaaagcgaacagggatgaaagaagaaaagaacctccaggaggggaacgaagtggactcacaaagctccatccgtacagaggccaaagaagcttccggggagactaccggcgttgacatcaccaagattcaggtgaaacggtgcgagaccatgcgggagaagcacatgcagaaacagcaggaacgagagaagtccgtgctgactccattacgcggggacgtggcctcttgtaacacccaggtggctgaaaaaccagtgctcaccgcggtccccggcatcactcgccacctgaccaagcgtttacccacaaagagcagccaaaaggtggaggtggagaccagcgggattggtgactccctccttaatgtgaagtgtgctgctcagaccctggagaaacggggtaaagctaaacctaaagtgaacgtgaagccatctgtcgtcaaagtagtgagttcccccaagctggcccctaaaagaaaagcagtggagatgcacgcagccgtgatcgcagctgtgaaaccattgagtagctccagtgtgctgcaagagccgcccgcgaagaaggccgcggtggcagtggttcctctggtatcagaagacaagtccgtgacagtcccagaggcagagaatccacgagattcactggtgctcccacctacgcagtcaagctccgattcatccccgccagaagtgtccggaccctcatcatcacagatgtcaatgaagactagacgcctctctagcgcctctacgggcaaacctcccctgagtgtagaggacgactttgaaaaactcatttgggagatctcaggcggcaaactcgaagccgaaattgacctcgatccgggcaaggatgaggatgatctgttgctggagctaagtgagatgattgactcctag

SEQ ID NO: 182482 - DNA, 2433 bp, Artificial Sequence
  derived and/or modified sequence
atgcccaaccagggcgaggactgctacttcttcttctacagcacctgtactaagggagattcctgtccttttcgccattgtgaggcagctattggaaatgaaacagtttgtaccctctggcaggagggacgctgttttaggcaagtgtgcaggttccggcacatggagatcgataaaaaacgctctgagatcccctgttactgggagaatcagcccaccggttgtcagaaactaaactgcgcatttcatcacaacaggggaaggtacgtggacggcctttttctgccaccttctaaaaccgtgctgcctactgtgccggagtctccggaggaagaagtgaaagcttcacaactgagtgtccagcaaaataagctgtcagtgcagtccaaccccagtccgcaactgagatcagttatgaaggtggaaagctctgaaaatgttcccagtcctacacatcctccggtcgtgatcaatgcagccgacgacgacgaagacgacgatgatcaattctccgaggaaggagatgaaactaaaacacctacactgcaacctacaccggaagtccacaacggcttacgggtcacatcggttcgcaagccagcagtgaacataaagcaaggtgaatgtttaaacttcggaatcaagaccctggaagagattaagagcaagaagatgaaagaaaagagcaagaaacagggagagggctcctccggcgtgtcaagtctgcttctgcatccagagccagtgcctggcccagaaaaggaaaacgtacgaactgtggtcaggacagtgactctgtcaaccaagcaaggggaggaacctctggtccgcctctcgctgactgagcggctgggcaagaggaaatttagcgccggtggggatagcgaccccccactcaagaggtcattggcacagagactgggcaaaaaggtggaagcacctgaaacaaacattgataaaactcctaaaaaagcccaggtctctaagtctcttaaagaacgcctcggcatgtctgctgaccctgataatgaggatgccactgataaggtgaacaaagtgggagaaatccacgtgaaaaccctggaggagattctgctggagagagcctcccagaagcggggagaactccagactaagctgaaaacagaagggccctcaaaaacagatgactccacctccggcgcacggtccagcagcactattcgcattaagacattttcagaggtgctggcggaaaaaaagcaccgacagcaggaagctgagcggcaaaaatctaaaaaggatacaacttgcatcaaactgaagatcgactccgaaatcaaaaagaccgtggtcctgcctccaattgtggcctcacggggacagtctgaggagcccgcagggaagaccaagtcaatgcaggaagtccacatcaagactctagaagagatcaaattggagaaggcactgcgagtacagcagagcagtgaaagctccacgtcttcccctagtcaacatgaggctaccccaggagctcggagactgttaaggattaccaaaaggacaggcatgaaggaagaaaaaaatctgcaggaaggcaatgaggtggacagccagtcttcaatacgcaccgaggccaaggaggcgtcgggtgaaaccaccggcgtagatatcactaagatacaggtgaaaaggtgtgagacgatgcgggagaagcacatgcaaaagcaacaagagcgcgaaaagtcggttttgacacctctgagaggagatgtagcctcttgcaacacccaggtggctgaaaaacccgtgctcaccgcagtccccggcatcacccgccaccttactaagcgccttcccactaaatctagtcagaaagtggaggtcgaaaccagtggaattggtgactcgttattaaacgtgaagtgcgctgctcagactctggagaagcgcggaaaggctaaacctaaagtcaacgtcaaacctagcgtggtcaaggttgtgtctagtcccaaattggcacctaagagaaaggctgtagaaatgcacgcggccgtcattgccgctgtgaagcccctctcgagctcttcagttttacaagaacctccggccaaaaaagccgctgtcgctgtggtccctctggtgagtgaggataagagcgtcactgtgcccgaggcggagaatccacgcgattccttggtgttgccaccaactcaaagcagctcggattctagtccccccgaggtgagtggcccatctagtagccagatgtctatgaaaacaagaagactgagttcagcatcaactggcaagccacctctgagtgtagaggacgatttcgagaaattaatctgggagatttccggaggaaaattagaggcggagattgacctggatccgggtaaagacgaggatgatctgctcttagagctgagcgagatgatcgattcctag

SEQ ID NO: 182483 - DNA, 2433 bp, Artificial Sequence
  derived and/or modified sequence
atgcccaaccagggcgaggactgctacttcttcttctacagcacctgcactaaaggggattcctgtccttttcggcattgtgaagccgccattggaaacgagactgtctgtactctgtggcaggaaggtcgctgtttcaggcaagtctgtcgtttcaggcacatggaaatcgataaaaagcgtagtgaaattccatgctactgggaaaaccagcctactggctgccagaagttgaactgtgcctttcaccacaatagagggcgatatgttgatgggttgttcctgccccctagcaaaactgtgctgcccactgtgcccgagagccccgaggaggaagtcaaagcttctcaattgagcgttcagcaaaacaaactgagtgtgcaaagcaatccatctcctcagttgagatctgtgatgaaagtcgagtcttctgaaaatgtacctagtcctacacacccaccagttgttataaatgccgccgacgatgatgaggacgatgacgatcagttctccgaggaaggtgatgagaccaagaccccaacacttcagccgacaccagaggtccataatggcctgcgggtgactagcgtgcggaagcctgccgtgaatatcaagcaaggtgagtgtttaaattttggaatcaaaaccctggaggaaattaagtcgaaaaaaatgaaggaaaaatctaaaaagcagggagaagggagttccggagttagctcactactgcttcaccctgagcccgtccccggccccgagaaggaaaacgtccggacggtagtgagaacagtgaccctgagtaccaagcagggagaggagccactggtgcgcctttccctgacagagcggctcggaaaaaggaagttttccgcaggaggtgactccgatcctccattaaaaaggtctctggcgcagcggcttggaaagaaggtggaggctcccgaaacaaacatagacaagacgcctaagaaggcgcaggtgtctaagtcccttaaggaacgtttgggcatgagcgctgatcccgataacgaggatgccaccgacaaagtgaataaagtgggagagatccatgtaaaaactctcgaggagatactgctagagagagccagccagaaaagaggcgagctgcaaaccaagctgaaaaccgaaggcccctcgaaaacagatgattcaacttcgggcgctcgatccagctccaccatccgcatcaagaccttttccgaagttttagcggagaaaaagcatagacagcaggaagcagagcgacagaagagtaaaaaggacacaacatgcatcaagcttaaaattgacagtgaaattaagaagactgtggtgctccctcccatcgtcgctagcagaggccagagtgaggagcctgccggcaagactaagtcaatgcaagaggtgcatattaagactctagaggagatcaaattggaaaaggccctcagagtgcaacagtcgtcagaaagctccacgtcatcgccttctcagcatgaagctacccccggggctaggcggctgctacggattaccaaacgcacaggcatgaaggaggagaagaacctccaggaggggaatgaggtggactctcagtccagcattcgaacagaagcaaaagaggctagtggtgagacaaccggagtggatatcaccaagatacaggtgaagcggtgtgagaccatgagagagaaacacatgcagaagcagcaggaacgtgaaaagagcgtcctcacgcccctgcgcggtgacgtagctagctgtaatacccaggttgcagagaaaccggttctgactgctgtgcccggtattacgagacatctgacgaagaggctgccaactaagagttcgcagaaggtcgaggtggagacaagtgggattggcgattcccttctgaatgtaaagtgtgcagctcagacattggaaaagcgcgggaaagccaaacccaaggttaatgtgaagccatcggtcgtcaaggtggtgagttcccccaaactggctcctaaacgcaaagccgtagaaatgcatgctgccgtgattgctgcggtcaaacccctgtccagctccagcgttttgcaggaaccccctgctaagaaagctgcggttgcagttgtgcccttggtgagcgaagacaaatcagtcacagtgcccgaggccgaaaatccaagagattccctggtcctaccgcctacccagtcaagttcagatagctctcccccagaagtgtcgggcccttcttccagccagatgagtatgaagacacgacgcctgagctctgcttccacgggtaagccacctctgtcagtcgaggacgacttcgaaaaactcatctgggaaatctccggaggcaaactggaggctgagatagacctggacccaggaaaagacgaagacgacttgctgctagagctttcggagatgatcgatagttag

SEQ ID NO: 182484 - DNA, 2433 bp, Artificial Sequence
  derived and/or modified sequence
atgcccaaccagggcgaggactgctacttcttcttctacagcacctgtaccaagggagatagttgtcccttccgtcactgtgaggcagctattggcaacgagacggtgtgtaccttgtggcaagaggggaggtgttttagacaagtctgccggtttcgccacatggaaatcgataaaaaacggtccgagattccctgctattgggagaatcagcccactggctgtcagaagcttaactgtgcttttcaccacaatcggggcagatacgtggacggcctttttttacccccaagcaaaaccgttctaccaacagtgccagagtcaccggaggaagaggttaaggccagccagctctccgtgcagcagaacaagctctcagtgcagtcaaacccgagcccccagctgagaagcgtgatgaaggtcgaatctagtgagaatgtaccatcaccaacccaccctccagtagtgatcaacgcagcggatgacgacgaggacgatgacgaccagttctctgaggaaggcgatgagaccaagaccccgacccttcaaccaactcccgaggtgcacaatggcctgcgcgttacatctgtgaggaagcccgcggtcaatatcaagcagggtgagtgcctgaacttcggaatcaagacccttgaagaaatcaaatccaagaagatgaaggaaaagagtaagaagcaaggggaaggaagttcaggggtgtcttcccttctgctgcatcccgagccagtgcctggcccagaaaaggaaaacgtgagaacagttgtcaggaccgtgacactgtcaactaaacagggcgaggagccactagtccgattatctttgactgagcgactggggaaacgaaaattttccgcagggggtgactcagatccaccattgaagagatccctagcccaacgactaggcaagaaggtagaggcaccggagacaaatattgacaagactcctaaaaaagctcaagtttcaaagagcctcaaggaacggctgggaatgtccgctgatcccgataacgaggatgcgacagacaaggtaaataaagtgggggaaatccatgtcaagaccctcgaggagatcctgctggaaagggcctcacagaagcggggcgaattacaaactaaacttaagactgaaggcccttctaagacagacgacagtaccagcggtgctaggtctagttcgacgatccgcattaagaccttttcggaggtgttagctgagaaaaagcacagacagcaggaagcagaacgccaaaagagtaaaaaagatacgacatgtatcaaactgaagatcgattcagaaatcaaaaagactgttgttctgccccctatcgtggcgagccgggggcaatcagaagagccagcaggaaaaaccaagtccatgcaggaagtacacataaaaactcttgaagagatcaagctggaaaaagcactaagagttcagcaatctagcgaaagtagcacttcctccccctcccagcatgaagccacccccggcgcgcggcgactactgcgcatcactaaaaggactggaatgaaggaggagaaaaatctccaggaaggaaatgaggttgacagccagagctcaattagaacagaagccaaggaggctagcggggagactacgggggtagacattacaaaaatccaagtgaagcgctgcgaaacaatgcgagaaaagcacatgcagaaacaacaggagcgtgagaagtctgtcctcaccccgttgagaggcgacgtcgcctcctgcaacacacaggtggccgagaagccggttctgaccgccgttccagggatcacaagacacctgacaaaacgcctaccgactaagtcttctcagaaggttgaggtcgagacgtccggcattggagacagtctcctgaatgtgaaatgcgctgcacaaaccttagaaaagagaggcaaagccaagcccaaagtcaacgtgaaaccatcagtcgtaaaggtggtctctagtcctaagcttgctccgaaaaggaaggccgttgaaatgcacgccgctgtaatcgccgccgtgaaacccctctcttcaagcagtgtcctccaggaacccccggccaagaaggccgctgttgcagtcgtcccccttgtctctgaggataaatctgtcacagtgcctgaggcagaaaatccaagagactcactcgtgctccctccaacccagagcagtagcgattcttcaccgcctgaggtttcaggcccatcatccagccagatgtccatgaagacgagacgcctgtcctcagccagcactggcaaacccccgttatccgttgaggacgacttcgaaaaattgatttgggagatttcggggggcaaactggaggcggagatcgacttggatcctggtaaggatgaagatgacctgttgctggaattgagcgagatgattgattcttag

SEQ ID NO: 182485 - DNA, 1548 bp, Artificial Sequence
  derived and/or modified sequence
atgcccaaccagggcgaggactgctacttcttcttctacagcacctgcactaagggggattcttgtccatttagacactgcgaagctgctatcggtaacgagacggtctgcactctatggcaggaaggaagatgcttccgacaggtttgccgctttagacatatggaaatcgacaagaagagaagcgagatcccatgctactgggagaaccaacctaccgggtgtcagaaattaaactgcgcctttcatcacaataggggacgctatgtcgatgggctgtttcttcccccatctaagactgtgttacctactgtccccgaatcaccggaagaggaggtgaaggcaagtcagctgagcgttcagcagaacaaactgtcggtccaaagcaatccaagtcctcagctcagaagtgtcatgaaggtggaatctagtgaaaatgttccgtctccaactcacccacctgttgtgatcaatgctgcagatgatgacgaagatgacgatgatcaattctctgaggaaggggatgagaccaaaactcccaccttacagcccactccagaagtgcataacggcctgcgcgtgacatctgtgcgcaaaccagccgtgaacatcaaacagggcgaatgcctgaactttgggattaaaacactagaggaaattaaaagtaaaaaaatgaaggagaagtctaagaagcagggggaaggatctagtggtgtaagctctctgctacttcatcccgaacccgtgcccggacctgagaaagagaacgtgagaacggtggtacgaaccgtcacactctctacaaaacagggcgaagaacccctagtgcggctctccctgaccgagcgccttggcaagcgaaagttctccgccggaggcgattccgacccacccctgaagaggagcctggctcaaaggctcggcaaaaaggtggaggcaccagagacaaatattgacaagacacccaaaaaagcgcaggtgagtaaatccctgaaggaacgtttagggatgtctgcagatcctgacaacgaagatgcaactgacaaagtaaacaaagtcggcgaaattcatgtgaaaacactcgaagagattctcctggagcgtgcaagccagaagcgaggcgaacttcagacgaagctgaagaccgaagggcccagtaagacggacgatagcacctctggtgcaaggagcagcagtacaatcagaatcaagacttttagcgaagtgctcgctgaaaagaagcaccgccagcaggaggctgaaagacagaaaagcaagaaggacaccacatgtatcaagctgaaaattgatagcgagataaaaaaaaccgttgtcctgccccccatcgtggccagtcgtgggcagtctgaggaacctgccggaaaaaccaagagtatgcaagaggtgcatatcaagacactcgaagagatcaaacttgagaaagcactgagggttcagcagagcagtgaatctagcacttccagcccttcccagcatgaagccacacctggagcccgtcgacttctacgcatcacgaagagaacctag

SEQ ID NO: 182486 - DNA, 2271 bp, Artificial Sequence
  derived and/or modified sequence
atggagatcgacaagaagcggagcgagatcccctgctactgggagaaccagccaactggctgtcaaaaactgaattgcgcctttcatcataaccgcggacggtatgtggacggacttttcctccctccgtccaagaccgtgctgccaaccgttccggagagtcccgaagaagaggtgaaggccagccagctgtcagtgcagcagaacaagctctccgtgcagagtaaccctagcccccaactgagaagcgtcatgaaggtggaatcctccgagaacgttccttcacccacccatccacctgttgttataaacgctgccgatgacgacgaggacgatgatgaccagttcagtgaggaaggggacgaaaccaagacaccgaccctccagccaacccccgaggtacacaatggcctgcgtgtgactagtgttaggaaacccgcagttaatataaagcagggtgagtgtcttaacttcgggatcaaaacactggaagagataaaatctaaaaagatgaaagagaaatctaaaaagcagggggaagggagctccggggtgtccagccttttgctgcatccggagccagtgccaggaccagagaaggaaaacgtgaggacagttgttcgaacagtcactctgagcaccaagcagggcgaagaacccctggttcggcttagcctgaccgagagactcggaaaaaggaagtttagcgctggcggagattctgatcctcctctaaagaggtcactcgcacagcgtctcggtaagaaggtggaggcccctgagactaacatagacaagacacccaaaaaagcccaagtgtcaaagagcttaaaagaaagactgggaatgagcgcggacccggataacgaagacgccaccgacaaagttaataaggtcggcgagatccacgttaagacacttgaggaaatcctactagagagggcatcccagaagcggggagagctccagacaaagttgaaaacggaaggcccctctaagactgacgattcaacgagcggggcacggtcctcatccacgatacgcatcaagactttctccgaagtgttagccgagaaaaaacaccgccagcaagaggccgaacgtcagaaatcaaaaaaagacactacttgcatcaagctaaagatcgactccgaaatcaaaaagaccgttgtgctgcctcccatagtcgcttctcgaggccagtctgaggagcccgctgggaagacgaaatccatgcaagaggtgcacatcaagacactggaagagatcaaactcgagaaggccttgcgggtacagcagagttccgaatcttcaaccagctccccctcacagcatgaggcaactcctggtgcacgccgcctccttcggatcactaagaggactggcatgaaggaagagaagaaccttcaagaagggaacgaagtcgattctcaatcatctatccgtacagaggccaaagaggcgtccggggaaaccactggcgttgacatcacgaaaattcaggtgaaacgatgcgaaacaatgagggagaaacacatgcagaagcagcaagaacgggagaaatccgttctcacaccactacgcggagatgtggccagctgcaacactcaggtggcggaaaagcctgtgcttaccgcagtcccaggcataaccagacatcttaccaagcgccttcctaccaagagttctcagaaggtggaggtggagaccagtgggatcggagatagcctcctcaatgtcaaatgtgcggcccaaaccttagagaaacgggggaaggcaaagcctaaggtcaacgtgaagccatctgttgtgaaagtcgtgtcgagcccaaagctggctcccaagagaaaggccgtggagatgcatgccgcggtgattgctgccgtgaaaccgctttcctctagtagcgtcctacaggagccaccggccaagaaggctgccgtcgctgtggtccctctggtaagcgaggacaaatccgtgacagtaccagaagcagaaaaccctcgggattcattagtcctgcccccgacccagagcagtagtgatagtagtccgccagaagtttccggcccttcatccagccaaatgagcatgaagactcgccgcctttcctcggctagtacaggcaaaccaccactgtcagttgaggatgacttcgaaaagctgatctgggagataagcgggggcaagctggaagctgaaatagacttggacccaggaaaggacgaggatgatctgttactcgaattgagtgagatgattgacagttag

SEQ ID NO: 182487 - DNA, 2433 bp, Artificial Sequence
  derived and/or modified sequence
atgcccaaccagggcgaggactgctacttcttcttctacagcacctgtaccaagggcgattcctgtccatttagacactgtgaggctgctataggcaatgaaaccgtgtgtactctatggcaggaagggaggtgtttccgccaggtgtgcaggttcaggcatatggaaatcgataagaaacggagcgagattccttgttactgggaaaatcagccaacggggtgtcagaaattaaattgtgcatttcatcacaaccgcggcagatatgtcgacggcctattcctgccaccatccaagacagtgcttccaacagtgcccgaaagtccggaagaggaagtgaaagctagtcagctgagcgtgcagcaaaacaagttaagcgtgcaaagtaacccctctccacagctgcggagtgtgatgaaggtcgaaagctccgaaaatgttcccagtccaacccatcctcccgtggtgatcaatgctgcagatgacgacgaggatgacgatgaccaattctctgaggaaggggatgagaccaagactcccactttgcagcctactcctgaggtgcacaatggcctaagagtgacctccgtacgaaagcctgcagtcaatattaaacagggagagtgtctgaattttggcattaaaaccctagaagagattaaaagtaagaagatgaaggagaagagtaagaaacaaggcgaaggcagctctggcgtatccagtttactactgcaccccgagccagtgcctgggccagaaaaggagaacgtgcgaacagtggtgagaacagtgactctctctacaaagcagggagaggaacctttggtccggctttcactgaccgagcggctaggaaagcgaaaattcagtgcaggcggggactccgatcctccactgaagcgcagtttggctcagcggctcggaaaaaaggtggaagcccccgaaacaaacattgataaaacgccaaaaaaagcccaagtctctaagagccttaaagagcgactcggaatgtctgctgacccagacaatgaggacgcaacggacaaggtgaacaaggtaggagagattcacgttaagaccctggaggaaatcctacttgaaagagcatcacagaagcggggggagctgcagacgaaactcaagaccgagggtccttcaaagactgatgatagtacgtctggggcacggtctagttcaaccatcaggatcaagacatttagcgaggtgcttgccgagaagaaacatagacagcaggaagctgaaaggcagaaatctaagaaagatactacctgtatcaagctgaagatcgatagtgagatcaagaagacagttgtgttaccccccattgtggcttcccgggggcagtcagaggagccagccggcaagactaaaagcatgcaggaagtgcatattaaaactctcgaagagataaagctggaaaaagccctccgggttcagcagagtagcgagtcctccacctcttccccatctcagcatgaggccacacccggggcccgccgtctgctgaggatcactaaacgcaccggaatgaaagaagaaaaaaatctgcaggaggggaatgaggtagactcgcaaagcagtatcagaacagaggcgaaagaagcttctggagaaaccacgggggtggacattaccaagatccaggtcaagcggtgcgagactatgagggaaaagcacatgcagaagcagcaagaacgcgagaaaagcgtcctaaccccgctcagaggggacgtggccagctgtaatacccaggtggccgaaaagccagtcctgacagctgtgcctgggattacacgacacctcaccaagagactcccaacaaagtcaagccagaaagtggaagtggaaaccagcggcatcggggattctcttctgaacgtcaagtgcgcagcacagacccttgagaagcggggtaaggcgaagcccaaagtcaatgtcaaaccaagcgtggtcaaggtggtttcatcacctaagctggcccccaaacggaaagcagtcgagatgcatgctgccgtaatagccgccgtgaaaccactgtcctcaagctctgttttgcaggagcccccagccaagaaggccgccgtggccgtggtgccactggtgtccgaagataaaagtgtcaccgtgcccgaagctgagaacccacgggatagcctggtactgcctccgactcagtcttctagtgactctagcccaccggaagtctccggcccttcctcaagccagatgagcatgaaaacgaggcgccttagcagcgcctcaactggcaagccaccactgtcagtggaagatgacttcgagaagcttatctgggaaatatctggaggcaagctggaagcagagatagatctcgaccccggaaaggatgaagatgatctgctgctggagcttagtgagatgattgactcctag

SEQ ID NO: 182488 - DNA, 2433 bp, Artificial Sequence
  derived and/or modified sequence
atgcccaaccaaggtgaggattgctatttcttcttctattctacttgcaccaagggcgatagctgtcccttcagacattgtgaggccgctatcggtaacgaaaccgtgtgtacattgtggcaggaaggcagatgctttagacaggtctgtcgatttagacacatggaaattgataagaaacggagcgaaatcccatgttactgggagaatcaacctaccggctgccagaaattgaattgcgcctttcatcacaatcgagggaggtatgtggatggcctcttccttccaccatccaagactgtgctgcccacggtgccagagtcccctgaagaggaggtaaaagctagccagctgtcagttcagcaaaacaagctgtccgtccagtccaacccttccccccagttgaggagtgtaatgaaagtggaaagctccgagaatgtgcccagccctactcacccaccagtagtcatcaatgccgcagacgacgatgaggatgatgatgaccagttcagcgaggagggagacgagaccaagaccccgacattacaaccgactccagaagttcacaatggcctgcgtgtcacaagtgtgagaaagccggctgtgaacattaagcagggagaatgcttgaatttcggtattaagactctggaggagattaagtctaagaaaatgaaagaaaaatctaaaaaacagggcgaggggtcctcgggagtctcgtcccttctactccaccccgaacccgtaccaggccctgaaaaagagaacgtgcggaccgttgtcagaaccgtgactctcagcactaaacagggagaggaacccctcgtccgtctgagcctaactgagcgcctcggtaaacggaaattttctgctggtggtgacagtgacccacccctgaagagaagcctcgcccaacgcctaggtaagaaggtggaagcccctgagaccaatatagataaaactccaaaaaaggcccaggtgagcaagtctctcaaggagcgtctggggatgagcgccgacccagacaacgaagacgccactgacaaggtcaataaggtgggcgaaatccacgtcaagaccctggaagaaatcctgctcgagagggcatcccaaaagaggggagaactccagacaaaactgaagaccgagggacctagtaaaaccgacgactctacctctggtgccaggtctagtagcactattagaattaaaactttctccgaggtgctggcagagaaaaaacataggcaacaagaggcagagcgccaaaaatccaagaaggacactacttgcattaagcttaaaattgacagcgagatcaaaaagaccgtggtattgcccccaatagttgcctcacggggtcagtctgaagagcccgctggtaaaactaagtcaatgcaggaagtccacatcaagactctggaggagatcaaactggagaaggccctgcgggttcaacaaagttccgagtcatctacaagctcaccatcccagcacgaagccacaccaggagctcgacgcctgttacgcataactaagaggaccggcatgaaggaggagaagaatctgcaagaaggaaacgaagtcgattcccagtcaagtatccggactgaggctaaggaggcaagtggcgagacaactggggtcgacattaccaagatccaagtcaagaggtgcgagactatgagagaaaaacacatgcagaaacagcaagagagagaaaaatctgtgctgacgccgctgagaggcgacgtagcctcctgcaatacgcaagtggccgagaaacccgttctgaccgctgtccccggaatcacccgacatctgaccaagagattacccacaaagtcttcacagaaggttgaggtggaaaccagtggaataggggattcactcctgaatgtgaagtgcgccgctcagactttagaaaagcggggaaaagccaagcctaaagtcaacgtgaagccttctgtcgttaaagttgtaagctctcctaagctagcaccgaaacgcaaagccgtggaaatgcatgctgcggtgatcgccgcagtcaagcctttaagctcctctagtgtactccaggaaccgccagccaaaaaggctgcagttgcggtagttccattagtatctgaagacaagtccgtgacagttccggaagcagaaaaccctcgcgactccctggtgctaccacctacccagtcgtcttccgattcaagcccgcctgaggtgtctgggccatcaagtagtcagatgagcatgaaaacaaggcgtttgtcttctgctagcactggaaaaccccctttatcggtcgaggacgatttcgagaagctaatctgggaaattagcgggggaaaactcgaggcagaaatagacttggatccaggcaaagacgaggatgacctcctgctggaactgagtgaaatgatcgattcttag

SEQ ID NO: 182489 - DNA, 2433 bp, Artificial Sequence
  derived and/or modified sequence
atgccaaatcagggggaggactgttattttttcttttattcaacctgtacaaagggtgactcctgcccattcaggcactgtgaggcggcaatcggcaatgaaacggtgtgtacactgtggcaggagggccgttgcttcaggcaagtgtgtcgatttcgccatatggagatcgataaaaagaggtccgaaatcccctgttattgggaaaaccagcccaccggttgccagaagctgaactgtgcattccatcataatagaggacgctacgttgatggactgttcctgcctccctccaaaacggttctgcccacagtccccgaaagcccagaggaagaggttaaggcctctcagctaagcgtacagcaaaacaaactcagcgtacagtctaatcccagccctcagttaagaagtgtaatgaaggtggagagctccgagaacgtccccagccctacccatccccctgtcgttattaacgccgctgatgatgatgaagatgatgacgaccagttcagcgaagagggggacgagacaaagacgcccacactacagccaacacctgaggttcacaatggactgcgggtaaccagcgtcagaaagcctgccgttaatattaagcagggcgaatgtttaaacttcggcataaagactctcgaagaaatcaaaagtaagaagatgaaggaaaagagcaagaaacagggcgaagggtcctcaggcgtctcctcgctgctcctgcaccccgaaccagtgcctggcccagaaaaagaaaatgtccggaccgtcgttaggacggtcaccctttctactaagcaaggagaggagcccttggttcgcctctctctaacggagcgtcttggtaaaaggaagttctcagctggcggagatagcgatccacccctgaagcgcagcctcgcccagcggcttggcaagaaagttgaagctcctgagacgaatatcgataaaacaccaaagaaagcccaggtctcaaagtctctcaaagagcggctcggtatgagcgcagatcccgacaatgaggacgccacagataaggtgaacaaggtcggtgaaattcatgttaagaccctggaagaaattctgcttgagcgagccagtcagaagcggggagagctgcaaaccaaactgaagacagagggaccttctaaaaccgacgattctactagcggagcacgctcatcttccactattcgcataaagaccttttcagaggtgttggccgagaagaaacatcggcagcaggaggcagaacgacagaagagcaagaaagacaccacatgtataaaactgaagattgattcagagatcaagaaaacagtcgttctgccccctatagttgcttcccgtggacaatcagaagagccagctggcaagaccaagtccatgcaggaagttcacatcaaaaccctcgaagaaatcaagctcgagaaggctctgcgggtgcagcagagttctgaaagttccaccagcagtccatcgcagcacgaggcgacaccgggagccagacgactgctccggattacaaaacggacaggcatgaaagaagagaaaaacctgcaagagggcaacgaggttgacagccagtccagtatccgtacagaggcaaaggaggcttctggcgagacaacgggagtagatattactaagattcaggtgaagagatgcgagacgatgagagaaaaacatatgcaaaagcagcaagaacgcgagaaatcagtgctgactccactccggggagacgtcgcaagttgtaatacgcaggtggctgagaaacccgtacttaccgccgttcccggtattacacggcacctcacaaagaggttgccaacaaagtcatcgcaaaaggttgaagtcgaaaccagcgggatcggagacagtctcctgaacgtcaaatgtgctgcacagacactggaaaagagggggaaggccaagccaaaggtgaacgtcaagccttccgtggttaaagtcgtgagtagtcccaagttggctcccaagcgaaaggctgtcgaaatgcatgcggctgtcatcgccgctgtgaagcccctcagcagcagcagtgttttgcaagaaccacccgcaaagaaggcagctgtcgcagtcgtgccactagtgagcgaggacaagtcagtgaccgtccctgaggcggaaaatcccagggactctctggtgttacctcctacccagagctcttctgacagttccccacccgaagtttcagggccatccagctctcaaatgtctatgaaaacccggagactcagcagtgcgtctacgggcaagcctcctctgtctgtcgaggacgatttcgaaaagctgatttgggaaatcagtggtggcaagctcgaggctgagatcgatctggatccagggaaggacgaagacgacctcctgctggagctctcagagatgattgattcctag

SEQ ID NO: 182490 - DNA, 2433 bp, Artificial Sequence
  derived and/or modified sequence
atgcctaatcagggtgaagattgctattttttcttttattcaacttgtactaaaggggattcctgccccttcaggcactgcgaggcggctatcggaaatgaaactgtgtgtacactgtggcaggagggaagatgcttcagacaggtctgtagattccggcacatggagattgacaagaagcgctctgagatcccatgttattgggagaaccagccgaccggctgccagaaactgaactgtgcattccaccataatcggggaaggtatgttgatggcctctttctgcccccatcgaaaacggtgttaccaaccgtgcctgagtctcccgaagaggaggtgaaggctagtcagctgagcgtgcagcaaaacaaattaagtgttcaatcaaatcctagccctcagctccgcagtgtgatgaaggttgagagtagtgaaaacgttccatccccaacgcaccctcctgttgtcattaacgccgcagatgacgacgaagatgatgatgaccagttcagcgaggagggggacgagactaagactccgacgttgcagcccaccccagaggtccataatggtctgcgagtgactagtgtgagaaagcccgcagtgaatatcaaacagggagagtgtctcaattttgggatcaaaacgctggaagagattaagtcgaaaaagatgaaagagaaatctaagaagcagggtgagggttcctcaggggtctcttccctcctgcttcaccctgagccagtccctgggcctgaaaaagaaaacgttcggaccgtcgttcgaaccgtgaccctcagtaccaagcagggagaggagccactcgttaggttgagccttacagaacgccttgggaagagaaagttcagcgcgggaggagactcagatccaccacttaagagatcgttggcccagcgactgggaaaaaaagtggaggcccctgaaacaaatatcgacaaaactcctaagaaagcccaggtctccaaatctctaaaggagaggcttggcatgtctgctgaccccgacaacgaggatgctaccgataaagtcaataaggtgggggagattcatgtgaaaactcttgaggagatcctgctggaacgcgcatcccagaaaagaggcgaactacagactaaacttaagacagaagggccatcaaagaccgatgatagtacctccggtgctaggtcaagtagtaccatacgaataaaaaccttcagtgaggttctcgccgaaaagaagcatcgacagcaggaggccgagaggcagaaaagcaagaaggataccacttgcattaaactgaaaatcgattccgagattaagaagacagtcgtgttgccacccattgtcgctagccggggtcagtccgaagagccagcaggtaagaccaaatctatgcaagaggtccacatcaaaaccctggaggaaataaagttagagaaagccctgcgggtgcaacaaagcagtgagagctccacgtcctccccatctcaacacgaggcaacacctggagcccgtcgccttttgcgcattacgaagcggaccggcatgaaagaagaaaagaatctacaagaaggcaatgaggtcgattcccagtcaagtatcagaactgaggcgaaagaggccagcggcgaaacaactggggtggatatcactaaaattcaagttaagaggtgtgagacaatgcgcgagaagcatatgcagaagcagcaggagcgagagaagagcgttcttacaccactgcggggtgatgttgcatcttgcaacacccaggtggctgagaagcctgtgctcactgcagttcccggaattacgcggcacctgactaagcggctccccacaaaatctagccagaaggtggaagtggaaacctccggcattggagattctctgctgaacgttaagtgtgccgctcagaccctcgaaaaacgcggaaaagccaaacccaaggtaaacgtgaaaccctccgtagtcaaggtggtttcaagccctaagctggcccctaaaagaaaggcggtggaaatgcacgcggcagttatagccgcagtgaaacctctatcctctagttccgtcttacaagagccgcctgccaaaaaggcagccgtggctgtcgtcccactggtttccgaggataaatctgttacggtgccagaggcagagaacccgagagattctctggtgttgcctccaacccagtccagttcagactcatctccacccgaggtcagcgggccatctagctcacagatgagtatgaaaaccagaagactgtcttctgcttctaccggtaagccgccactatctgtggaggatgacttcgaaaagctcatttgggaaatttctgggggaaaacttgaggcagagattgacctggatcctgggaaggatgaggatgatttacttctggaactgtcagaaatgatagattcttag

SEQ ID NO: 182491 - DNA, 2433 bp, Artificial Sequence
  derived and/or modified sequence
atgcccaatcagggcgaggactgttactttttcttctacagtacctgtaccaaaggcgattcttgccccttccggcactgcgaggccgcaatcgggaacgagaccgtgtgcacactctggcaggaagggagatgttttcgccaggtctgtcgattccggcatatggaaattgacaaaaagaggagcgagatcccgtgttactgggaaaatcagcccacagggtgtcagaagttgaattgcgccttccaccataacaggggaaggtacgtggatggcttgtttctgcctcctagcaagaccgtcctcccgacggtcccggagtctcctgaagaggaggtgaaggcaagtcagctgtcagtccagcagaacaagctgtctgtacagagtaacccaagtcctcagcttcgaagcgtcatgaaagtcgagtcaagtgagaacgtcccctctcctacccaccctccagtggtcatcaacgctgctgatgatgacgaggatgacgatgaccagttcagcgaagagggagatgagaccaaaaccccgactctgcaacctaccccagaagttcataacgggttgcgagtgaccagtgtgaggaagcccgcagtcaacattaaacagggcgagtgtttgaattttggcattaaaacactcgaagagattaaaagtaaaaagatgaaagaaaagtcgaagaaacagggggaggggtcctctggtgttagttccctgctgctgcatcctgagccggtccctggccctgaaaaggagaacgtgcgaactgtggtacgcactgtgactctgtctacgaagcagggagaagagcctctggtccgcctgagtctaaccgagcggctgggcaagcgcaaattctccgctggtggagatagcgatcccccactcaagaggtcacttgcacagcgcctgggcaaaaaggtcgaggcccctgagaccaatatcgataaaacccccaaaaaggctcaggtatcgaagagtttgaaggagcgcctggggatgtccgcagaccccgacaacgaggatgcaacagataaggtgaacaaagtaggggagatccacgtgaaaacattggaagagatactgctggagcgggctagtcagaagcggggtgagctacaaacgaagctgaagaccgagggtccatccaagacggatgacagtacgtccggagccaggtcctcaagcaccataagaataaagactttcagtgaagttctcgctgaaaagaaacataggcagcaggaggccgaacgacaaaaatcaaaaaaggacactacctgcattaagctcaagatcgactcggaaatcaagaagaccgtcgttctgccccctattgtagcctccagaggacagtccgaggagccagccggtaagacgaaatccatgcaggaagtgcacatcaaaactctggaagaaatcaaactagagaaggccttacgtgtgcagcagagctccgaaagcagcacttccagtccaagtcagcatgaagcaacacccggtgcgaggcgcctgctcagaattaccaagagaactgggatgaaggaggagaaaaacttgcaggagggcaatgaagtggactcccagtcctccattaggacagaagctaaggaagcgtccggtgaaactactggggtggatataaccaaaattcaggtcaaacgctgcgagactatgcgggagaagcacatgcagaaacagcaggaacgggagaagagcgtactaactccacttcggggagatgttgcctcctgcaacactcaggttgccgagaagcctgttctgacagcggtgccgggaattactcgtcacctaaccaagaggttgccaacaaaaagctcgcaaaaggttgaagttgagacctctggtattggcgatagccttctcaacgtgaagtgcgctgcacagacacttgagaaacggggaaaagccaagcccaaagttaatgtcaagccatcggtggtgaaagtggttagcagtcccaagttggctcccaagcgcaaagccgttgaaatgcatgccgctgtaattgcggcagtgaaacctttgagttcttcctctgtattacaggagcctcctgccaaaaaagctgccgtcgcagttgttccactcgtatcagaagataaaagcgttaccgtcccagaagctgagaatcctcgggattccctcgttttgcctcctactcagtcttcttctgacagcagtccacctgaggtgagcggcccaagttccagtcagatgtctatgaaaacacgcaggctgagcagcgcctccaccgggaagccccctctgagcgtggaagacgattttgaaaagctgatctgggaaataagcggcggaaaacttgaggccgagatcgacctcgacccaggcaaagacgaagacgacctcctgctcgaactatcggaaatgattgactcatag

SEQ ID NO: 182492 - DNA, 1548 bp, Artificial Sequence
  derived and/or modified sequence
atgccgaaccagggtgaagattgctatttcttcttttatagtacctgtaccaagggggactcctgcccattccggcactgtgaggcagcaattggaaacgagacggtctgtaccctttggcaggaaggaaggtgctttcggcaagtttgccgattccgccacatggaaatcgacaagaagcggtccgaaatcccgtgttactgggagaaccaacccactggatgtcagaagctgaattgtgcgtttcaccacaaccggggaagatacgtcgacggcttgttcctaccgccatctaagaccgtcttacccactgttcccgagtcaccagaagaagaggtcaaagcctcccagctgagcgtccaacagaacaagttatctgtacagtcaaatcctagcccacaactgagatccgtgatgaaagtcgagtccagcgaaaacgttccctcacctacgcacccaccagtggtgattaacgccgcagatgatgacgaggacgatgacgaccaattcagtgaggaaggagacgagaccaagacccccacactccagcctacacctgaagtgcacaatggcttgagagtgactagtgtccggaaacctgctgtgaacattaaacagggggagtgcctgaactttggaatcaaaacactggaggagataaaatccaagaagatgaaggaaaagtcaaagaagcagggtgaagggtcttcaggcgtatccagtctcctcctgcaccctgagcctgtgcctgggccagagaaagagaacgtgcgtaccgtagttcgcaccgtaacactttcaactaaacaaggagaagagccccttgtccgcttgtcgctgaccgaacggctgggtaaacggaaattcagcgccggaggagacagcgacccccctctgaaaaggagcctcgcccaacggctcggaaagaaggtggaggcgccagagacaaatattgataaaaccccaaaaaaggcacaggttagtaagagcctaaaagagagacttggaatgtcagctgaccctgacaacgaagacgcgaccgacaaagtgaacaaggtgggagagatccacgttaaaacactggaggagattttattagaacgcgcaagccagaagcgaggggaactgcaaacgaaactgaagaccgaaggcccatccaagacagacgatagtaccagtggcgctcgctcctccagcactatccggatcaagacatttagcgaggtcctggccgagaaaaagcaccgacagcaggaggccgaaaggcagaagagcaagaaagacacaacttgtatcaaacttaagattgacagcgaaataaagaagaccgttgtcctgccccctattgtagcatcccgcggtcaaagcgaagagccagcgggtaaaaccaaatccatgcaggaagtgcacattaagaccctagaggagatcaagctggagaaagcgttacgggtccagcagagcagtgagtcctccaccagctcaccaagccagcacgaagctactcccggagcacgcagacttctgcgcatcaccaagcgcacgtag

SEQ ID NO: 182493 - DNA, 2271 bp, Artificial Sequence
  derived and/or modified sequence
atggaaatcgataaaaagcggtcagaaatcccctgttactgggagaatcagccaactggttgccagaagcttaactgtgcattccaccacaatcggggtcgctacgtggatgggctgttcctgccccctagcaagaccgtgctccccacagtgccagaaagccccgaagaggaggtaaaagcatcccagttgtcagtgcagcagaataaattaagcgtgcagtcaaacccatcgccccagcttaggagcgtgatgaaggtggaatctagtgagaacgtgccttcgcctacacacccgccagtggtgatcaacgccgcagatgacgacgaggatgatgacgatcagttcagcgaagaaggcgacgaaaccaagacacccaccctgcaaccaacacctgaagttcacaatggccttcgggtcacgagcgtaaggaaacccgcagtcaacattaaacagggtgagtgtctgaatttcggcatcaaaaccctggaagaaatcaaatctaagaaaatgaaagaaaaaagcaagaaacagggagaggggtccagcggggtgtcatcattgctgctgcaccccgagcccgtacccggtccagaaaaggaaaatgttagaacagtagtgaggacagtgaccctgtccactaaacagggtgaggagcccttggttcgtttatccctcacggagagacttgggaaacgaaaatttagcgccggaggggatagtgatcccccattgaaaagatctctcgcacagcgactgggaaagaaggtagaggcccctgaaaccaatatcgacaaaacccccaaaaaggcccaggtgagtaagtctttaaaggagcggctgggtatgtccgctgaccccgacaatgaggatgcgactgacaaggtgaataaggtgggagagattcacgtgaaaactctcgaagaaatactcttagaacgggcatcccagaaaagaggagagttgcagacgaagctgaagacagagggacccagcaagaccgacgattcaacgtccggcgcaaggagctcttccactatccggataaaaacattctctgaggtgttggccgagaaaaagcataggcagcaggaagcagaaaggcaaaagtccaaaaaggatactacatgtatcaagctgaagattgacagtgagataaaaaaaacggtggtgcttccgcctattgtggcttcgaggggccaatccgaagaacctgccggtaagacaaaatctatgcaagaggtgcacatcaagacacttgaggagataaagctggagaaagctcttcgagtacaacaatcttccgagtctagcacatcaagccctagccagcacgaggcaacaccaggagctcgtcggctgctgcggatcacaaagcgaaccgggatgaaagaagagaaaaatttgcaggaaggcaacgaagtggatagtcaatcttcgatccggacagaagctaaagaggcatccggagaaaccacgggagtcgacatcactaagattcaggtcaagcgttgtgaaacaatgagagagaagcacatgcaaaagcagcaggagcgggagaagtcagtcctgactccacttcgcggagacgtcgcatcctgcaacacacaggtagccgaaaaacctgtgctcactgccgttccaggaatcactagacaccttactaagcggctccctacaaaatcctctcagaaggtggaggtggaaacctccggcattggggatagcttgctgaacgtgaaatgtgctgcccagactctggagaaacgcggtaaggctaagcccaaggttaacgttaaaccttccgtggttaaggtggtcagctctccgaagttggcccctaagcggaaggcagtcgagatgcacgctgcagttatagctgccgtcaagccccttagctcttcttctgtcctccaggagcccccagcaaagaaggccgcagtggctgtggtaccactcgtgtccgaggataaatcagtcacggttcccgaagctgagaaccctcgagatagcttagtcctgccacccacccagtcatcctccgatagcagtccgcctgaagtgtccggcccatcttcctcccagatgtcgatgaagacaaggcggctttcctcagcgagcacaggaaagccaccactgagcgtagaggatgacttcgaaaaactgatctgggaaattagtggaggaaaactggaggccgagatcgatctggacccgggaaaggatgaggacgatctcctcttggaattatcagaaatgatcgatagttag

SEQ ID NO: 182494 - DNA, 2433 bp, Artificial Sequence
  derived and/or modified sequence
atgcctaatcagggagaagactgttacttcttcttctattccacgtgcactaagggcgatagctgccccttccgacactgtgaggccgctattggtaacgaaaccgtatgtaccctgtggcaggaaggcagatgttttcggcaggtttgtcgcttcagacacatggagattgataaaaagcggagcgagatcccatgttactgggagaaccagccgaccgggtgtcaaaaactgaattgcgcattccaccataatcgcggtcggtacgtagacggcttgttcctccctcctagcaaaaccgtgctgcccaccgtacccgagtccccagaggaggaagttaaagcatcgcaattatctgtccagcagaacaaactgagcgtgcagtcaaatcctagtccgcagctgcgaagcgtgatgaaagtcgagagcagcgaaaacgttccaagcccaactcatccgccagtggtcatcaatgctgccgatgacgatgaggacgacgatgatcaatttagcgaggagggtgatgaaactaagactcctactctgcagcctacacccgaggtgcataatggtctgagagtgaccagcgtgaggaagccagcggtgaacatcaaacagggtgaatgtctgaacttcgggataaaaaccctggaagagataaagagcaagaaaatgaaggaaaagtcaaagaagcagggagaagggagtagcggtgttagcagcttattacttcatccagaacccgtccccggtcctgagaaagagaacgtcaggaccgtggttaggactgtaacactgagtaccaaacagggggaggagcccctggtgaggctatcactcaccgagcggctaggaaagcgaaaattctcagcagggggtgatagtgatcccccactcaagcggtctctggctcagagactgggaaaaaaggtggaagctccggagacaaacatagacaagactcctaagaaagctcaggtcagcaagtcactcaaagagcggttgggcatgtccgccgatcccgacaacgaggacgctaccgacaaagtgaacaaggtgggggagatccacgtaaagactcttgaggagattctgcttgaacgggcaagtcagaaaaggggtgagttgcagaccaaattaaagacagaaggcccatctaaaaccgatgactctacctccggtgccaggagcagctcgacgattaggatcaagactttcagcgaggtgctagccgaaaagaaacatcggcagcaggaggcggaacggcagaaatccaagaaggacaccacgtgcatcaaactcaagatagattctgaaatcaaaaagaccgtggtgcttccgcctatcgtggcctctagaggacagtccgaagaacctgcgggtaaaactaaaagtatgcaggaagtccacatcaaaacactggaagagattaagttagagaaggccctgagagtgcagcagtcttctgagagctctacgtcctctcccagtcagcatgaggccactccaggcgctcgacggctgcttaggatcactaaaagaaccgggatgaaagaggagaaaaatctgcaggagggcaacgaagtggattcgcagtcctccatcaggacagaggccaaagaggctagcggagagacaacaggtgtcgatattaccaaaattcaggtgaaacggtgcgaaacgatgcgggaaaagcatatgcagaaacagcaggagagagaaaaatccgtattgacgcccttacggggagacgtagcctcatgcaatactcaggtcgccgagaagcctgtactgaccgcggtcccaggcattaccagacacctgactaaaagacttcccaccaaaagttcccagaaagtggaggtggaaacatcaggaataggcgactctttgctaaacgtaaaatgtgctgcacagaccttggagaagcgaggtaaagctaagccaaaggtaaatgtgaaaccttccgtggtgaaggtggtgtcttcaccaaaattggctcctaagcgtaaggccgtcgaaatgcacgcagccgtgattgcagcagtgaagcctttaagctcttcctcagtgcttcaggagcccccagccaagaaggcagctgttgctgttgtgcccctcgtgagtgaggacaaatctgttactgtcccggaagcggagaacccaagggacagcctcgtcctgccgccaactcagtcctcttccgatagctcacctcccgaagtatcaggcccttcctcctctcagatgagtatgaagaccaggagactttcctcagcgagtactggcaagcctccactctctgtagaagatgacttcgagaaactaatatgggagatctcaggtggaaagcttgaagccgaaatcgatcttgaccctggcaaggatgaggatgacctgctgttagagctgtccgaaatgatagattcttag

SEQ ID NO: 182495 - DNA, 5015 bp, Artificial Sequence
  derived and/or modified sequence
ggacggcagcggccaagcaagaagaaagacgtggcagcaagcgggagtcggggatagtgtcatcggttcggtaaagtttctgttctctgggtcccggtactttggagcttgtctcaaactccacatacagaaagccaccgaccttattccggtatcctacacccattccccactctcattacactcccacccctggccctcagcgtcggagtcaagagcaacagggacacttccgttctccttgtaggactggtgaaaccgtaatgaagaacacccctaaactcccataatcgatttggggatattccctgcccaaaaaattcctggaaaattgactagtattaagtctatggaagatggagttttttttcatgatcctttaactctcaagttcatctttaaatgaactctttttttttgttttttttttgttttgttttgttttgtttttgaggagataactaaccctagctgtctccagtctgacaaaggttatttgaatggacttaatctcccagtagttgggagatgttttaaaaacacatgctgtgtttgaattgtggctgagaggttttcttggcaatgtgaggaggaaatttttttctgcctcattattattaattcatggattgagtgttggttcgacctacaggcgtaatagattggaactcagtgaagacacagatgttcctgttcagagcaaccagctaatgattacagtttaaagacaatttctgtgatcaagttgtcatttggaagattaaacccatttcacgaggacttggagcctggtccttgctttgaggaagcagtggcttgtttcaagaagccacttctgatctaagaatctacccagcatgcctaatcaaggagaagactgctatttttttttctattccacatgtaccaaaggtgacagctgcccattccgtcactgtgaagctgcaataggaaatgaaactgtttgcacattatggcaagaagggcgctgttttcgacaggtgtgcaggtttcggcacatggagattgataaaaaacgcagtgaaattccttgttattgggaaaatcagccaacaggatgtcaaaaattaaactgcgctttccatcacaatagaggacgatatgttgatggccttttcctacctccgagcaaaactgtgttgcccactgtgcctgagtcaccagaagaggaagtgaaggctagccaactttcagttcagcagaacaaattgtctgtccagtccaatccttcccctcagctgcggagcgttatgaaagtagaaagttccgaaaatgttcctagccccacgcatccaccagttgtaattaatgctgcagatgatgatgaagatgatgatgatcagttttctgaggaaggtgatgaaaccaaaacacctaccctgcaaccaactcctgaagttcacaatggattacgagtgacttctgtccggaaacctgcagtcaatataaagcaaggtgaatgtttgaattttggaataaaaactcttgaggaaattaagtcaaagaaaatgaaggaaaaatctaagaagcaaggtgagggttcttcaggagtttccagtcttttactccaccctgagcccgttccaggtcctgaaaaagaaaatgtcaggactgtggtgaggacagtaactctctccaccaaacaaggagaagaacccttggttagattgagtcttactgagagactggggaaacgaaaattttcagcaggcggtgacagtgatcctccattaaagcgtagcctggcacagaggctagggaagaaagttgaagctccagaaactaacattgacaaaacaccaaagaaagctcaagtttccaagtctcttaaggagcgattaggcatgtcagctgatccagataatgaggatgcaacagataaagttaataaagttggtgagatccatgtgaagacattagaagaaattcttcttgaaagagccagtcagaaacgtggagaattgcaaactaaactcaagacagaaggaccttcaaaaactgatgattctacttcaggagcaagaagctcctccactatccgtatcaaaaccttctctgaggtcctggctgaaaaaaaacatcggcagcaggaagcagagagacaaaaaagcaaaaaggatacaacttgcatcaagctaaagattgatagtgaaattaaaaaaacagtagttttgccacccattgttgccagcagaggacaatcagaggagcctgcaggtaaaacaaagtctatgcaggaggtgcacatcaagacgctggaagaaattaaactggagaaggcactgagggtgcagcagagctctgagagcagcaccagctccccgtctcaacacgaggccactccaggggcaaggcggctgctgcgaatcaccaaaagaacagggatgaaagaagagaagaaccttcaggaaggaaatgaagttgattctcagagcagtattagaacagaagctaaagaggcttcaggtgagaccacaggagttgacatcactaaaattcaagtcaagagatgtgagaccatgagagagaagcacatgcagaaacagcaggagagggaaaaatcagtcttgacacctcttcggggagatgtagcctcttgcaatacccaagtggcagagaaaccagtgctcactgctgtgccaggaatcacacggcacctgaccaagcggcttcccacaaagtcatcccagaaggtggaggtagaaacctcagggattggagactcattattgaatgtgaaatgtgcagcacagaccttggaaaaaaggggtaaagctaaacccaaagtgaacgtgaagccatctgtggttaaagttgtgtcatcccccaaattggccccaaaacgtaaggcagtggagatgcacgctgctgtcattgccgctgtgaagccactcagctccagcagtgtcctacaggaacccccagccaaaaaggcagctgtggctgttgtcccgcttgtctctgaggacaaatcagtcactgtgcctgaagcagaaaatcctagagacagtcttgtgctgcctccaacccagtcctcttcagattcctcacccccggaggtgtctggcccttcctcatcccaaatgagcatgaaaactcgccgactcagctctgcctcaacaggaaagcccccactctctgtggaggatgattttgagaaactaatatgggagatttcaggaggcaaattggaagctgagattgacctggatcctgggaaagatgaagatgaccttctgcttgagctatcagaaatgattgatagctgaaggtggtagtgaggacactttaaaaaaaaaatcgccaaaaaactggacttagtttcatctattgtaacatttacctgagatgatcatttctttagtctagaatttgccccaaatcagaagtatacctctgaattatctgtatgtgtcctggattccttggggtcagatttttaaagttactttataaccattttgtccatttgatgccattgtttatcatcttttgagaaaaaagttctgtcatacccttctctccacaaaaaagagactgagagggagatcaagtgaaagggtgcaagcgaacttagtgactccttgaggtgtttgtcagttttggcttttttcttctttgttgtattctttatgtattgtcttgatgtacttaatattacctgagtttgaaatggatgaagacagctgctaccattaaggaccaaattttatgctaccactaaacaaaaatacccactcagtctgtgttaaattgtatgtctttttaaaggtatttaaagattcaactaagctttaaagagggctgagcagctcaggaagcctgtaatgtgggcataactctttggacctgatcttgatgcttctgctgctctgttagcctctgaagagcaatatctaatttattattactgtaattttttaaaaggctttaaagtgcctcaggggtcccctgaaactaattttctatttctgggattccctggattcattatatgagatggtgacatgattagaggaattcttttttagtatgaaaattgtcctttttcttcttcagtacttgcctccttgctggcattgaattaacacagggacaaaatttggttaattttttatttctaactctcccaacaaacccctgttgcccagtatttgtttggtggcctttaaccacctgagggaaaaaatgagcttattcaagctgccaatatttatctatgggctgtagcagtacactgaattgtactgtgccagggatattgagatgctctgggggtgtattgtatacctgccagttttcttcatttctgaattgagttttcttttcttgatgttggtttccttcatatcacctcaaggtttagatttgtgaaggaataagcatgatggaaataatagtcttgaaaggagatatgttgtatataatcaggaggaagaggaaggaaggacttacccattttgatattttgctgtaggtggccagttttgtttctcatagggaaatctgacccacctgtcatgttggctcctaaggaactgctgttgtaagcggctcatcaagagttgaacttcacgtagccttgttgggaatatggaaaaggaagaaagccacaggactgcccattcagtcttgggaagattgggatgattctgcacaagcaaaaatgactgaagtttatgtatagacacacctctaccaatccatcttcagctgactgaatgttgtatgatagcccttctccaaagcagaggtagaatgttcaggtttcaccatggattttctacttatttcgtttttggaatcagcttacagattccaggtcccttttgtatatattctttattcttttgcttttttaaaaaataattttgtttcatatttaaagcacttgtattagtcaatgtttcgtgttccgcattatttgaaccatttgcccttacagaaagagaaatacttgtttgtgttttaaataaaactgatgtaggaaagtc

SEQ ID NO: 182496 - DNA, 4365 bp, Artificial Sequence
  derived and/or modified sequence
ctgcaacctccacctcccgggttcaagaagtttccctaccttaggctcctgagtagctgggactacaggattacagtttaaagacaatttctgtgatcaagttgtcatttggaagattaaacccatttcacgaggacttggagcctggtccttgctttgaggaagcagtggcttgtttcaagaagccacttctgatctaagaatctacccagcatgcctaatcaaggagaagactgctatttttttttctattccacatgtaccaaaggtgacagctgcccattccgtcactgtgaagctgcaataggaaatgaaactgtttgcacattatggcaagaagggcgctgttttcgacaggtgtgcaggtttcggcacatggagattgataaaaaacgcagtgaaattccttgttattgggaaaatcagccaacaggatgtcaaaaattaaactgcgctttccatcacaatagaggacgatatgttgatggccttttcctacctccgagcaaaactgtgttgcccactgtgcctgagtcaccagaagaggaagtgaaggctagccaactttcagttcagcagaacaaattgtctgtccagtccaatccttcccctcagctgcggagcgttatgaaagtagaaagttccgaaaatgttcctagccccacgcatccaccagttgtaattaatgctgcagatgatgatgaagatgatgatgatcagttttctgaggaaggtgatgaaaccaaaacacctaccctgcaaccaactcctgaagttcacaatggattacgagtgacttctgtccggaaacctgcagtcaatataaagcaaggtgaatgtttgaattttggaataaaaactcttgaggaaattaagtcaaagaaaatgaaggaaaaatctaagaagcaaggtgagggttcttcaggagtttccagtcttttactccaccctgagcccgttccaggtcctgaaaaagaaaatgtcaggactgtggtgaggacagtaactctctccaccaaacaaggagaagaacccttggttagattgagtcttactgagagactggggaaacgaaaattttcagcaggcggtgacagtgatcctccattaaagcgtagcctggcacagaggctagggaagaaagttgaagctccagaaactaacattgacaaaacaccaaagaaagctcaagtttccaagtctcttaaggagcgattaggcatgtcagctgatccagataatgaggatgcaacagataaagttaataaagttggtgagatccatgtgaagacattagaagaaattcttcttgaaagagccagtcagaaacgtggagaattgcaaactaaactcaagacagaaggaccttcaaaaactgatgattctacttcaggagcaagaagctcctccactatccgtatcaaaaccttctctgaggtcctggctgaaaaaaaacatcggcagcaggaagcagagagacaaaaaagcaaaaaggatacaacttgcatcaagctaaagattgatagtgaaattaaaaaaacagtagttttgccacccattgttgccagcagaggacaatcagaggagcctgcaggtaaaacaaagtctatgcaggaggtgcacatcaagacgctggaagaaattaaactggagaaggcactgagggtgcagcagagctctgagagcagcaccagctccccgtctcaacacgaggccactccaggggcaaggcggctgctgcgaatcaccaaaagaacagggatgaaagaagagaagaaccttcaggaaggaaatgaagttgattctcagagcagtattagaacagaagctaaagaggcttcaggtgagaccacaggagttgacatcactaaaattcaagtcaagagatgtgagaccatgagagagaagcacatgcagaaacagcaggagagggaaaaatcagtcttgacacctcttcggggagatgtagcctcttgcaatacccaagtggcagagaaaccagtgctcactgctgtgccaggaatcacacggcacctgaccaagcggcttcccacaaagtcatcccagaaggtggaggtagaaacctcagggattggagactcattattgaatgtgaaatgtgcagcacagaccttggaaaaaaggggtaaagctaaacccaaagtgaacgtgaagccatctgtggttaaagttgtgtcatcccccaaattggccccaaaacgtaaggcagtggagatgcacgctgctgtcattgccgctgtgaagccactcagctccagcagtgtcctacaggaacccccagccaaaaaggcagctgtggctgttgtcccgcttgtctctgaggacaaatcagtcactgtgcctgaagcagaaaatcctagagacagtcttgtgctgcctccaacccagtcctcttcagattcctcacccccggaggtgtctggcccttcctcatcccaaatgagcatgaaaactcgccgactcagctctgcctcaacaggaaagcccccactctctgtggaggatgattttgagaaactaatatgggagatttcaggaggcaaattggaagctgagattgacctggatcctgggaaagatgaagatgaccttctgcttgagctatcagaaatgattgatagctgaaggtggtagtgaggacactttaaaaaaaaaatcgccaaaaaactggacttagtttcatctattgtaacatttacctgagatgatcatttctttagtctagaatttgccccaaatcagaagtatacctctgaattatctgtatgtgtcctggattccttggggtcagatttttaaagttactttataaccattttgtccatttgatgccattgtttatcatcttttgagaaaaaagttctgtcatacccttctctccacaaaaaagagactgagagggagatcaagtgaaagggtgcaagcgaacttagtgactccttgaggtgtttgtcagttttggcttttttcttctttgttgtattctttatgtattgtcttgatgtacttaatattacctgagtttgaaatggatgaagacagctgctaccattaaggaccaaattttatgctaccactaaacaaaaatacccactcagtctgtgttaaattgtatgtctttttaaaggtatttaaagattcaactaagctttaaagagggctgagcagctcaggaagcctgtaatgtgggcataactctttggacctgatcttgatgcttctgctgctctgttagcctctgaagagcaatatctaatttattattactgtaattttttaaaaggctttaaagtgcctcaggggtcccctgaaactaattttctatttctgggattccctggattcattatatgagatggtgacatgattagaggaattcttttttagtatgaaaattgtcctttttcttcttcagtacttgcctccttgctggcattgaattaacacagggacaaaatttggttaattttttatttctaactctcccaacaaacccctgttgcccagtatttgtttggtggcctttaaccacctgagggaaaaaatgagcttattcaagctgccaatatttatctatgggctgtagcagtacactgaattgtactgtgccagggatattgagatgctctgggggtgtattgtatacctgccagttttcttcatttctgaattgagttttcttttcttgatgttggtttccttcatatcacctcaaggtttagatttgtgaaggaataagcatgatggaaataatagtcttgaaaggagatatgttgtatataatcaggaggaagaggaaggaaggacttacccattttgatattttgctgtaggtggccagttttgtttctcatagggaaatctgacccacctgtcatgttggctcctaaggaactgctgttgtaagcggctcatcaagagttgaacttcacgtagccttgttgggaatatggaaaaggaagaaagccacaggactgcccattcagtcttgggaagattgggatgattctgcacaagcaaaaatgactgaagtttatgtatagacacacctctaccaatccatcttcagctgactgaatgttgtatgatagcccttctccaaagcagaggtagaatgttcaggtttcaccatggattttctacttatttcgtttttggaatcagcttacagattccaggtcccttttgtatatattctttattcttttgcttttttaaaaaataattttgtttcatatttaaagcacttgtattagtcaatgtttcgtgttccgcattatttgaaccatttgcccttacagaaagagaaatacttgtttgtgttttaaataaaactgatgtagg

SEQ ID NO: 182497 - DNA, 3004 bp, Artificial Sequence
  derived and/or modified sequence
ggacgacggacggcagcggccaagcaagaagaaagacgtggcagcaagcgggagtcggggatagtgtcatcggttcgggtcccggtactttggagcttgtctcaaactccacatacagaaagccaccgaccttattccggtatcctacacccattccccactctcattacactcccacccctggccctcagcgtcggagtcaagagcaacagggacacttccgttctccttgtaggactggtgaaaccgtaatgaagaacacccctaaactcccataatcgatttggggatattccctgcccaaaaaattcctggaaaattgactagtattaagtgcgtaatagattggaactcagtgaagacacagatgttcctgttcagagcaaccagctaatgattacagtttaaagacaatttctgtgatcaagttgtcatttggaagattaaacccatttcacgaggacttggagcctggtccttgctttgaggaagcagtggcttgtttcaagaagccacttctgatctaagaatctacccagcatgcctaatcaaggagaagactgctatttttttttctattccacatgtaccaaaggtgacagctgcccattccgtcactgtgaagctgcaataggaaatgaaactgtttgcacattatggcaagaagggcgctgttttcgacaggtgtgcaggtttcggcacatggagattgataaaaaacgcagtgaaattccttgttattgggaaaatcagccaacaggatgtcaaaaattaaactgcgctttccatcacaatagaggacgatatgttgatggccttttcctacctccgagcaaaactgtgttgcccactgtgcctgagtcaccagaagaggaagtgaaggctagccaactttcagttcagcagaacaaattgtctgtccagtccaatccttcccctcagctgcggagcgttatgaaagtagaaagttccgaaaatgttcctagccccacgcatccaccagttgtaattaatgctgcagatgatgatgaagatgatgatgatcagttttctgaggaaggtgatgaaaccaaaacacctaccctgcaaccaactcctgaagttcacaatggattacgagtgacttctgtccggaaacctgcagtcaatataaagcaaggtgaatgtttgaattttggaataaaaactcttgaggaaattaagtcaaagaaaatgaaggaaaaatctaagaagcaaggtgagggttcttcaggagtttccagtcttttactccaccctgagcccgttccaggtcctgaaaaagaaaatgtcaggactgtggtgaggacagtaactctctccaccaaacaaggagaagaacccttggttagattgagtcttactgagagactggggaaacgaaaattttcagcaggcggtgacagtgatcctccattaaagcgtagcctggcacagaggctagggaagaaagttgaagctccagaaactaacattgacaaaacaccaaagaaagctcaagtttccaagtctcttaaggagcgattaggcatgtcagctgatccagataatgaggatgcaacagataaagttaataaagttggtgagatccatgtgaagacattagaagaaattcttcttgaaagagccagtcagaaacgtggagaattgcaaactaaactcaagacagaaggaccttcaaaaactgatgattctacttcaggagcaagaagctcctccactatccgtatcaaaaccttctctgaggtcctggctgaaaaaaaacatcggcagcaggaagcagagagacaaaaaagcaaaaaggatacaacttgcatcaagctaaagattgatagtgaaattaaaaaaacagtagttttgccacccattgttgccagcagaggacaatcagaggagcctgcaggtaaaacaaagtctatgcaggaggtgcacatcaagacgctggaagaaattaaactggagaaggcactgagggtgcagcagagctctgagagcagcaccagctccccgtctcaacacgaggccactccaggggcaaggcggctgctgcgaatcaccaaaagaacagggatgaaagaagagaagaaccttcaggaaggaaatgaagttgattctcagagcagtattagaacagaagctaaagaggcttcaggtgagaccacaggagttgacatcactaaaattcaagtcaagagatgtgagaccatgagagagaagcacatgcagaaacagcaggagagggaaaaatcagtcttgacacctcttcggggagatgtagcctcttgcaatacccaagtggcagagaaaccagtgctcactgctgtgccaggaatcacacggcacctgaccaagcggcttcccacaaagtcatcccagaaggtggaggtagaaacctcagggattggagactcattattgaatgtgaaatgtgcagcacagaccttggaaaaaaggggtaaagctaaacccaaagtgaacgtgaagccatctgtggttaaagttgtgtcatcccccaaattggccccaaaacgtaaggcagtggagatgcacgctgctgtcattgccgctgtgaagccactcagctccagcagtgtcctacaggaacccccagccaaaaaggcagctgtggctgttgtcccgcttgtctctgaggacaaatcagtcactgtgcctgaagcagaaaatcctagagacagtcttgtgctgcctccaacccagtcctcttcagattcctcacccccggaggtgtctggcccttcctcatcccaaatgagcatgaaaactcgccgactcagctctgcctcaacaggaaagcccccactctctgtggaggatgattttgagaaactaatatgggagatttcaggaggcaaattggaagctgagattgacctggatcctgggaaagatgaagatgaccttctgcttgagctatcagaaatgattgatagctgaaggtggtagtgaggacactttaaaaaaaaaa

SEQ ID NO: 182498 - DNA, 3451 bp, Artificial Sequence
  derived and/or modified sequence
ttttctgctagtgctgctgctgctgggaggacgacggacggcagcggccaagcaagaagaaagacgtggcagcaagcgggagtcggggatagtgtcatcggttcggtaaagtttctgttctctgggtcccggtactttggagcttgtctcaaactccacatacagaaagccaccgaccttattccggtatcctacacccattccccactctcattacactcccacccctggccctcagcgtcggagtcaagagcaacagggacacttccgttctccttgtaggactggtgaaaccgtaatgaagaacacccctaaactcccataatcggtgcggattcctatggggaaggcctatattgttgacatcttccaggccttggttctggaccttgagaaagaggctgtggaactagagatagcgatgctttttaggatttggggatattccctgcccaaaaaattcctggaaaattgactagtattaagtctatggaagatggagttttttttcatgatcctttaactctcaagttcatctttaaatgaactctttttttttgttttttttttgttttgttttgttttgtttttgaggagataactaaccctagctgtctccagtctgacaaaggttatttgaatggacttaatctcccagtagttgggagatgttttaaaaacacatgctgtgtttgaattgtggctgagaggttttcttggcaatgtgaggaggaaatttttttctgcctcattattattaattcatggattgagtgttggttcgacctacaggcgtaatagattggaactcagtgaagacacagatgttcctgttcagagcaaccagctaatgattacagtttaaagacaatttctgtgatcaagttgtcatttggaagattaaacccatttcacgaggacttggagcctggtccttgctttgaggaagcagtggcttgtttcaagaagccacttctgatctaagaatctacccagcatgcctaatcaaggagaagactgctatttttttttctattccacatgtaccaaaggtgacagctgcccattccgtcactgtgaagctgcaataggaaatgaaactgtttgcacattatggcaagaagggcgctgttttcgacaggtgtgcaggtttcggcacatggagattgataaaaaacgcagtgaaattccttgttattgggaaaatcagccaacaggatgtcaaaaattaaactgcgctttccatcacaatagaggacgatatgttgatggccttttcctacctccgagcaaaactgtgttgcccactgtgcctgagtcaccagaagaggaagtgaaggctagccaactttcagttcagcagaacaaattgtctgtccagtccaatccttcccctcagctgcggagcgttatgaaagtagaaagttccgaaaatgttcctagccccacgcatccaccagttgtaattaatgctgcagatgatgatgaagatgatgatgatcagttttctgaggaaggtgatgaaaccaaaacacctaccctgcaaccaactcctgaagttcacaatggattacgagtgacttctgtccggaaacctgcagtcaatataaagcaaggtgaatgtttgaattttggaataaaaactcttgaggaaattaagtcaaagaaaatgaaggaaaaatctaagaagcaaggtgagggttcttcaggagtttccagtcttttactccaccctgagcccgttccaggtcctgaaaaagaaaatgtcaggactgtggtgaggacagtaactctctccaccaaacaaggagaagaacccttggttagattgagtcttactgagagactggggaaacgaaaattttcagcaggcggtgacagtgatcctccattaaagcgtagcctggcacagaggctagggaagaaagttgaagctccagaaactaacattgacaaaacaccaaagaaagctcaagtttccaagtctcttaaggagcgattaggcatgtcagctgatccagataatgaggatgcaacagataaagttaataaagttggtgagatccatgtgaagacattagaagaaattcttcttgaaagagccagtcagaaacgtggagaattgcaaactaaactcaagacagaaggaccttcaaaaactgatgattctacttcaggagcaagaagctcctccactatccgtatcaaaaccttctctgaggtcctggctgaaaaaaaacatcggcagcaggaagcagagagacaaaaaagcaaaaaggatacaacttgcatcaagctaaagattgatagtgaaattaaaaaaacagtagttttgccacccattgttgccagcagaggacaatcagaggagcctgcaggtaaaacaaagtctatgcaggaggtgcacatcaagacgctggaagaaattaaactggagaaggcactgagggtgcagcagagctctgagagcagcaccagctccccgtctcaacacgaggccactccaggggcaaggcggctgctgcgaatcaccaaaagaacagggatgaaagaagagaagaaccttcaggaaggaaatgaagttgattctcagagcagtattagaacagaagctaaagaggcttcaggtgagaccacaggagttgacatcactaaaattcaagtcaagagatgtgagaccatgagagagaagcacatgcagaaacagcaggagagggaaaaatcagtcttgacacctcttcggggagatgtagcctcttgcaatacccaagtggcagagaaaccagtgctcactgctgtgccaggaatcacacggcacctgaccaagcggcttcccacaaagtcatcccagaaggtggaggtagaaacctcagggattggagactcattattgaatgtgaaatgtgcagcacagaccttggaaaaaaggggtaaagctaaacccaaagtgaacgtgaagccatctgtggttaaagttgtgtcatcccccaaattggccccaaaacgtaaggcagtggagatgcacgctgctgtcattgccgctgtgaagccactcagctccagcagtgtcctacaggaacccccagccaaaaaggcagctgtggctgttgtcccgcttgtctctgaggacaaatcagtcactgtgcctgaagcagaaaatcctagagacagtcttgtgctgcctccaacccagtcctcttcagattcctcacccccggaggtgtctggcccttcctcatcccaaatgagcatgaaaactcgccgactcagctctgcctcaacaggaaagcccccactctctgtggaggatgattttgagaaactaatatgggagatttcaggaggcaaattggaagctgagattgacctggatcctgggaaagatgaagatgaccttctgcttgagctatcagaaatgattgatagctgaaggtggtagtgaggacacttt

SEQ ID NO: 182499 - DNA, 2763 bp, Artificial Sequence
  derived and/or modified sequence
agtgctgctgctgctgggaggacgacggacggcagcggccaagcaagaagaaagacgtggcagcaagcgggagtcggggatagtgtcatcggttcggtaaagtttctgttctctggtgacagctgcccattccgtcactgtgaagctgcaataggaaatgaaactgtttgcacattatggcaagaagggcgctgttttcgacaggtgtgcaggtttcggcacatggagattgataaaaaacgcagtgaaattccttgttattgggaaaatcagccaacaggatgtcaaaaattaaactgcgctttccatcacaatagaggacgatatgttgatggccttttcctacctccgagcaaaactgtgttgcccactgtgcctgagtcaccagaagaggaagtgaaggctagccaactttcagttcagcagaacaaattgtctgtccagtccaatccttcccctcagctgcggagcgttatgaaagtagaaagttccgaaaatgttcctagccccacgcatccaccagttgtaattaatgctgcagatgatgatgaagatgatgatgatcagttttctgaggaaggtgatgaaaccaaaacacctaccctgcaaccaactcctgaagttcacaatggattacgagtgacttctgtccggaaacctgcagtcaatataaagcaaggtgaatgtttgaattttggaataaaaactcttgaggaaattaagtcaaagaaaatgaaggaaaaatctaagaagcaaggtgagggttcttcaggagtttccagtcttttactccaccctgagcccgttccaggtcctgaaaaagaaaatgtcaggactgtggtgaggacagtaactctctccaccaaacaaggagaagaacccttggttagattgagtcttactgagagactggggaaacgaaaattttcagcaggcggtgacagtgatcctccattaaagcgtagcctggcacagaggctagggaagaaagttgaagctccagaaactaacattgacaaaacaccaaagaaagctcaagtttccaagtctcttaaggagcgattaggcatgtcagctgatccagataatgaggatgcaacagataaagttaataaagttggtgagatccatgtgaagacattagaagaaattcttcttgaaagagccagtcagaaacgtggagaattgcaaactaaactcaagacagaaggaccttcaaaaactgatgattctacttcaggagcaagaagctcctccactatccgtatcaaaaccttctctgaggtcctggctgaaaaaaaacatcggcagcaggaagcagagagacaaaaaagcaaaaaggatacaacttgcatcaagctaaagattgatagtgaaattaaaaaaacagtagttttgccacccattgttgccagcagaggacaatcagaggagcctgcaggtaaaacaaagtctatgcaggaggtgcacatcaagacgctggaagaaattaaactggagaaggcactgagggtgcagcagagctctgagagcagcaccagctccccgtctcaacacgaggccactccaggggcaaggcggctgctgcgaatcaccaaaagaacagggatgaaagaagagaagaaccttcaggaaggaaatgaagttgattctcagagcagtattagaacagaagctaaagaggcttcaggtgagaccacaggagttgacatcactaaaattcaagtcaagagatgtgagaccatgagagagaagcacatgcagaaacagcaggagagggaaaaatcagtcttgacacctcttcggggagatgtagcctcttgcaatacccaagtggcagagaaaccagtgctcactgctgtgccaggaatcacacggcacctgaccaagcggcttcccacaaagtcatcccagaaggtggaggtagaaacctcagggattggagactcattattgaatgtgaaatgtgcagcacagaccttggaaaaaaggggtaaagctaaacccaaagtgaacgtgaagccatctgtggttaaagttgtgtcatcccccaaattggccccaaaacgtaaggcagtggagatgcacgctgctgtcattgccgctgtgaagccactcagctccagcagtgtcctacaggaacccccagccaaaaaggcagctgtggctgttgtcccgcttgtctctgaggacaaatcagtcactgtgcctgaagcagaaaatcctagagacagtcttgtgctgcctccaacccagtcctcttcagattcctcacccccggaggtgtctggcccttcctcatcccaaatgagcatgaaaactcgccgactcagctctgcctcaacaggaaagcccccactctctgtggaggatgattttgagaaactaatatgggagatttcaggaggcaaattggaagctgagattgacctggatcctgggaaagatgaagatgaccttctgcttgagctatcagaaatgattgatagctgaaggtggtagtgaggacactttaaaaaaaaaatcgccaaaaaactggacttagtttcatctattgtaacatttacctgagatgatcatttctttagtctagaatttgccccaaatcagaagtatacctctgaattatctgtatgtgtcctggattccttggggtcagatttttaaagttactttataaccattttgtccatttgatgccattgtttatcatcttttgagaaaaaagttctgtcatacccttctctccacaaaaaagagact

SEQ ID NO: 182500 - DNA, 7979 bp, Artificial Sequence
  derived and/or modified sequence
atgttagtggctgccaggaaaacttgtcatcattttagtcattcggtcaaggcccgtcagatactgcaagagttccaaaatgatcaccaacttccatggaagaatttgaagcaggacgaaactggccattggatttctactttttatatgttaaaatggctcttggagcattgctactcagttcaccatagtcttggtagagccagtggagttgtgctcacctcccttcagtggactctaatgacttatgtttgtgatattcttaagccatttgaggaggctacccagaaagtgagcgtgaagaccgcaggattgaatcaggtgctacccctaatccatcatctactcctttccctgcagaaactcagagaagattttcaagtcagaggtattactcaggccctcaatctggtggatagtttatctctgaaacttgaaacagataccctactaagtgccatgcttaaatccaagccctgtatcttggctactttgttagatccttgctttaaaaacagtttggaagacttttttcctcaaggtgctgatttagaaacttataagcagttccttgcagaagaggtctgtaattatatggaatcttcaccagagatctgccaaattccaacttcagaagcttcttgtccctcagttacagtgggagctgattcatttacctcatctctaaaagaaggcacctccagttcaggttctgttgatagctcagctgtagacaatgttgcccttggaagcaaaagcttcatgttcccttctgctgtagcagttgtggatgagtacttcaaagagaagtattcagagttctcaggaggtgatgaccctttaatttactggcagaggaagataagcatatggccggctttgacccaggttgccatccagtatctaagttgccccatgtgtagttggcaatctgaatgtatctttactaaaaatagccactttcatccaaaacagatcatgagcctggactttgacaatatagaacaactgatgtttctgaaaatgaacttgaaaaatgttaactacgattattctacgttggttctgagctgggatcctgagcagaatgaagttgttcaaagcagtgaaaaagaaatactgccttaatttctttttctccatttaaaatgggcaactttttgctgtgttactgtatcttaatagctgtagttgttaaatataatcattatctttataaacacatctggggaaacctgaaatcacacaagggctgaaaattcctcagaggcaatataattttgataaaatgaagattaaagatttcatagctataactgtggcgctagcacttgaaaattttgcttataccaatgagagagaagatatttttaattaaaaaaaatatagtgcagcattgaaaggccttaggctttcttcctggtagattgaactagtaattggttttaagtaaaacttcccccaccatgggaaattttattgctctgaaatcaacgaaatgagaaaaaagtacactggctggcattcctcctgcccctgtttttctgtttccttaaaaaccctgatgcttaattacaacttggcaaaaagaaaacccgtgaaattgttttatatttggaaatttctaattgcctcctcatactggtcagctttataatttcaaattgttgagtgtgatagtgttaccctttagaattggatcttatataaaagggaaatattagaaaacaattaggaaaatatacttttagtctttgaaatgcctgttttaacctttataaaatattataaaaatagattgtgtaggtactttcaaataatttatgggtaaaaacagactaaaatgtttgcaagaattggaaaaggttgaatgggaattgtaatgagagccctttgaacatgcttggaaaaacccagtagacatttcccaaagattgtttctgtaattttaggtaatctttttaaaaacatacttaatgacccattatactgtattaactgtgcggttgttttggccactgaattcttaatgaaaactaagcagtcggtatttttatgtgttaggaatcattggtgaaatgagtgaattgatctcattttaagatccctttctactctgaaagtatgtttctgagattgagtaggaggccagaaaatgatgacttttagtaaaagtctattaaaagtttcagactgaataactaatgtgagatcccaatttttcctttttttcattttagatttggggatattccctgcccaaaaaattcctggaaaattgactagtattaagtgtgagtaaaaggtgtccacttttttttaagttttgattttagttttgtcttggatagtatttggcaagatttagcctagaaattatgtagtatttattacataagaatcaaaattgctttgttactgggctggtttcaaagtttagaactcatttctatgtatcaaaatcgggttttttttggttttgattttttttttttttaaattcttaaatggtaaatatgccattgtgaaatgaaatctcaactccaaaagtttacccttttactaactggagtaaatgtatacttacaaagtctttagctgtagccattagtagtaaagaatttggacctaggctgcgtaagcaagcctttccagggccactatttaatggcaaaccagtgatactggtgttgatacaaaataagaaataaattttcccttagataaagctttctgtgttttgacagtgccagtttagaatggctataatgctgctctgccttctacagcttgctgcaccactctgtagttactctattaccatacgtttctatcttttttggttaaacactccctgatgacgatgatggatatatatacatacatccatattatacataatgatatatgtgtaaggatttaccttcgtctttattttgtgggctgggcaaaatttagtgtaacaataacttcatgatactttggtataagagtaagttctttatttttataatgaacccaaatctaaagtcttttatagtgcattttaaaaggggaaacttatccaaatgttatatttctatacatttttgtgtatatgtgtgtgtgtataagccagttagtatatatctgtatgtatattatatacataaaacactatatttttacatacaagtatgcttttattatacagataataaagatgggggaaggtttctgtttttttcttaataggtgaagaaatcttgaagaccagaaattggatcttactgaaaaactgatgtttttttgttttttttttaaattatattgttcagctatggaagatggagttttttttcatgatcctttaactctcaagttcatctttaaatgaactctttttttttgttttttttttgttttgttttgttttgtttttgaggagataactaaccctagctgtctccagtctgacaaaggttatttgaatggacttaatctcccagtagttgggagatgttttaaaaacacatgctgtgtttgaattgtggctgagaggttttcttggcaatgtgaggaggaaatttttttctgcctcattattattaattcatggattgagtgttggttcgacctacaggcgtaatagattggaactcagtgaagacacagatgttcctgttcagagcaaccagctaatgattacagtttaaagacaatttctgtgatcaagttgtcatttggaagattaaacccatttcacgaggacttggagcctggtccttgctttgaggaagcagtggcttgtttcaagaagccacttctgatctaagaatctacccagcatgcctaatcaaggagaagactgctatttttttttctattccacatgtaccaaaggtgacagctgcccattccgtcactgtgaagctgcaataggaaatgaaactgtttgcacattatggcaagaagggcgctgttttcgacaggtgtgcaggtttcggcacatggagattgataaaaaacgcagtgaaattccttgttattgggaaaatcagccaacaggatgtcaaaaattaaactgcgctttccatcacaatagaggacgatatgttgatggccttttcctacctccgagcaaaactgtgttgcccactgtgcctgagtcaccagaagaggaagtgaaggctagccaactttcagttcagcagaacaaattgtctgtccagtccaatccttcccctcagctgcggagcgttatgaaagtagaaagttccgaaaatgttcctagccccacgcatccaccagttgtaattaatgctgcagatgatgatgaagatgatgatgatcagttttctgaggaaggtgatgaaaccaaaacacctaccctgcaaccaactcctgaagttcacaatggattacgagtgacttctgtccggaaacctgcagtcaatataaagcaaggtgaatgtttgaattttggaataaaaactcttgaggaaattaagtcaaagaaaatgaaggaaaaatctaagaagcaaggtgagggttcttcaggagtttccagtcttttactccaccctgagcccgttccaggtcctgaaaaagaaaatgtcaggactgtggtgaggacagtaactctctccaccaaacaaggagaagaacccttggttagattgagtcttactgagagactggggaaacgaaaattttcagcaggcggtgacagtgatcctccattaaagcgtagcctggcacagaggctagggaagaaagttgaagctccagaaactaacattgacaaaacaccaaagaaagctcaagtttccaagtctcttaaggagcgattaggcatgtcagctgatccagataatgaggatgcaacagataaagttaataaagttggtgagatccatgtgaagacattagaagaaattcttcttgaaagagccagtcagaaacgtggagaattgcaaactaaactcaagacagaaggaccttcaaaaactgatgattctacttcaggagcaagaagctcctccactatccgtatcaaaaccttctctgaggtcctggctgaaaaaaaacatcggcagcaggaagcagagagacaaaaaagcaaaaaggatacaacttgcatcaagctaaagattgatagtgaaattaaaaaaacagtagttttgccacccattgttgccagcagaggacaatcagaggagcctgcaggtaaaacaaagtctatgcaggaggtgcacatcaagacgctggaagaaattaaactggagaaggcactgagggtgcagcagagctctgagagcagcaccagctccccgtctcaacacgaggccactccaggggcaaggcggctgctgcgaatcaccaaaagaacagggatgaaagaagagaagaaccttcaggaaggaaatgaagttgattctcagagcagtattagaacagaagctaaagaggcttcaggtgagaccacaggagttgacatcactaaaattcaagtcaagagatgtgagaccatgagagagaagcacatgcagaaacagcaggagagggaaaaatcagtcttgacacctcttcggggagatgtagcctcttgcaatacccaagtggcagagaaaccagtgctcactgctgtgccaggaatcacacggcacctgaccaagcggcttcccacaaagtcatcccagaaggtggaggtagaaacctcagggattggagactcattattgaatgtgaaatgtgcagcacagaccttggaaaaaaggggtaaagctaaacccaaagtgaacgtgaagccatctgtggttaaagttgtgtcatcccccaaattggccccaaaacgtaaggcagtggagatgcacgctgctgtcattgccgctgtgaagccactcagctccagcagtgtcctacaggaacccccagccaaaaaggcagctgtggctgttgtcccgcttgtctctgaggacaaatcagtcactgtgcctgaagcagaaaatcctagagacagtcttgtgctgcctccaacccagtcctcttcagattcctcacccccggaggtgtctggcccttcctcatcccaaatgagcatgaaaactcgccgactcagctctgcctcaacaggaaagcccccactctctgtggaggatgattttgagaaactaatatgggagatttcaggaggcaaattggaagctgagattgacctggatcctgggaaagatgaagatgaccttctgcttgagctatcagaaatgattgatagctgaaggtggtagtgaggacactttaaaaaaaaaatcgccaaaaaactggacttagtttcatctattgtaacatttacctgagatgatcatttctttagtctagaatttgccccaaatcagaagtatacctctgaattatctgtatgtgtcctggattccttggggtcagatttttaaagttactttataaccattttgtccatttgatgccattgtttatcatcttttgagaaaaaagttctgtcatacccttctctccacaaaaaagagactgagagggagatcaagtgaaagggtgcaagcgaacttagtgactccttgaggtgtttgtcagttttggcttttttcttctttgttgtattctttatgtattgtcttgatgtacttaatattacctgagtttgaaatggatgaagacagctgctaccattaaggaccaaattttatgctaccactaaacaaaaatacccactcagtctgtgttaaattgtatgtctttttaaaggtatttaaagattcaactaagctttaaagagggctgagcagctcaggaagcctgtaatgtgggcataactctttggacctgatcttgatgcttctgctgctctgttagcctctgaagagcaatatctaatttattattactgtaattttttaaaaggctttaaagtgcctcaggggtcccctgaaactaattttctatttctgggattccctggattcattatatgagatggtgacatgattagaggaattcttttttagtatgaaaattgtcctttttcttcttcagtacttgcctccttgctggcattgaattaacacagggacaaaatttggttaattttttatttctaactctcccaacaaacccctgttgcccagtatttgtttggtggcctttaaccacctgagggaaaaaatgagcttattcaagctgccaatatttatctatgggctgtagcagtacactgaattgtactgtgccagggatattgagatgctctgggggtgtattgtatacctgccagttttcttcatttctgaattgagttttcttttcttgatgttggtttccttcatatcacctcaaggtttagatttgtgaaggaataagcatgatggaaataatagtcttgaaaggagatatgttgtatataatcaggaggaagaggaaggaaggacttacccattttgatattttgctgtaggtggccagttttgtttctcatagggaaatctgacccacctgtcatgttggctcctaaggaactgctgttgtaagcggctcatcaagagttgaacttcacgtagccttgttgggaatatggaaaaggaagaaagccacaggactgcccattcagtcttgggaagattgggatgattctgcacaagcaaaaatgactgaagtttatgtatagacacacctctaccaatccatcttcagctgactgaatgttgtatgatagcccttctccaaagcagaggtagaatgttcaggtttcaccatggattttctacttatttcgtttttggaatcagcttacagattccaggtcccttttgtatatattctttattcttttgcttttttaaaaaataattttgtttcatatttaaagcacttgtattagtcaatgtttcgtgttccgcattatttgaaccatttgcccttacagaaagagaaatacttgtttgtgttttaaataaaactgatgtagg

SEQ ID NO: 182501 - protein, 621 aa, Artificial Sequence
  derived and/or modified sequence
MEFPGGNDNYLTITGPSHPFLSGAETFHTPSLGDEEFEIPPISLDSDPSLAVSDVVGHFDDLADPSSSQDGSFSAQYGVQTLDMPVGMTHGLMEQGGGLLSGGLTMDLDHSIGTQYSANPPVTIDVPMTDMTSGLMGHSQLTTIDQSELSSQLGLSLGGGTILPPAQSPEDRLSTTPSPTSSLHEDGVEDFRRQLPSQKTVVVEAGKKQKAPKKRKKKDPNEPQKPVSAYALFFRDTQAAIKGQNPNATFGEVSKIVASMWDSLGEEQKQVYKRKTEAAKKEYLKALAAYKDNQECQATVETVELDPAPPSQTPSPPPMATVDPASPAPASIEPPALSPSIVVNSTLSSYVANQASSGAGGQPNITKLIITKQMLPSSITMSQGGMVTVIPATVVTSRGLQLGQTSTATIQPSQQAQIVTRSVLQAAAAAAAAASMQLPPPRLQPPPLQQMPQPPTQQQVTILQQPPPLQAMQQPPPQKVRINLQQQPPPLQIKSVPLPTLKMQTTLVPPTVESSPERPMNNSPEAHTVEAPSPETICEMITDVVPEVESPSQMDVELVSGSPVALSPQPRCVRSGCENPPIVSKDWDNEYCSNECVVKHCRDVFLAWVASRNSNTVVFVK

SEQ ID NO: 182502 - DNA, 1866 bp, Artificial Sequence
  derived and/or modified sequence
atggagttccccggcggcaacgacaactacctgaccatcaccggccccagccaccccttcctgagcggcgccgagaccttccacacccccagcctgggcgacgaggagttcgagatcccccccatcagcctggacagcgaccccagcctggccgtgagcgacgtggtgggccacttcgacgacctggccgaccccagcagcagccaggacggcagcttcagcgcccagtacggcgtgcagaccctggacatgcccgtgggcatgacccacggcctgatggagcagggcggcggcctgctgagcggcggcctgaccatggacctggaccacagcatcggcacccagtacagcgccaacccccccgtgaccatcgacgtgcccatgaccgacatgaccagcggcctgatgggccacagccagctgaccaccatcgaccagagcgagctgagcagccagctgggcctgagcctgggcggcggcaccatcctgccccccgcccagagccccgaggacagactgagcaccacccccagccccaccagcagcctgcacgaggacggcgtggaggacttcagaagacagctgcccagccagaagaccgtggtggtggaggccggcaagaagcagaaggcccccaagaagagaaagaagaaggaccccaacgagccccagaagcccgtgagcgcctacgccctgttcttcagagacacccaggccgccatcaagggccagaaccccaacgccaccttcggcgaggtgagcaagatcgtggccagcatgtgggacagcctgggcgaggagcagaagcaggtgtacaagagaaagaccgaggccgccaagaaggagtacctgaaggccctggccgcctacaaggacaaccaggagtgccaggccaccgtggagaccgtggagctggaccccgccccccccagccagacccccagccccccccccatggccaccgtggaccccgccagccccgcccccgccagcatcgagccccccgccctgagccccagcatcgtggtgaacagcaccctgagcagctacgtggccaaccaggccagcagcggcgccggcggccagcccaacatcaccaagctgatcatcaccaagcagatgctgcccagcagcatcaccatgagccagggcggcatggtgaccgtgatccccgccaccgtggtgaccagcagaggcctgcagctgggccagaccagcaccgccaccatccagcccagccagcaggcccagatcgtgaccagaagcgtgctgcaggccgccgccgccgccgccgccgccgccagcatgcagctgcccccccccagactgcagcccccccccctgcagcagatgccccagccccccacccagcagcaggtgaccatcctgcagcagcccccccccctgcaggccatgcagcagccccccccccagaaggtgagaatcaacctgcagcagcagcccccccccctgcagatcaagagcgtgcccctgcccaccctgaagatgcagaccaccctggtgccccccaccgtggagagcagccccgagagacccatgaacaacagccccgaggcccacaccgtggaggcccccagccccgagaccatctgcgagatgatcaccgacgtggtgcccgaggtggagagccccagccagatggacgtggagctggtgagcggcagccccgtggccctgagcccccagcccagatgcgtgagaagcggctgcgagaacccccccatcgtgagcaaggactgggacaacgagtactgcagcaacgagtgcgtggtgaagcactgcagagacgtgttcctggcctgggtggccagcagaaacagcaacaccgtggtgttcgtgaagtag

SEQ ID NO: 182503 - DNA, 1866 bp, Artificial Sequence
  derived and/or modified sequence
atggaattccccggaggcaacgataactatctgaccattacgggcccaagccatccttttctcagtggtgctgagacctttcatacaccttctctgggagacgaagaattcgagatccctccaatttccttggattccgatccatccctcgccgtatccgacgttgtcggccacttcgacgatcttgctgacccttcctcttctcaagatggaagtttttccgcccagtacggagtgcaaaccctggacatgcctgtgggcatgactcatggactcatggagcagggcggcggccttctgtctggaggattaacgatggacttggatcattctattggtactcaatattcagccaatccaccagtgactattgacgttcctatgactgatatgacatctggcctgatgggacattcacagctgacaacaatagaccaaagtgaactgtcttcccagctggggcttagcttgggcgggggaaccatcctgccaccagcccagagccctgaagacaggcttagtacaaccccgagccctacatctagcctgcacgaggacggtgtggaagattttagacgtcagctgccatcacagaagactgtggtcgtcgaggccgggaagaaacagaaggctcccaagaagaggaagaagaaagaccccaacgagccacaaaaaccagtctctgcttatgcgctgtttttccgggatacacaggccgccatcaaaggccagaatcctaacgccacctttggggaggtaagcaagatcgtggcctcgatgtgggactccctgggggaggagcagaagcaggtgtacaagcgcaagaccgaagcagccaagaaggagtacttgaaagcacttgcagcgtacaaagacaaccaagaatgtcaggccacggtcgagacagtggaactagaccctgctccccctagccagacgccaagcccaccacctatggctactgtagatcccgcctctccagccccggccagcatcgagccgccggccctgagtccatcaatcgtcgtaaactctacgctgagctcctatgtggctaaccaagctagcagcggcgctggtggccagccaaatattactaagctgattatcactaagcaaatgttgccttcctcaatcacaatgtcccagggcggaatggtgaccgttattcccgctacggtggttacttcaagagggttgcagctgggccagacaagcaccgctacaattcagccgtcacaacaggctcagatagtcacccgcagcgtccttcaggcagccgctgccgccgcggccgccgctagcatgcaacttcctcctccacggttgcaacctccccctctgcagcagatgcctcagccccccacgcaacagcaggtcactatactccaacagcctccccccttacaggctatgcagcaaccgcctcctcaaaaagtgaggatcaatctgcagcagcaacccccgcccctgcagataaagtcggtgcccctgccaacccttaaaatgcagaccacattagtgcctcccaccgtcgagtcctctccagagcggcccatgaataacagtcctgaagcgcataccgttgaagctccatcgccagaaaccatctgtgagatgatcactgatgtagtgccggaggttgagtcacccagccagatggatgtggagctggtgtccgggagtccagtggctttgtccccgcagccccggtgtgtgagatcaggatgtgaaaatccccctatcgtttccaaggactgggacaacgagtattgcagtaacgagtgcgtagtgaaacattgtcgcgatgtctttcttgcctgggtagctagtagaaattccaatacagtagtgttcgttaaatag

SEQ ID NO: 182504 - DNA, 1866 bp, Artificial Sequence
  derived and/or modified sequence
atggagttccccggagggaatgataattatctgaccataacgggcccatcccaccccttcctgagcggagcggaaacgttccacaccccatccctgggcgacgaggagtttgagatacctcctatttccttagattcagaccccagcctcgccgtatccgacgtggttggtcattttgatgacctcgctgacccatccagctcccaggacggatccttcagcgctcagtatggtgtccagacactggacatgcccgttggaatgacacacgggctgatggagcagggaggggggctactgtccggcggcttgactatggatcttgatcacagtattggcacacagtactcagctaacccacccgtcactattgatgttccaatgaccgatatgaccagtgggttaatgggtcacagtcagctgaccaccatcgaccaatccgagctgagtagtcagttggggctgtctctggggggtggtaccattttgccgcctgcacaatccccagaggacaggctgagtacaacccccagccccacctccagcctccacgaggacggagttgaggattttcggagacaactccctagtcagaaaacagtcgttgtggaagcgggcaagaaacaaaaggcacccaagaagcgcaaaaaaaaagaccccaacgaaccacagaagcccgttagcgcctacgcgttattcttccgtgacacacaagccgcaatcaagggccagaacccaaacgccaccttcggggaagtatccaaaattgtcgcgtccatgtgggacagcttaggcgaggaacagaaacaagtgtacaagcgcaagacagaggctgcaaagaaggagtacttaaaggctttggcggcttacaaagacaaccaggaatgtcaagcgacggtggagaccgtagagttggaccctgcgcctccttcacagacaccttcacctcctcccatggctacagtggacccagccagcccagcgccagcatcaatagaacctcccgccctttctccttcaatcgtagtcaattcaacactctctagttacgtggctaaccaggccagtagtggagcagggggtcagcctaatattaccaaactgataatcacaaaacagatgttgccaagcagtattaccatgtcacagggtggaatggtgactgtcattcctgcgactgtcgtgacctcgcgggggctgcaattggggcaaaccagtactgccactattcagccctctcaacaagcccaaatagtgaccagatcagttttacaagccgccgcggccgccgctgccgccgcaagtatgcagcttcctccacctagactgcagccaccaccactgcagcagatgccacagccccctacccagcaacaggtgactatattacaacagccccccccactccaggccatgcagcaaccaccacctcagaaggtacgcatcaatctccagcagcagccgcctccactgcaaatcaagtccgtgcctctgccaactctcaagatgcagacgaccctggtcccgccaaccgtggagtcctcccctgagaggcccatgaataattccccggaagcacacacagtggaagcgccgtctcccgaaacaatctgcgaaatgatcactgatgtcgttcccgaagtggagagccctagccagatggacgtggaactggtgagtgggtccccggtagctctctcaccacagcctcgctgtgtgagaagtggctgtgaaaatccccccattgtgtccaaggactgggataatgaatattgctctaatgagtgcgtggtgaaacactgtagagacgtcttcctggcctgggttgcctctaggaattcgaatacagtggtttttgtgaagtag

SEQ ID NO: 182505 - DNA, 1866 bp, Artificial Sequence
  derived and/or modified sequence
atggagttccctggaggaaatgacaactacctgaccatcaccggccccagccaccccttcctgagcggggctgagaccttccacacccccagcctgggagatgaggagtttgagatcccccccatcagcctggacagcgaccccagcctggccgtgtctgatgtggtgggccactttgatgacctggccgaccccagcagcagccaggacggcagcttcagcgcccagtatggagtgcagaccctggacatgcctgtgggcatgacccacggcctgatggagcagggcggcggcctgctgagcggcggcctgaccatggacctggaccacagcatcggcacccagtacagcgccaacccccctgtgaccattgatgtgcccatgacagacatgaccagcggcctgatgggccacagccagctgaccaccatcgaccagagcgagctgagcagccagctgggcctgagcctgggcggcggcaccatcctgcccccagcccagagccctgaggaccggctgagcaccacccccagccccaccagcagcctgcatgaagatggagtggaggacttccggcggcagctgcccagccagaagacagtggtggtggaggccggcaagaagcagaaggcccccaagaagaggaagaagaaggaccccaatgagccccagaagcctgtgtctgcctatgccctcttcttccgggacacccaggccgccatcaagggccagaaccccaatgccaccttcggggaggtgtccaagatcgtggcctccatgtgggacagcctgggggaggagcagaagcaggtgtacaagaggaagacagaggccgccaagaaggagtacctgaaggccctggccgcctacaaggacaaccaggagtgccaggccaccgtggagaccgtggagctggaccctgccccacccagccagacccccagccccccacccatggccaccgtggaccctgccagccctgccccagccagcattgagcccccagccctgagccccagcatcgtggtgaacagcaccctgagcagctatgtggccaaccaggccagcagtggagctgggggccagcccaacatcaccaagctgatcatcaccaagcagatgctgcccagcagcatcaccatgagccagggcggcatggtgaccgtcatcccagccaccgtggtgaccagccggggcctgcagctgggccagaccagcacagccaccatccagcccagccagcaggcccagatcgtgaccaggtctgtgctgcaggccgctgctgctgctgctgctgctgcctccatgcagctgcccccaccccggctgcagcccccacccctgcagcagatgccccagccccccacccagcagcaggtgaccatcctgcagcagcccccacccctgcaggccatgcagcagcccccaccccagaaggtgcgcatcaacctgcagcagcagcccccacccctgcagatcaagtctgtgcccctgcccaccctgaagatgcagaccaccctggtgcccccaacagtggagagcagccctgagcggcccatgaacaacagccctgaggcccacacagtggaggcccccagccctgagaccatctgtgagatgatcacagatgtggtgcctgaggtggagagccccagccagatggatgtggagctggtgtctggcagccctgtggccctgagcccccagccccgctgtgtgcgcagcggctgtgagaacccccccatcgtgtccaaggactgggacaatgagtactgcagcaatgaatgtgtggtgaagcactgcagagatgtgttcctggcctgggtggccagcaggaacagcaacacagtggtgtttgtgaagtag

SEQ ID NO: 182506 - DNA, 1866 bp, Artificial Sequence
  derived and/or modified sequence
atggagttccccggcggcaacgacaactacctgaccatcaccggcccctcccatccattcctgagcggagccgaaactttccatacaccatccctgggggacgaggagtttgagatcccacctataagtctggatagcgaccctagtttagctgtaagcgacgtggtgggacacttcgatgacctggccgatccatccagctcccaggatgggagcttttccgctcagtatggtgtgcagacactggacatgccagttggcatgacgcacggtctgatggagcaaggcggcggtttgctctcagggggcctcaccatggacctggatcacagtattggtacccagtacagcgcgaacccgccagtaacaattgacgtgcctatgacagatatgacgagcggcctgatgggccattcgcagctgacaactatcgatcaatctgaactttccagtcaactggggctatcactgggcggaggcaccatactcccacctgcacaatctcccgaggatcgactctccacgacaccttctcctacctcaagccttcatgaggatggcgtggaggattttcggcgacagctgccctcacagaagaccgtcgtagtggaggcaggaaagaaacagaaggcccccaaaaaaagaaaaaaaaaagacccaaacgagccccaaaagcctgtgagcgcctacgctctgttcttcagggatacccaggctgcgataaaagggcagaacccaaacgcaacctttggcgaagtctcaaagatcgtcgcctctatgtgggactccttaggagaagagcagaagcaggtctacaagcgtaagacggaagcagcaaagaaggagtatctcaaagcccttgctgcttacaaggacaatcaggagtgccaggcaaccgtcgagacggtggagctggatccagctcccccctcacaaactccctcacctccgcccatggccaccgtggatcctgcctcgcctgcccccgcttctatcgagcctccagccctctccccaagcattgttgtgaactctacgttgagctcatatgtcgctaatcaagcctctagcggcgctggcggccaaccgaacataacaaagttgatcattaccaaacaaatgctgccaagtagcatcacaatgagtcaagggggtatggtgaccgtcatcccagccaccgtggtgacatcaaggggtctacagctcggccaaacgtccacggccaccatccagccaagtcagcaagcacaaatcgtgacccgctctgtgctgcaagccgccgccgcagccgcagccgcagcttccatgcaattgccccctccgcgacttcagccccccccacttcagcagatgccccagcccccaacacaacaacaagtcacaatactccagcaacctcctccactccaggccatgcagcagccaccaccccagaaagtcaggattaatctgcagcagcagcctccaccattgcaaataaaatctgtccctttgcccactctgaagatgcaaaccactttggtgccccctacagttgagtcatcccctgaacggcccatgaataatagcccagaagcgcacacggtggaggcccctagccccgaaacaatatgtgagatgataaccgatgtcgtgcccgaggtagaaagccctagccagatggatgtagaactggtgtcaggctctcctgtagccctctctccacagcccagatgcgtgagaagtggctgtgaaaatcccccaatagtctctaaggactgggataacgaatactgctcaaacgaatgcgttgtcaagcactgtagggatgtctttttggcctgggtggctagcagaaattctaatactgtggtcttcgtgaaatag

SEQ ID NO: 182507 - DNA, 1866 bp, Artificial Sequence
  derived and/or modified sequence
atggagttccccggcggcaacgacaactacctgaccatcaccggcccatcccatccgtttctctcaggcgcggagacattccataccccgagcctgggcgatgaagaatttgaaattccacccatttccctggactccgaccccagcctcgctgtgtccgacgtggtcgggcactttgacgatcttgctgatccttcgtccagccaggatggatccttttctgcacaatatggagtgcagacgctggacatgcccgtgggaatgacacacggtctcatggagcaaggcggtggactgctgtctggtggtctgaccatggacctggaccactctattggaacgcagtattccgcaaaccccccagtcaccattgatgtcccaatgaccgacatgacgtcaggtctcatgggccactcacagcttacaacaatcgaccagtcggagcttagcagtcagctgggtcttagtctcggaggcgggacaatcctacctcccgcccaaagcccagaggataggctatccaccaccccgagtcctacatcgtcgttgcatgaagatggagtggaggatttccggagacagcttccttcacagaagacagtggtggtggaagccggaaaaaagcagaaagctcctaaaaaacgcaagaagaaggatccgaatgaaccccagaagcccgtcagcgcttacgctctttttttccgggatacacaggcagcaattaaaggacagaatcctaacgctacatttggtgaagtgtctaaaatcgttgcctcaatgtgggattctctaggagaggagcaaaagcaagtgtacaagaggaaaaccgaggccgcgaaaaaagagtacctgaaagcccttgctgcttacaaggataaccaggagtgtcaggcgactgttgagaccgttgagctggaccccgccccgcctagtcagacgccaagccctccacccatggccactgtagatccggcctccccagcaccagccagtatcgagcctccggccctgagccctagtatcgtggtgaatagtaccctgtcatcctacgtggcaaaccaagcctcctcaggggctggcgggcaaccaaatataacaaagctgatcattacaaagcagatgctgccgtcctcaataactatgtctcagggcgggatggttacagttatacccgccacagtggtcactagccggggcttacaactgggccagactagcacagccactatacaaccttcccagcaggctcagattgtgactcgctctgttctgcaggctgccgcagctgctgccgccgccgcgtctatgcagcttccacccccgcggcttcagcctcctccactgcagcagatgccccagccgccaacccaacagcaggtgaccatccttcagcagcctccacctttacaggcgatgcagcagcccccgccacaaaaggtcaggataaatctacaacaacagcccccgcccttacagatcaagagcgtgcccctgcccacactcaaaatgcagactacactggtgcctcccacagtcgaatcatcgcccgagaggcctatgaacaacagccccgaggcacataccgtggaggctccttctcccgagacaatttgtgagatgattaccgatgtggtgcccgaggtggagtcacccagtcagatggatgtcgagctggtatctggttctcctgtggcactgagtccacagccccgctgcgtaaggtctgggtgcgaaaacccaccgatcgtatccaaggactgggacaacgaatactgctctaatgagtgtgtggtgaaacattgccgggacgtgtttctcgcgtgggttgcgagcaggaattcgaatacagtggtgtttgtgaagtag

SEQ ID NO: 182508 - DNA, 1866 bp, Artificial Sequence
  derived and/or modified sequence
atggaatttcccggtggcaatgacaactatctcacgatcactggcccatctcatcctttcctctccggcgcagaaactttccataccccctcccttggtgatgaggagtttgagatcccacccatatcccttgactcggatccctctttagcggtctccgacgttgttggccactttgatgacttggcggatccctcctcgagccaagatggatcgttttccgcgcaatatggcgtgcaaaccttagacatgcccgtgggaatgacccacggattgatggaacagggcggtgggctgttaagcgggggtttgaccatggatttagaccactccattggaacacaatatagcgcaaaccccccagtgacaatcgacgtgcccatgactgatatgaccagtgggcttatggggcacagccagctgacgaccattgatcaatccgaactgtcctctcaactgggtctgtctctggggggagggaccatcctgccgcctgctcaatctcctgaggacaggctctccaccactccaagtccgacctcttctctgcacgaggatggcgtggaagacttccggcgacaattaccaagtcaaaaaacggtcgttgtcgaggccggtaaaaaacaaaaagcccctaaaaagcgcaagaagaaagacccaaatgagccccagaagcccgtctcagcttacgccctgttttttcgtgatacgcaagcagcgataaaggggcagaaccctaacgcgacctttggtgaagtgtctaaaattgtggccagtatgtgggattctttaggtgaggaacagaagcaggtgtataaacggaaaactgaggcagccaagaaggagtatctaaaggcactggcggcatataaagataatcaggaatgccaggccaccgttgaaacggtagagctggacccagccccaccaagccaaacccccagcccccctcccatggctaccgtcgaccctgcctccccagcccctgctagcattgagccgcctgctcttagccccagcatcgtcgtgaacagcacgctctcctcttacgtcgccaaccaggcctcatcaggcgctgggggacagcctaacattactaaattaatcattacaaagcagatgttgccctcatctataaccatgtcacaggggggtatggtgacagtgattccagctacggttgttacctcacgaggcctacagctgggccaaacgtcgaccgcaaccattcagccctcccagcaagcccagatcgtgaccagatctgtactccaggccgctgcagccgctgctgctgcagcctccatgcagctgccacccccacggcttcagccgcctcctctgcagcagatgcctcagccacccacccaacagcaggtgaccattctccaacagccaccgccacttcaggccatgcagcagccccctccccagaaggtgaggataaatctgcaacagcagcctccccctcttcagatcaagtcagtccctctccccacgctcaaaatgcagacaaccctggtaccgcctaccgtcgagagcagcccagaacgcccaatgaacaattctcctgaagctcatacagtggaggccccttcacctgagaccatctgcgagatgatcactgacgtggtgccagaggtggaatccccatctcaaatggatgttgagctggtgagcggatccccagtggcactttctccgcaacctagatgcgtgcggagtggctgcgaaaatccgccaattgtgagcaaagattgggataacgagtactgctctaacgagtgtgtagtgaagcattgccgggacgtgttcctggcatgggtcgcatctcgaaatagcaacacagtagtttttgttaaatag

SEQ ID NO: 182509 - DNA, 1866 bp, Artificial Sequence
  derived and/or modified sequence
atggaatttcccggtggaaacgataattacctcacaataactgggccatcccatccctttctgagcggggctgagacctttcataccccttccctgggagatgaggagtttgaaattccccctatcagcttagacagtgaccccagtttggcagtaagcgacgttgttgggcatttcgatgatctcgcggatccatcttcgtctcaagatgggtccttttcagctcagtacggcgtgcaaacactggacatgcccgtgggaatgacccatggcctgatggagcaaggagggggactcctctctgggggactcacaatggatctcgaccattccattgggactcagtattccgctaatcccccagtgaccatagacgtgcccatgacagatatgactagcggattaatgggccacagtcagctgaccacgattgaccagtccgagctctcttcccagctggggctcagcctaggagggggtacgattttacccccagctcagtcaccagaagatcggcttagcacgaccccctctcccactagttcactgcacgaagatggcgtagaggatttcagacggcagctcccgtctcaaaaaactgtggtagtggaggccggaaaaaaacagaaggctccaaagaaaaggaagaaaaaggaccccaacgagccccaaaaacctgtatccgcttatgcactgttttttagagatacacaggctgccatcaaaggacagaacccaaacgcaacctttggggaggtgtccaagatcgttgctagcatgtgggatagtttgggggaggagcaaaagcaggtgtacaagaggaagactgaggccgctaagaaagagtatctgaaggcgctcgcagcttacaaagacaatcaggaatgccaagccacagtagaaaccgtagagctggacccggctccgcctagccagactccctcccctcctcctatggccaccgtggaccctgcttcccccgctcccgcttccattgagccccctgccctcagtccgagtatcgtcgtaaactccactctgtccagttatgttgccaatcaagcttcaagcggtgccggagggcaacctaacataaccaagttgattatcaccaaacagatgctgccttcctcaatcactatgtctcagggtgggatggtgactgtcattccagctacggtagttacgagtagagggctgcaacttggccaaacctccactgccaccatccagccctctcaacaagcccagattgtgacaaggtctgtgttgcaggccgcagccgcagcagcggctgcagcctccatgcagctccctccacctcgcctccagcctcccccactgcagcagatgccccaacccccaacacagcagcaggtcaccatcctgcagcaaccgcctccactgcaggccatgcaacagccacccccacaaaaggtcagaattaaccttcagcaacaaccccctccactgcagattaagagcgtgccgcttccaacacttaaaatgcagacaactctggtccctccaacagtggagtcgagccccgaaaggccaatgaacaatagccccgaagcacacactgtagaggctccaagtccggaaaccatctgcgagatgatcaccgatgtggtgccagaagtcgagtcaccatctcagatggacgtagagcttgtgtctgggagccctgtagccctgagccctcagcctaggtgtgtgaggtctggctgtgagaatccccctattgtaagtaaggactgggacaacgagtattgctcgaatgagtgcgtggtgaagcattgtagggacgtctttttagcgtgggtcgcctcccggaattcgaatacggttgtgtttgtcaaatag

SEQ ID NO: 182510 - DNA, 4520 bp, Artificial Sequence
  derived and/or modified sequence
agcagagagaacacacgtccttgcggaagtgacggcagttccgagtccagtgggggcggtgggagcgatgagggtctgagacggtgggagcggttgtgtgaagatggagtttcccggaggaaatgacaattacctgacgatcacagggccttcgcaccccttcctgtcaggggccgagacattccatacaccaagcttgggtgatgaggaatttgaaatcccacctatctccttggattctgatccctcattggctgtctcagatgtggttggccactttgatgacctggcagacccttcctcttcacaggatggcagtttttcagcccagtatggggtccagacattggacatgcctgtgggcatgacccatggcttgatggagcagggcggggggctcctgagtgggggcttgaccatggacttggaccactctataggaactcagtatagtgccaacccacctgttacaattgatgtaccaatgacagacatgacatctggcttgatggggcatagccagttgaccaccattgatcagtcagaactgagttcccagctgggtttgagcctagggggtggcaccatcctgccacctgcccagtcacctgaagatcgtctttcaaccaccccttcacctactagttcacttcacgaggatggtgttgaggatttccggaggcaacttcccagccagaagacagtcgtggtggaagcagggaaaaagcagaaggccccaaagaagagaaaaaagaaagatcctaatgaacctcagaaaccagtttcagcatatgctttattctttcgtgatacacaggctgccatcaagggacagaatcctaatgccacttttggtgaggtttcaaaaattgtggcctccatgtgggatagtcttggagaggagcaaaaacaggtatataagaggaaaactgaggctgccaagaaagagtatctgaaggcactggctgcttacaaagacaaccaggagtgtcaggccactgtggaaacagtggaattggatccagcaccaccatcacaaactccttctccacctcctatggctactgttgacccagcatctccagcaccagcttcaatagagccccctgccctgtccccatccattgttgttaactccaccctttcatcctatgtggcaaaccaggcatcttctggagctgggggtcagcccaatatcaccaagttgattattaccaaacaaatgttgccctcttctattactatgtctcaaggagggatggttactgttatcccagccacagtggtgacctcccgggggctccaactaggccaaaccagtacagctactatccagcccagtcaacaagcccagattgtcactcggtcagtgttgcaggcagcagcagctgctgctgctgctgcttctatgcaactgcctccaccccgactacagccccctccattacaacagatgccacagcccccgactcagcagcaagttaccattctgcagcagcctcctccactccaggccatgcaacagcctccacctcagaaagttcgaatcaatttacagcaacagcctcctcctctgcagatcaagagtgtgcctctacccactttgaaaatgcagactaccttagtcccaccaactgtggaaagtagtcctgagcggcctatgaacaacagccctgaggcccatacagtggaggcaccttctcctgagactatctgtgagatgatcacagatgtagttcctgaggttgagtctccttctcagatggatgttgaattggtgagtgggtctcctgtggcactctcaccccagcctcgatgtgtgaggtctggttgtgagaaccctcccattgtgagtaaggactgggacaatgaatactgcagcaatgagtgtgtggtgaagcactgcagggatgtattcttggcctgggtagcctctagaaattcaaacacagtggtgtttgtgaaatagtccttcctgttctccaagccagtgaagagttatctgctgggaaagtgtccaagagcctgtttttgaaacacaagctgggcttctggtagtgcctcatcacaacccatgatggctgttcatgtttcaccccttttcttccttcagcagaggccaggctatggagcagggccactgaatttgctgtaatctggagatgctttttactttcaaccataagcggtaatagcagaggaaagggtgaagggagtctgggcaagcaaagcatagagatggtggggtggtggtggggttgaagaaacttgttggtataattgtcataggacttgcctaaaatattattaaaattacgggagtgtactcagctttgagcctaggagaaaatgccactgtgtgcatccattttaaagggttccctcataaaaaaatgttattccccattatcacatcagtacactgctttgaaaacaaaacttttcaacatgggcatactgggctacatggaaaatgacatcacccaggagtgatttctctttatatatattatttctgcagttaccatccttatctgagttatcacagttcatgaatctaagaggcggaactctacatcattagtaagaggttccaccaaagtctaaagttgtattcacttgtgtttgatgaactatctttaaaagaccataggtctatcattatttcttagacataatctaaagaaaaacagactagagaagccacctggttgtaacagaataagcagaagtttacagcatgatagtccaagtggtgataactttaaataaaactcaaatttttactgtttgtagacaggaatgctgtcctagagaacctcctcctcaaccagctacgtacatagttttatcctatgcattcctgttttctgtgttttttgttttttttttttgagacagagtctcgctctgtcacccaggctggagtgcagtggtgcgacctcagctcactgaaacctctgcctcccgggttcaagcgattctcctgcatcagcctcccgagtagctaggattacaggcgcccgccactacgcccagctaatttgtggtatttttagtagagacagggtttcaccatgttggccaggctggtctcgaactcctgacctcatgatccgcccgccttgacctcccaaagtgctgggattacaggcatgagccaccgcacccagcctgcattcctgtttttttaatggttttggagggtagcagtagagatggggtctcactatgttgcccagtctagtcttgaactcctgggctacagttaccctcctacctcggcttcccaaagtgctcggattacaggtgtgagccactgtgcctagcctataatgatcattttaatgtttcccatgcactcatttagtttgaaccttcacagcaacccaatgaggtaatactcccatttcacatataatactgagagatgagttgcacaagattatacactgttaagtagcagagccagaatggacttcagaatcccaactacaatacaaatgtttatttaaataaagaagaaagctattgtacaaatatcactcttcaggtttagcttacagagccatggctatggattcttagctctgtaaggaagtgcttctataaattcttaggtttagagatgataccatctgggtacctttgcttgaaccgtgcaaccacatctgggtctagtaggtggatcccatccagttggtttccaagggtgatcctgaaacagtgtaaaaggaggggcaaaccagaaatcctggaattagagggtttaatattgttaaaaaatgcataccaaatgaagactgcctatcatcatatcaaatatgccaattctaaaaagagcttaacattagaatagtatatggtagaattactagttcagaattggcatagattctggtgttaaaatagactggatctgtattatctgagggttagtaactaatgcttagccaggcctgcttcacagagttgctaccagggagtattctttggataagcaaaatgctagcagcatgtgttttaagctctgttaaggggtgaaagatgtaattattgacagattaaatagataacttcgtaaccaccagggggcagattcaatacatcacagaatggctgaggaagatccttgggttgtgaagagagtagaaaccctagggagcagtgcttttgggtcctagaacctgttgagtttctaatgaatatttgtagaatctcataaaacagtttaaatacaagcttaagtggcttatgaatcctgtgaagctcatttatggactagtgtaaaacaatgtgaagctctactaagttctgtccttaatcataaataatagccccttgaggactagcctgttctctggtcaccttaccagttgggttgcacattgtgtggtcgtccaaataactcaatcttgcgagtgccaggagatagtctttcaatcatgccatagatttcatctggtttatgactggtggaacgaacctaggaaataaaaactagctgctttttaagttac

SEQ ID NO: 182511 - DNA, 4697 bp, Artificial Sequence
  derived and/or modified sequence
ccgcccccgccacccaatttgggagcttcgaatgcccgcccgagccttgaaggcgaaccacctgagggttacctgtgtctccgatgatgatatacttgaagagataagcataagtcatgggggcgatagcccagcgcctgactctctgcagccccacggcgctccttccaatcagcagagagaacacacgtccttgcggaagtgacggcagttccgagtccagtgggggcggtgggagcgatgagggtctgagacggtgggagcggttgtgtgaagatggagtttcccggaggaaatgacaattacctgacgatcacagggccttcgcaccccttcctgtcaggggccgagacattccatacaccaagcttgggtgatgaggaatttgaaatcccacctatctccttggattctgatccctcattggctgtctcagatgtggttggccactttgatgacctggcagacccttcctcttcacaggatggcagtttttcagcccagtatggggtccagacattggacatgcctgtgggcatgacccatggcttgatggagcagggcggggggctcctgagtgggggcttgaccatggacttggaccactctataggaactcagtatagtgccaacccacctgttacaattgatgtaccaatgacagacatgacatctggcttgatggggcatagccagttgaccaccattgatcagtcagaactgagttcccagctgggtttgagcctagggggtggcaccatcctgccacctgcccagtcacctgaagatcgtctttcaaccaccccttcacctactagttcacttcacgaggatggtgttgaggatttccggaggcaacttcccagccagaagacagtcgtggtggaagcagggaaaaagcagaaggccccaaagaagagaaaaaagaaagatcctaatgaacctcagaaaccagtttcagcatatgctttattctttcgtgatacacaggctgccatcaagggacagaatcctaatgccacttttggtgaggtttcaaaaattgtggcctccatgtgggatagtcttggagaggagcaaaaacaggtatataagaggaaaactgaggctgccaagaaagagtatctgaaggcactggctgcttacaaagacaaccaggagtgtcaggccactgtggaaacagtggaattggatccagcaccaccatcacaaactccttctccacctcctatggctactgttgacccagcatctccagcaccagcttcaatagagccccctgccctgtccccatccattgttgttaactccaccctttcatcctatgtggcaaaccaggcatcttctggagctgggggtcagcccaatatcaccaagttgattattaccaaacaaatgttgccctcttctattactatgtctcaaggagggatggttactgttatcccagccacagtggtgacctcccgggggctccaactaggccaaaccagtacagctactatccagcccagtcaacaagcccagattgtcactcggtcagtgttgcaggcagcagcagctgctgctgctgctgcttctatgcaactgcctccaccccgactacagccccctccattacaacagatgccacagcccccgactcagcagcaagttaccattctgcagcagcctcctccactccaggccatgcaacagcctccacctcagaaagttcgaatcaatttacagcaacagcctcctcctctgcagatcaagagtgtgcctctacccactttgaaaatgcagactaccttagtcccaccaactgtggaaagtagtcctgagcggcctatgaacaacagccctgaggcccatacagtggaggcaccttctcctgagactatctgtgagatgatcacagatgtagttcctgaggttgagtctccttctcagatggatgttgaattggtgagtgggtctcctgtggcactctcaccccagcctcgatgtgtgaggtctggttgtgagaaccctcccattgtgagtaaggactgggacaatgaatactgcagcaatgagtgtgtggtgaagcactgcagggatgtattcttggcctgggtagcctctagaaattcaaacacagtggtgtttgtgaaatagtccttcctgttctccaagccagtgaagagttatctgctgggaaagtgtccaagagcctgtttttgaaacacaagctgggcttctggtagtgcctcatcacaacccatgatggctgttcatgtttcaccccttttcttccttcagcagaggccaggctatggagcagggccactgaatttgctgtaatctggagatgctttttactttcaaccataagcggtaatagcagaggaaagggtgaagggagtctgggcaagcaaagcatagagatggtggggtggtggtggggttgaagaaacttgttggtataattgtcataggacttgcctaaaatattattaaaattacgggagtgtactcagctttgagcctaggagaaaatgccactgtgtgcatccattttaaagggttccctcataaaaaaatgttattccccattatcacatcagtacactgctttgaaaacaaaacttttcaacatgggcatactgggctacatggaaaatgacatcacccaggagtgatttctctttatatatattatttctgcagttaccatccttatctgagttatcacagttcatgaatctaagaggcggaactctacatcattagtaagaggttccaccaaagtctaaagttgtattcacttgtgtttgatgaactatctttaaaagaccataggtctatcattatttcttagacataatctaaagaaaaacagactagagaagccacctggttgtaacagaataagcagaagtttacagcatgatagtccaagtggtgataactttaaataaaactcaaatttttactgtttgtagacaggaatgctgtcctagagaacctcctcctcaaccagctacgtacatagttttatcctatgcattcctgttttctgtgttttttgttttttttttttgagacagagtctcgctctgtcacccaggctggagtgcagtggtgcgacctcagctcactgaaacctctgcctcccgggttcaagcgattctcctgcatcagcctcccgagtagctaggattacaggcgcccgccactacgcccagctaatttgtggtatttttagtagagacagggtttcaccatgttggccaggctggtctcgaactcctgacctcatgatccgcccgccttgacctcccaaagtgctgggattacaggcatgagccaccgcacccagcctgcattcctgtttttttaatggttttggagggtagcagtagagatggggtctcactatgttgcccagtctagtcttgaactcctgggctacagttaccctcctacctcggcttcccaaagtgctcggattacaggtgtgagccactgtgcctagcctataatgatcattttaatgtttcccatgcactcatttagtttgaaccttcacagcaacccaatgaggtaatactcccatttcacatataatactgagagatgagttgcacaagattatacactgttaagtagcagagccagaatggacttcagaatcccaactacaatacaaatgtttatttaaataaagaagaaagctattgtacaaatatcactcttcaggtttagcttacagagccatggctatggattcttagctctgtaaggaagtgcttctataaattcttaggtttagagatgataccatctgggtacctttgcttgaaccgtgcaaccacatctgggtctagtaggtggatcccatccagttggtttccaagggtgatcctgaaacagtgtaaaaggaggggcaaaccagaaatcctggaattagagggtttaatattgttaaaaaatgcataccaaatgaagactgcctatcatcatatcaaatatgccaattctaaaaagagcttaacattagaatagtatatggtagaattactagttcagaattggcatagattctggtgttaaaatagactggatctgtattatctgagggttagtaactaatgcttagccaggcctgcttcacagagttgctaccagggagtattctttggataagcaaaatgctagcagcatgtgttttaagctctgttaaggggtgaaagatgtaattattgacagattaaatagataacttcgtaaccaccagggggcagattcaatacatcacagaatggctgaggaagatccttgggttgtgaagagagtagaaaccctagggagcagtgcttttgggtcctagaacctgttgagtttctaatgaatatttgtagaatctcataaaacagtttaaatacaagcttaagtggcttatgaatcctgtgaagctcatttatggactagtgtaaaacaatgtgaagctctactaagttctgtccttaatcataaataatagccccttgaggactagcctgttctctggtcaccttaccagttgggttgcacattgtgtggtcgtccaaataactcaatcttgcgagtgccaggagatagtctttcaatcatgccatagatttcatctggtttatgactggtggaacgaacctaggaaataaaaactagctgctttttaagttacacaa

SEQ ID NO: 182512 - protein, 1031 aa, Artificial Sequence
  derived and/or modified sequence
MGRESRHYRKRSASRGRSGSRSRSRSPSDKRSKRGDDRRSRSRDRDRRRERSRSRDKRRSRSRDRKRLRRSRSRERDRSRERRRSRSRDRRRSRSRSRGRRSRSSSPGNKSKKTENRSRSKEKTDGGESSKEKKKDKDDKEDEKEKDAGNFDQNKLEEEMRKRKERVEKWREEQRKKAMENIGELKKEIEEMKQGKKWSLEDDDDDEDDPAEAEKEGNEMEGEELDPLDAYMEEVKEEVKKFNMRSVKGGGGNEKKSGPTVTKVVTVVTTKKAVVDSDKKKGELMENDQDAMEYSSEEEEVDLQTALTGYQTKQRKLLEPVDHGKIEYEPFRKNFYVEVPELAKMSQEEVNVFRLEMEGITVKGKGCPKPIKSWVQCGISMKILNSLKKHGYEKPTPIQTQAIPAIMSGRDLIGIAKTGSGKTIAFLLPMFRHIMDQRSLEEGEGPIAVIMTPTRELALQITKECKKFSKTLGLRVVCVYGGTGISEQIAELKRGAEIIVCTPGRMIDMLAANSGRVTNLRRVTYVVLDEADRMFDMGFEPQVMRIVDNVRPDRQTVMFSATFPRAMEALARRILSKPIEVQVGGRSVVCSDVEQQVIVIEEEKKFLKLLELLGHYQESGSVIIFVDKQEHADGLLKDLMRASYPCMSLHGGIDQYDRDSIINDFKNGTCKLLVATSVAARGLDVKHLILVVNYSCPNHYEDYVHRAGRTGRAGNKGYAYTFITEDQARYAGDIIKALELSGTAVPPDLEKLWSDFKDQQKAEGKIIKKSSGFSGKGFKFDETEQALANERKKLQKAALGLQDSDDEDAAVDIDEQIESMFNSKKRVKDMAAPGTSSVPAPTAGNAEKLEIAKRLALRINAQKNLGIESQDVMQQATNAILRGGTILAPTVSAKTIAEQLAEKINAKLNYVPLEKQEEERQDGGQNESFKRYEEELEINDFPQTARWKVTSKEALQRISEYSEAAITIRGTYFPPGKEPKEGERKIYLAIESANELAVQKAKAEITRLIKEELIRLQNSYQPTNKGRYKVL

SEQ ID NO: 182513 - protein, 259 aa, Artificial Sequence
  derived and/or modified sequence
MGRESRHYRKRSASRGRSGSRSRSRSPSDKRSKRGDDRRSRSRDRDRRRERSRSRDKRRSRSRDRKRLRRSRSRERDRSRERRRSRSRDRRRSRSRSRGRRSRSSSPGNKSKKTENRSRSKEKTDGGESSKEKKKDKDDKEDEKEKDAGNFDQNKLEEEMRKRKERVEKWREEQRKKAMENIGELKKEIEEMKQGKKWSLEDDDDDEDDPAEAEKEGNEMEGEELDPLDAYMEEVKEEVKKFNMRSVKAVSKKKKKKKK

SEQ ID NO: 182514 - DNA, 3096 bp, Artificial Sequence
  derived and/or modified sequence
atgggaagggaatccagacattaccggaagcgcagcgccagtagaggtcgcagcgggagcagatctagatccagatccccaagtgacaaacggagcaaacgcggcgatgatcgtcgttccaggagtagagaccgcgacaggaggcgcgaaaggtcccgtagccgtgataagcgccgtagtaggagccgcgataggaagcggctgcgtcggtcacgttcacgggaaagggatcgcagccgagagcggagaagaagccgctcccgagataggcgtcgctcgcggtcgcgctcccgcggtcggagatccaggtcatcttccccaggtaataagtccaagaagaccgagaaccgcagccgctctaaagagaagaccgacggcggcgaatctagcaaagagaaaaagaaagataaggacgataaggaagacgagaaggagaaggacgccgggaacttcgatcagaacaaactcgaggaagagatgcgtaaaaggaaagagagggtcgaaaagtggcgagaggaacagcgaaaaaaagccatggaaaacattggggagcttaagaaggaaatcgaagaaatgaagcagggtaaaaagtggtcattagaggatgacgacgacgatgaggatgatcccgccgaagctgagaaagagggaaacgagatggagggagaagagctggaccctttagatgcttatatggaagaggttaaggaagaagtgaagaagtttaacatgcggtcagtcaagggcgggggtggcaatgagaagaagagtgggccaacggtcactaaagtagttacagtggtcactacaaaaaaggccgttgtggatagcgataagaagaagggcgaactcatggagaatgaccaggacgccatggagtacagctcggaggaggaggaggtggacctccaaactgcattgactggctatcaaacaaagcagaggaagcttctagagcctgtagatcacgggaaaatagagtacgagcctttccgaaaaaacttctatgtcgaagtccctgaacttgctaagatgtcccaagaagaagtaaacgtttttagactcgagatggagggcatcactgtaaagggcaaagggtgccccaaaccaataaagagctgggtgcagtgtggaattagcatgaaaatccttaatagcctcaagaaacacggttatgagaagcctacacctatccagactcaagcaatcccggctatcatgtcgggccgggacctgataggtatagctaaaactgggtcaggtaaaaccatcgcattcctgctgcccatgtttaggcatattatggaccagagatctctggaggagggagagggtcccatagcagttatcatgactccaacccgtgagctcgccttacaaattaccaaagagtgcaagaagttttccaagacactgggccttagagtcgtttgtgtgtatggcggcactgggatctcagagcagatcgcagagctcaaaaggggagctgagatcatcgtgtgcaccccaggcaggatgattgatatgttagctgctaattccggtcgggtcaccaacttgcggagagtgacatacgtggtgctcgatgaggctgatcgaatgttcgatatgggattcgaaccacaagtcatgcgaatcgtggacaatgtgcgccccgacaggcagactgtcatgttttctgcgacattcccgcgggcgatggaggccctcgcccggcgcatcctgtccaaacctattgaggtccaggtagggggaagaagcgtggtgtgttcggacgtagagcaacaagtgatcgtgatcgaagaagagaaaaaattcctgaagctgttggagctgttaggccattatcaggaaagtggcagcgttatcatcttcgtcgataaacaggaacatgccgatggtctgctgaaggacctgatgcgagcctcatatccctgtatgtccctccatggtgggattgaccagtatgaccgggactcaatcatcaatgattttaagaatggcacctgcaagctgttagtcgccacctccgtggccgctcggggacttgacgttaaacacctgatcttagtggtgaattatagttgcccaaaccactacgaggactatgtgcaccgagctggaaggaccggtcgcgccggtaataagggatacgcctacactttcattactgaagatcaggccagatatgccggggacattataaaggccctcgagctgagcggtaccgcagtgcctccagacctggagaagctatggtccgactttaaagatcagcaaaaagccgagggcaaaatcatcaagaagagcagtggattctccgggaaaggcttcaagttcgatgagacagagcaggcactggccaatgagagaaagaagctccagaaagctgctctggggctccaggactccgatgatgaggacgccgctgtcgatattgatgagcaaattgaatctatgttcaattcaaagaagcgcgttaaggacatggcagcccccggcacgtcctccgtacccgcacccactgccggcaatgcagagaagctggagattgccaagcgcctggccctccgtatcaatgcccagaaaaatctcgggatagaatcacaggacgttatgcagcaggcaaccaacgctatcctcaggggagggactatccttgcgcccactgtatcagcgaagacaatagcggagcagttagccgagaagatcaacgcaaagttaaactatgtcccacttgaaaagcaggaggaggaaaggcaggacggaggccagaatgagtcatttaaaaggtatgaagaggaactcgagattaatgattttccccagaccgcacggtggaaagtaacaagtaaggaagcactccaacgcatatctgagtacagcgaggcggccatcactatcagaggaacgtatttccctccgggcaaggagcccaaggaaggggagaggaaaatctatttagccatagagagtgctaacgaactggccgtgcagaaggcaaaggcggaaataactagacttataaaggaggaactgatccggttgcaaaatagctatcagcctacaaacaagggaagatataaggttctgtag

SEQ ID NO: 182515 - DNA, 3096 bp, Artificial Sequence
  derived and/or modified sequence
atgggccgggagagccgccactacaggaagaggtctgccagccggggccgcagcggcagccgcagccgcagccgcagccccagcgacaagaggagcaagagaggagatgaccggcgcagccgcagccgggaccgggacagaagaagagagaggagccgcagccgggacaagaggaggagccgcagccgggacaggaagaggctgcggcgcagccgcagccgggagcgggacaggagccgggagaggagaagaagccgcagccgggacagaagaagaagccgcagccgcagccggggccgccgcagccgcagcagcagccctggcaacaagagcaagaagacagaaaatagaagccgcagcaaggagaagacagatggaggagagagcagcaaggagaagaagaaggacaaggatgacaaggaggatgagaaggagaaggatgctggcaactttgaccagaacaagctggaggaggagatgaggaagaggaaggagcgggtggagaagtggagggaggagcagaggaagaaggccatggagaacatcggggagctgaagaaggagattgaggagatgaagcagggcaagaagtggagcctggaggatgatgatgatgatgaagatgatcctgctgaggccgagaaggagggcaatgagatggagggggaggagctggaccccctggatgcctacatggaggaggtgaaggaggaggtgaagaagttcaacatgaggtctgtgaagggcggcggcggcaatgagaagaagagcggccccaccgtgaccaaggtggtgacagtggtgaccaccaagaaggctgtggtggacagcgacaagaagaagggggagctgatggagaatgaccaggatgccatggagtacagcagcgaggaggaggaggtggacctgcagacagccctgaccggctaccagaccaagcagaggaagctgctggagcctgtggaccacggcaagattgaatatgagcccttcaggaagaacttctacgtggaggtgcctgagctggccaagatgagccaggaggaggtgaatgtgttccggctggagatggagggcatcaccgtgaagggcaagggctgccccaagcccatcaagtcctgggtgcagtgtggcatctccatgaagatcctgaacagcctgaagaagcacggctatgagaagcccacccccatccagacccaggccatcccagccatcatgagcggccgggacctgattggaattgccaagacaggcagcggcaagaccatcgccttcctgctgcccatgttccgccacatcatggaccagaggagcctggaggagggggagggccccatcgccgtcatcatgacccccacccgggagctggccctgcagatcaccaaggagtgcaagaagttcagcaagaccctgggcctgcgggtggtgtgtgtgtatggaggcaccggcatcagcgagcagattgctgagctgaagagaggagctgagatcatcgtgtgcaccccaggccgcatgattgacatgctggccgccaacagcggccgggtgaccaacctgcggcgggtgacctacgtggtgctggatgaagctgacaggatgtttgacatgggctttgagccccaggtgatgagaattgtggacaacgtgcggccagaccggcagacagtgatgttcagcgccaccttcccccgggccatggaggccctggcccggcgcatcctgagcaagcccatcgaggtgcaggtgggcggccgctctgtggtgtgcagtgatgtggagcagcaggtgattgtcatcgaggaggagaagaagttcctgaagctgctggagctgctgggccactaccaggagagcggcagcgtcatcatctttgtggacaagcaggagcacgcagatggcctgctgaaggacctgatgagggccagctacccctgcatgagcctgcacggcggcatcgaccagtatgaccgggacagcatcatcaatgacttcaagaatggcacctgcaagctgctggtggccacctctgtggccgcccggggcctggatgtgaagcacctgatcctggtggtgaactacagctgccccaaccactatgaagattatgtgcacagagctggccgcacaggccgggccggcaacaagggctacgcctacaccttcatcacagaggaccaggcccgctatgctggggacatcatcaaggccctggagctgtctggaacagctgtgcccccagacctggagaagctgtggagcgacttcaaggaccagcagaaggccgagggcaagatcatcaagaagagcagcggcttcagcggcaagggcttcaagtttgatgaaacagagcaggccctggccaatgaaaggaagaagctgcagaaggccgccctgggcctgcaggacagtgatgatgaagatgctgctgtggacattgatgagcagattgaatccatgttcaacagcaagaagagggtgaaggacatggccgcccctggcaccagctctgtgcctgcccccacagctggaaatgctgagaagctggagatcgccaagaggctggccctgcgcatcaatgcccagaagaacctgggcatcgagagccaggatgtgatgcagcaggccaccaatgccatcctgcggggcggcaccatcctggcccccaccgtgtctgccaagaccatcgccgagcagctggccgagaagatcaatgccaagctgaactacgtgcccctggagaagcaggaggaggagcggcaggacggcggccagaatgaaagcttcaagagatatgaggaggagctggagatcaatgacttcccccagacagcccgctggaaggtgaccagcaaggaggccctgcagaggatcagcgagtacagcgaggccgccatcaccatccggggcacctacttccccccaggcaaggagcccaaggagggggagaggaagatctacctggccatcgagagcgccaatgagctggccgtgcagaaggccaaggccgagatcaccaggctcatcaaggaggagctgatccggctgcagaacagctaccagcccaccaacaagggccgctacaaggtgctgtag

SEQ ID NO: 182516 - DNA, 3096 bp, Artificial Sequence
  derived and/or modified sequence
atgggccgggagagccggcactaccggaagcggagcgccagccggggaaggtcagggtcccgatctaggtcccgcagcccatcagacaaacgcagcaagcgtggcgatgatcgacggtcccggtctcgcgatagggaccgcaggagggagcgatctagatcccgggacaaacggaggtctcgttccagagatcgtaaaagattgagacggtcgaggtccagggaacgggataggagtagagagcgacggcggtctaggagccgagaccggagaagatctcggagtcggtcaaggggacgccggtcccggagctcctcccctggtaacaaatctaagaaaacagagaaccggagcaggtcaaaagaaaaaacagatggcggggaaagctctaaagagaaaaagaaggataaggacgacaaggaagatgagaaagagaaggacgccggaaacttcgaccagaacaagctggaagaagaaatgcgtaaacgtaaggaaagagtcgagaagtggcgagaggaacagagaaaaaaggccatggaaaatattggcgaactgaagaaagaaatcgaagaaatgaagcagggaaaaaaatggtccctcgaagatgacgacgatgatgaggacgaccctgcagaggccgagaaggagggcaacgagatggaaggggaggagttggatcccctggatgcctatatggaggaggttaaagaagaggttaaaaaatttaatatgaggtcagtcaaaggcgggggtgggaatgaaaaaaaatcaggaccaaccgtcaccaaagtagtcaccgtggtaacaactaagaaagccgtggtggacagcgacaagaaaaagggagagctcatggaaaacgaccaggatgcaatggaatactccagcgaggaggaagaagtcgatctgcagactgctctgacaggataccagaccaagcagcggaaactgctggagccagtcgatcacggcaaaattgagtatgaaccctttagaaagaatttctatgttgaggtgcccgagctcgcaaaaatgagtcaagaggaagtgaatgtgttccgactggaaatggagggaattactgtgaagggcaaggggtgtcctaagcctatcaaaagctgggtgcagtgtggcatctccatgaagatcctcaattcgctgaagaaacacggatatgaaaagccaacgcccatccagacgcaggccatacctgctatcatgagcggcagggaccttatcggaatcgccaagaccggatcagggaaaaccatagccttcctcctgccaatgtttagacacatcatggaccagcgctcgctagaagaaggagaaggaccaatagcagtgataatgaccccaactagagagctggccctgcagattacgaaagaatgcaaaaagttctctaagaccttaggccttcgggtcgtgtgcgtgtacgggggtacagggatctccgagcagatcgctgagctgaaacggggagccgaaattattgtgtgcaccccaggcagaatgatagatatgctggcggctaactctggccgcgtcacaaatctgagaagggtgacctatgtggtgcttgacgaggctgatcggatgttcgacatgggtttcgagccacaagttatgcgcattgtcgacaatgtcaggcccgacagacagactgtgatgtttagtgcgaccttccccagggcaatggaagcccttgcacgccgcatcctctccaaaccaattgaggtgcaagtcggggggcggagtgtagtctgcagcgacgtggagcaacaagtaatcgtcatagaggaggaaaagaaatttctcaaactgcttgagctcctggggcactaccaggagagcggcagcgtgatcatcttcgtggacaaacaggaacacgccgacggactccttaaagaccttatgcgcgcatcatatccttgcatgtcactccacggtgggatagaccagtatgatagggattccattattaacgacttcaaaaacggcacttgtaaactccttgtagccaccagcgtcgccgctagaggtctggacgttaagcatctgattctggttgtcaactactcctgtcctaaccactacgaggactacgtgcacagggccggacgaactggtcgcgctggaaacaaggggtacgcatatacatttatcacagaagaccaggctcgttatgctggggatatcatcaaggctttggaacttagcggaaccgcagttccaccagacctagaaaagctgtggtccgatttcaaggaccagcagaaggccgaagggaaaataatcaaaaagagctccggatttagcggtaagggattcaaattcgacgagacggagcaggctcttgctaatgagaggaaaaagcttcaaaaagcggcgctcggactgcaagactctgacgatgaggatgccgccgtggatattgacgaacagatcgagtctatgttcaatagtaagaagcgcgttaaggacatggccgccccgggaaccagtagtgtacccgcccctactgccggcaacgctgaaaagctcgagatcgccaagcggctggccctgcggatcaacgcccaaaagaatctgggaattgagtcacaggatgtcatgcagcaagcgaccaacgcaattcttaggggcgggacgattttggcccccactgtctcggcgaaaacaattgccgagcagctcgccgagaagataaacgccaagcttaactatgtacccctagagaaacaggaggaggagagacaggatggcggccagaatgagagcttcaaacggtatgaggaggagttggagatcaatgactttcctcagaccgcccggtggaaagttacttctaaggaggcactccagcgcatcagtgagtatagcgaggccgctatcaccatcaggggcacatattttccacctgggaaagagcccaaggaaggggagcggaaaatatatctggccattgagtctgctaatgaactggcagtgcagaaggcaaaggcagaaatcacacgcctcatcaaagaggaacttattaggttacagaactcttaccagccaacaaacaaggggagatataaggtgctgtag

SEQ ID NO: 182517 - DNA, 3096 bp, Artificial Sequence
  derived and/or modified sequence
atgggtcgcgagagtcggcattataggaaaagatccgcgtcccgtgggaggtcgggcagtaggtccaggagccggagcccttcagacaagcggtcgaaaaggggagatgaccggcgaagccggagtcgcgatagggacaggaggagggagcgctcacgaagtcgtgacaagaggagatcaaggagcagggatcgaaagcgcctgagaagaagccgatcccgcgagagagacagaagccgtgaacggagaaggtcccgcagtcgggacaggaggcgcagccgcagtaggtctagagggagacgatctcggtcaagtagtcctggtaataaatcaaaaaagacagaaaatcggtctaggagcaaagagaagacagacggcggagagtcttcgaaggagaagaaaaaggacaaggatgataaggaagacgagaaagagaaggatgcaggtaacttcgaccaaaataagctggaagaggaaatgaggaagcgaaaagagagagtagagaagtggagagaagaacagcgcaagaaggccatggaaaacattggcgaactgaagaaggaaattgaagaaatgaagcagggcaaaaaatggtctctcgaagacgacgatgatgacgaagacgatccggctgaagctgagaaggaaggaaacgagatggagggtgaagagctcgatcccctggatgcttacatggaagaggtgaaggaagaggttaagaagttcaatatgcggtctgtgaagggcggtggaggaaacgagaagaaatctggacccaccgtgactaaagttgttactgtcgttacaacgaaaaaagcagtggtcgattcagacaaaaagaaaggggaattaatggagaatgaccaagacgccatggagtacagctctgaagaagaagaagtggacctccaaaccgcccttactggataccaaacaaagcagcgaaagttgcttgaaccagtggaccatggtaaaatcgagtacgaacccttcagaaaaaatttttacgtggaggtgcccgagctggcgaaaatgtctcaggaagaggttaatgtctttaggcttgagatggaagggatcacagtcaaaggcaaagggtgccctaagccaatcaagtcttgggtccagtgcggtatctcaatgaaaatattgaattctctgaagaaacatggatatgagaagccgacacctatacagactcaggcgattcctgcaatcatgagtggcagggatcttatcgggattgccaagacaggcagcgggaaaaccatcgcattcctactgcctatgtttagacacatcatggaccagcgctctctggaggagggagaaggcccaattgccgtgataatgacacctactcgagagctggccttgcagatcacgaaggaatgtaaaaagtttagtaagacattgggtctgcgagttgtctgcgtctacggcggtacaggcatttccgaacaaatcgcagagcttaagcgaggggctgaaatcatcgtatgcacacccggacggatgattgatatgctggctgccaattccggacgtgtcacaaacctgcgtcgagtgacctacgtggtgctcgatgaggcagacagaatgttcgatatgggattcgagccccaggtcatgagaattgtggataatgtgagaccagaccgtcagaccgtgatgttttcagccacgttcccaagagctatggaggccctcgcgaggaggatcttaagcaagcccattgaggtgcaggtagggggacggagtgtggtgtgctccgacgtagagcagcaggttatcgtaatcgaggaggagaagaaatttctgaagttgctagaattactgggccactatcaggaatcgggttcagtcattatcttcgtagataagcaggaacacgccgatggcctccttaaggacctgatgagggcctcctacccatgtatgtctcttcacgggggaatcgaccaatatgatagggattcaatcattaacgattttaagaacggaacctgcaagttgttggtcgccacatcagtggcagcgagaggactggacgtgaaacatctcattctggtggtgaactactcatgcccaaatcactatgaggactacgtccatagggccggaaggaccggaagagccggtaacaagggctacgcctatactttcatcacggaagatcaggccaggtatgccggagatatcattaaagccctggaactgtcaggcactgcagtccccccagacctggagaaactttggagcgactttaaggatcagcagaaggccgagggaaagataatcaagaagagttcaggatttagcggaaaaggcttcaaattcgacgagaccgagcaggctctcgccaacgagaggaaaaaactccagaaggccgcactggggctgcaggacagcgatgatgaggatgccgcagtagatatcgatgaacaaatcgaaagtatgttcaattcaaaaaaaagagtcaaggacatggccgcacccggtacctcgtcggtacccgctcccactgccggaaatgcagagaaactggaaattgccaagagacttgcactacgaattaatgctcagaagaacctcggcattgagtcccaagatgtgatgcaacaagccacaaacgctatcctcagaggtggcaccattctcgctcccacagtgtccgccaagaccatcgctgaacaattggccgagaagattaatgccaagctgaattatgtcccattggagaagcaagaagaggaacgccaagacggcggacagaacgagtccttcaaaagatacgaagaggaactggagatcaacgacttcccgcagactgcacgctggaaagtgactagcaaggaggccctgcagagaatcagcgagtattcagaggcagccattactatccgcggaacatattttccacctggaaaggagccgaaagagggtgagcggaaaatctatctcgccatagaatcagccaacgagctcgccgtccagaaagccaaagccgagattactcgattaattaaagaagaacttattcgcctacagaattcttaccagccgaccaacaaaggcaggtacaaggtgctttag

SEQ ID NO: 182518 - DNA, 3821 bp, Artificial Sequence
  derived and/or modified sequence
ggccgccacagctgtaggtgctgctagtgtttagcgctggtctttgccgggcgttgagggcagctcagcctccttgtttgtccggttcgcctgtgcgtggtactcaagggcaccagtattcccgcggtcggcagcatgggtcgggagtcacgccactatcgaaaacgatcggcatcccggggtcgctctggaagtcggtctagaagtcgctcaccctcagacaaaagaagtaaacgtggagatgacagacggtctagaagtagagatagagataggaggagagagaggtctcgtagcagggataaaagaagatctcggtcaagggacaggaagcgtctgagacgttccagaagtagagagagagacagaagccgagagcgaagaagatctcgaagtagagacaggagacgctcaaggagtagaagccggggccggcgatcccgatcctccagtcctggaaataaaagcaagaaaactgagaatagatctaggtccaaagagaaaactgatggtggggaaagttctaaagagaagaaaaaagacaaagatgacaaggaggatgaaaaagaaaaagatgctggcaactttgaccagaataagctggaagaagaaatgagaaagcgaaaagaaagagtagaaaaatggcgagaagagcaacgtaaaaaggctatggaaaacataggagaactgaaaaaggaaatcgaagagatgaaacaagggaaaaagtggagtttagaggacgatgatgatgacgaagatgatcctgcagaagctgaaaaggagggaaatgaaatggagggtgaggagttagatccattagatgcttacatggaagaagtgaaagaggaagtaaaaaaatttaacatgagaagtgtaaaaggtggtgggggaaatgaaaagaagtctgggccaacggtcacaaaagttgtcactgttgtgacaaccaaaaaagcagttgtggattctgataagaagaaaggtgagctgatggagaatgaccaggatgccatggagtattcttcagaggaggaagaagttgatcttcagacagcccttacagggtatcaaacaaaacagcgaaagcttctagaaccagttgatcatggaaaaattgagtatgagccatttaggaaaaacttctatgttgaagttccagaactagcaaaaatgtctcaagaagaggtaaatgtgtttcgattggaaatggagggcattacagttaaaggaaaaggttgccccaaaccaattaaatcctgggtccagtgtggaatttccatgaagatcttaaattccctcaagaagcatggctatgaaaagcccacgcccatccaaacccaagctattcctgctataatgtctggacgagatttgattggcattgccaaaacaggaagtggaaagaccattgcttttctgttgcccatgtttagacacatcatggatcagaggtcattagaggaaggagaggggccaatagctgtcatcatgactccaactcgagaactggctttacagattactaaagagtgtaagaagttttccaagactttgggacttagagtggtctgtgtttacggaggaacaggaatcagtgagcagattgctgagctgaaaagaggtgctgaaattattgtttgcacacctggtcgaatgattgacatgttagccgctaacagtggtcgggtcacaaatcttcgaagagtgacatatgttgttttagatgaagcagacagaatgtttgacatgggttttgaaccccaggtcatgcgcatcgtggataatgttcgtcctgatcgacagacggttatgttttcagctactttccccagagctatggaggctttggctcgcaggatcctcagtaaacctattgaagtacaagttggaggcaggagtgtggtttgctcagatgtggagcaacaagtgattgtgattgaagaagaaaagaaattcttgaagttacttgagcttctaggccattatcaagagtcaggatctgtcattatatttgtggataagcaggaacatgctgatggtcttcttaaggatttaatgagagcatcttatccttgcatgtctcttcatggaggcattgatcaatatgacagagatagcatcataaatgactttaagaatgggacctgcaaacttcttgtggctacctctgttgctgcccgaggtctagatgtgaaacatctgattcttgtagtaaattatagctgccccaaccattatgaggattatgtacacagagcagggcggactggaagagcaggaaacaagggttatgcttatacttttatcacagaggatcaagctcgctatgctggtgacataattaaagctcttgaattgtcagggactgcagtacctcctgatttagagaaactgtggagtgatttcaaagatcagcagaaagctgaggggaaaataattaaaaagagtagtgggttctctggtaagggattcaagtttgatgaaacagaacaagctttggctaatgagaggaagaagttacaaaaagcagctcttggtctacaagattcagatgatgaggatgctgcagttgatattgatgagcaaattgaaagcatgtttaattcaaagaagagagtaaaggatatggctgctcctggaacatcaagtgttcctgctccaactgcaggaaatgctgagaaattagaaattgctaagagattggctcttagaatcaatgcccagaagaatttgggcatcgagtctcaggatgtgatgcagcaggccaccaatgcaattcttaggggtggcaccattctggctcccactgtttctgcaaaaaccattgcagaacaacttgctgaaaagatcaatgccaagctcaattatgtgccgttagagaaacaagaagaagagagacaggatggtggacagaatgaatcttttaagagatatgaagaagaattagagatcaatgacttcccacagactgctaggtggaaagttacctctaaggaagctctgcagagaatcagtgaatactctgaagccgcaattacaatcagaggaacctacttccctcctggcaaagaacccaaggaaggcgagcggaagatttacttggcaattgaaagtgccaatgaactggctgtgcagaaagcaaaggcagaaatcaccaggctcataaaagaagagctgatccggctgcaaaattcataccaaccaacaaataaaggaagatacaaagtcttatagacatccggaaaaaagatttttacctgtgctggtctatgatgtatgtggcagttgctgtctgcagtttacaatgtattgtaaatgaagattttttaaattctatcttgctgattttttttaaatataagaaactggtacttggtaaagaaatctgtccgtaagtacccccacaatcagtcaaactatatttaaagccagcctgttttcagagtatgatgtcctttaatgtaaactcaaatatcaatattttaaatgtccggataatattctagaggtttaaaaaatggaaatatttgaactttctattgaagacaataaagtacacaagtcgttaaggggctattcactttatcctgtactttcaatgaaattgtgatcatttcctaagaaaaggtaaaattcactatcatattttgtgtccccaccttgatgttacatgactctggaacaatatgaactggatttaagaatgttataatagaagtcttacaaaatgggttgagagtttttgtttcaatttttatcatcataaatgggcaaaaagtagttggactaatttcggtttttatacaagtaaagatttaatagta

SEQ ID NO: 182519 - DNA, 3096 bp, Artificial Sequence
  derived and/or modified sequence
atgggcagagagagcagacactacagaaagagaagcgccagcagaggcagaagcggcagcagaagcagaagcagaagccccagcgacaagagaagcaagagaggcgacgacagaagaagcagaagcagagacagagacagaagaagagagagaagcagaagcagagacaagagaagaagcagaagcagagacagaaagagactgagaagaagcagaagcagagagagagacagaagcagagagagaagaagaagcagaagcagagacagaagaagaagcagaagcagaagcagaggcagaagaagcagaagcagcagccccggcaacaagagcaagaagaccgagaacagaagcagaagcaaggagaagaccgacggcggcgagagcagcaaggagaagaagaaggacaaggacgacaaggaggacgagaaggagaaggacgccggcaacttcgaccagaacaagctggaggaggagatgagaaagagaaaggagagagtggagaagtggagagaggagcagagaaagaaggccatggagaacatcggcgagctgaagaaggagatcgaggagatgaagcagggcaagaagtggagcctggaggacgacgacgacgacgaggacgaccccgccgaggccgagaaggagggcaacgagatggagggcgaggagctggaccccctggacgcctacatggaggaggtgaaggaggaggtgaagaagttcaacatgagaagcgtgaagggcggcggcggcaacgagaagaagagcggccccaccgtgaccaaggtggtgaccgtggtgaccaccaagaaggccgtggtggacagcgacaagaagaagggcgagctgatggagaacgaccaggacgccatggagtacagcagcgaggaggaggaggtggacctgcagaccgccctgaccggctaccagaccaagcagagaaagctgctggagcccgtggaccacggcaagatcgagtacgagcccttcagaaagaacttctacgtggaggtgcccgagctggccaagatgagccaggaggaggtgaacgtgttcagactggagatggagggcatcaccgtgaagggcaagggctgccccaagcccatcaagagctgggtgcagtgcggcatcagcatgaagatcctgaacagcctgaagaagcacggctacgagaagcccacccccatccagacccaggccatccccgccatcatgagcggcagagacctgatcggcatcgccaagaccggcagcggcaagaccatcgccttcctgctgcccatgttcagacacatcatggaccagagaagcctggaggagggcgagggccccatcgccgtgatcatgacccccaccagagagctggccctgcagatcaccaaggagtgcaagaagttcagcaagaccctgggcctgagagtggtgtgcgtgtacggcggcaccggcatcagcgagcagatcgccgagctgaagagaggcgccgagatcatcgtgtgcacccccggcagaatgatcgacatgctggccgccaacagcggcagagtgaccaacctgagaagagtgacctacgtggtgctggacgaggccgacagaatgttcgacatgggcttcgagccccaggtgatgagaatcgtggacaacgtgagacccgacagacagaccgtgatgttcagcgccaccttccccagagccatggaggccctggccagaagaatcctgagcaagcccatcgaggtgcaggtgggcggcagaagcgtggtgtgcagcgacgtggagcagcaggtgatcgtgatcgaggaggagaagaagttcctgaagctgctggagctgctgggccactaccaggagagcggcagcgtgatcatcttcgtggacaagcaggagcacgccgacggcctgctgaaggacctgatgagagccagctacccctgcatgagcctgcacggcggcatcgaccagtacgacagagacagcatcatcaacgacttcaagaacggcacctgcaagctgctggtggccaccagcgtggccgccagaggcctggacgtgaagcacctgatcctggtggtgaactacagctgccccaaccactacgaggactacgtgcacagagccggcagaaccggcagagccggcaacaagggctacgcctacaccttcatcaccgaggaccaggccagatacgccggcgacatcatcaaggccctggagctgagcggcaccgccgtgccccccgacctggagaagctgtggagcgacttcaaggaccagcagaaggccgagggcaagatcatcaagaagagcagcggcttcagcggcaagggcttcaagttcgacgagaccgagcaggccctggccaacgagagaaagaagctgcagaaggccgccctgggcctgcaggacagcgacgacgaggacgccgccgtggacatcgacgagcagatcgagagcatgttcaacagcaagaagagagtgaaggacatggccgcccccggcaccagcagcgtgcccgcccccaccgccggcaacgccgagaagctggagatcgccaagagactggccctgagaatcaacgcccagaagaacctgggcatcgagagccaggacgtgatgcagcaggccaccaacgccatcctgagaggcggcaccatcctggcccccaccgtgagcgccaagaccatcgccgagcagctggccgagaagatcaacgccaagctgaactacgtgcccctggagaagcaggaggaggagagacaggacggcggccagaacgagagcttcaagagatacgaggaggagctggagatcaacgacttcccccagaccgccagatggaaggtgaccagcaaggaggccctgcagagaatcagcgagtacagcgaggccgccatcaccatcagaggcacctacttcccccccggcaaggagcccaaggagggcgagagaaagatctacctggccatcgagagcgccaacgagctggccgtgcagaaggccaaggccgagatcaccagactgatcaaggaggagctgatcagactgcagaacagctaccagcccaccaacaagggcagatacaaggtgctgtag

SEQ ID NO: 182520 - protein, 1298 aa, Artificial Sequence
  derived and/or modified sequence
MEPPSCIQDEPFPHPLEPEPGVSAQPGPGKPSDKRFRLWYVGGSCLDHRTTLPMLPWLMAEIRRRSQKPEAGGCGAPAAREVILVLSAPFLRCVPAPGAGASGGTSPSATQPNPAVFIFEHKAQHISRFIHNSHDLTYFAYLIKAQPDDPESQMACHVFRATDPSQVPDVISSIRQLSKAAMKEDAKPSKDNEDAFYNSQKFEVLYCGKVTVTHKKAPSSLIDDCMEKFSLHEQQRLKIQGEQRGPDPGEDLADLEVVVPGSPGDCLPEEADGTDTHLGLPAGASQPALTSSRVCFPERILEDSGFDEQQEFRSRCSSVTGVQRRVHEGSQKSQPRRRHASAPSHVQPSDSEKNRTMLFQVGRFEINLISPDTKSVVLEKNFKDISSCSQGIKHVDHFGFICRESPEPGLSQYICYVFQCASESLVDEVMLTLKQAFSTAAALQSAKTQIKLCEACPMHSLHKLCERIEGLYPPRAKLVIQRHLSSLTDNEQADIFERVQKMKPVSDQEENELVILHLRQLCEAKQKTHVHIGEGPSTISNSTIPENATSSGRFKLDILKNKAKRSLTSSLENIFSRGANRMRGRLGSVDSFERSNSLASEKDYSPGDSPPGTPPASPPSSAWQTFPEEDSDSPQFRRRAHTFSHPPSSTKRKLNLQDGRAQGVRSPLLRQSSSEQCSNLSSVRRMYKESNSSSSLPSLHTSFSAPSFTAPSFLKSFYQNSGRLSPQYENEIRQDTASESSDGEGRKRTSSTCSNESLSVGGTSVTPRRISWRQRIFLRVASPMNKSPSAMQQQDGLDRNELLPLSPLSPTMEEEPLVVFLSGEDDPEKIEERKKSKELRSLWRKAIHQQILLLRMEKENQKLEASRDELQSRKVKLDYEEVGACQKEVLITWDKKLLNCRAKIRCDMEDIHTLLKEGVPKSRRGEIWQFLALQYRLRHRLPNKQQPPDISYKELLKQLTAQQHAILVDLGRTFPTHPYFSVQLGPGQLSLFNLLKAYSLLDKEVGYCQGISFVAGVLLLHMSEEQAFEMLKFLMYDLGFRKQYRPDMMSLQIQMYQLSRLLHDYHRDLYNHLEENEISPSLYAAPWFLTLFASQFSLGFVARVFDIIFLQGTEVIFKVALSLLSSQETLIMECESFENIVEFLKNTLPDMNTSEMEKIITQVFEMDISKQLHAYEVEYHVLQDELQESSYSCEDSETLEKLERANSQLKRQNMDLLEKLQVAHTKIQALESNLENLLTRETKMKSLIRTLEQEKMAYQKTVEQLRKLLPADALVNCDLLLRDLNCNPNNKAKIGNKP

SEQ ID NO: 182521 - DNA, 3897 bp, Artificial Sequence
  derived and/or modified sequence
atggagccccccagctgcatccaggacgagcccttcccccaccccctggagcccgagcccggcgtgagcgcccagcccggccccggcaagcccagcgacaagagattcagactgtggtacgtgggcggcagctgcctggaccacagaaccaccctgcccatgctgccctggctgatggccgagatcagaagaagaagccagaagcccgaggccggcggctgcggcgcccccgccgccagagaggtgatcctggtgctgagcgcccccttcctgagatgcgtgcccgcccccggcgccggcgccagcggcggcaccagccccagcgccacccagcccaaccccgccgtgttcatcttcgagcacaaggcccagcacatcagcagattcatccacaacagccacgacctgacctacttcgcctacctgatcaaggcccagcccgacgaccccgagagccagatggcctgccacgtgttcagagccaccgaccccagccaggtgcccgacgtgatcagcagcatcagacagctgagcaaggccgccatgaaggaggacgccaagcccagcaaggacaacgaggacgccttctacaacagccagaagttcgaggtgctgtactgcggcaaggtgaccgtgacccacaagaaggcccccagcagcctgatcgacgactgcatggagaagttcagcctgcacgagcagcagagactgaagatccagggcgagcagagaggccccgaccccggcgaggacctggccgacctggaggtggtggtgcccggcagccccggcgactgcctgcccgaggaggccgacggcaccgacacccacctgggcctgcccgccggcgccagccagcccgccctgaccagcagcagagtgtgcttccccgagagaatcctggaggacagcggcttcgacgagcagcaggagttcagaagcagatgcagcagcgtgaccggcgtgcagagaagagtgcacgagggcagccagaagagccagcccagaagaagacacgccagcgcccccagccacgtgcagcccagcgacagcgagaagaacagaaccatgctgttccaggtgggcagattcgagatcaacctgatcagccccgacaccaagagcgtggtgctggagaagaacttcaaggacatcagcagctgcagccagggcatcaagcacgtggaccacttcggcttcatctgcagagagagccccgagcccggcctgagccagtacatctgctacgtgttccagtgcgccagcgagagcctggtggacgaggtgatgctgaccctgaagcaggccttcagcaccgccgccgccctgcagagcgccaagacccagatcaagctgtgcgaggcctgccccatgcacagcctgcacaagctgtgcgagagaatcgagggcctgtacccccccagagccaagctggtgatccagagacacctgagcagcctgaccgacaacgagcaggccgacatcttcgagagagtgcagaagatgaagcccgtgagcgaccaggaggagaacgagctggtgatcctgcacctgagacagctgtgcgaggccaagcagaagacccacgtgcacatcggcgagggccccagcaccatcagcaacagcaccatccccgagaacgccaccagcagcggcagattcaagctggacatcctgaagaacaaggccaagagaagcctgaccagcagcctggagaacatcttcagcagaggcgccaacagaatgagaggcagactgggcagcgtggacagcttcgagagaagcaacagcctggccagcgagaaggactacagccccggcgacagcccccccggcaccccccccgccagcccccccagcagcgcctggcagaccttccccgaggaggacagcgacagcccccagttcagaagaagagcccacaccttcagccacccccccagcagcaccaagagaaagctgaacctgcaggacggcagagcccagggcgtgagaagccccctgctgagacagagcagcagcgagcagtgcagcaacctgagcagcgtgagaagaatgtacaaggagagcaacagcagcagcagcctgcccagcctgcacaccagcttcagcgcccccagcttcaccgcccccagcttcctgaagagcttctaccagaacagcggcagactgagcccccagtacgagaacgagatcagacaggacaccgccagcgagagcagcgacggcgagggcagaaagagaaccagcagcacctgcagcaacgagagcctgagcgtgggcggcaccagcgtgacccccagaagaatcagctggagacagagaatcttcctgagagtggccagccccatgaacaagagccccagcgccatgcagcagcaggacggcctggacagaaacgagctgctgcccctgagccccctgagccccaccatggaggaggagcccctggtggtgttcctgagcggcgaggacgaccccgagaagatcgaggagagaaagaagagcaaggagctgagaagcctgtggagaaaggccatccaccagcagatcctgctgctgagaatggagaaggagaaccagaagctggaggccagcagagacgagctgcagagcagaaaggtgaagctggactacgaggaggtgggcgcctgccagaaggaggtgctgatcacctgggacaagaagctgctgaactgcagagccaagatcagatgcgacatggaggacatccacaccctgctgaaggagggcgtgcccaagagcagaagaggcgagatctggcagttcctggccctgcagtacagactgagacacagactgcccaacaagcagcagccccccgacatcagctacaaggagctgctgaagcagctgaccgcccagcagcacgccatcctggtggacctgggcagaaccttccccacccacccctacttcagcgtgcagctgggccccggccagctgagcctgttcaacctgctgaaggcctacagcctgctggacaaggaggtgggctactgccagggcatcagcttcgtggccggcgtgctgctgctgcacatgagcgaggagcaggccttcgagatgctgaagttcctgatgtacgacctgggcttcagaaagcagtacagacccgacatgatgagcctgcagatccagatgtaccagctgagcagactgctgcacgactaccacagagacctgtacaaccacctggaggagaacgagatcagccccagcctgtacgccgccccctggttcctgaccctgttcgccagccagttcagcctgggcttcgtggccagagtgttcgacatcatcttcctgcagggcaccgaggtgatcttcaaggtggccctgagcctgctgagcagccaggagaccctgatcatggagtgcgagagcttcgagaacatcgtggagttcctgaagaacaccctgcccgacatgaacaccagcgagatggagaagatcatcacccaggtgttcgagatggacatcagcaagcagctgcacgcctacgaggtggagtaccacgtgctgcaggacgagctgcaggagagcagctacagctgcgaggacagcgagaccctggagaagctggagagagccaacagccagctgaagagacagaacatggacctgctggagaagctgcaggtggcccacaccaagatccaggccctggagagcaacctggagaacctgctgaccagagagaccaagatgaagagcctgatcagaaccctggagcaggagaagatggcctaccagaagaccgtggagcagctgagaaagctgctgcccgccgacgccctggtgaactgcgacctgctgctgagagacctgaactgcaaccccaacaacaaggccaagatcggcaacaagccctag

SEQ ID NO: 182522 - DNA, 3897 bp, Artificial Sequence
  derived and/or modified sequence
atggagccaccatcttgtattcaggacgagccgttccctcatccactggagccagaaccaggcgtgtcagctcagccagggcctgggaagccatcggataaaagatttcgtctctggtacgtcggcggctcctgtctggatcatcggacaacactaccaatgctgccctggctgatggccgagatcaggcggcgctcccagaaacctgaagctggcggctgcggtgcgccagctgcccgggaggtgatcctagtcttgagcgccccatttctcaggtgtgtaccagcgcctggagccggcgcctccggcggtacttctccgtccgcaacgcagccaaacccagctgtcttcatatttgaacacaaagcgcaacacatcagcagattcatccacaattctcatgatcttacgtactttgcttatctgatcaaggcacaaccagacgatccagagtcccagatggcctgccacgtcttccgagcaacagacccttcacaggttcccgacgtcattagtagtatccgccagctgagcaaagccgccatgaaggaggatgcaaagccttccaaggataatgaggacgccttctacaacagccagaaattcgaggtgctatactgcggaaaggtgactgtcacacacaagaaggccccgtctagtttaatcgacgactgtatggagaaattctccctgcatgaacagcagagactgaagatccagggagagcagagaggtccagaccctggtgaagatctcgcagatctagaggtggtcgtccccgggagccctggtgactgtctcccagaggaagctgacggtactgacacacatttgggtttgcctgcaggagcttcccagcctgcactgacatcttcacgcgtgtgcttcccagagcggatccttgaagacagcggatttgacgaacaacaagagtttcggagccgctgctctagtgtgaccggcgtccagaggcgcgttcatgaaggttcgcaaaagtcccagccccgacggcgccacgcttccgctccaagccatgtgcaacccagcgactccgaaaaaaaccggactatgttgttccaggtggggcggtttgaaataaatctgatttcaccggataccaaatctgttgtccttgaaaagaactttaaagacatcagcagctgtagccaagggataaagcacgtggaccactttggctttatctgtcgtgagagtccagagcccggcctgtctcagtacatttgctacgttttccaatgcgcctcagaatcattggtggacgaggtcatgctcacactgaaacaggctttctcaacagcagccgctctccaatctgcaaagacacaaatcaaattgtgtgaagcgtgcccaatgcattctctgcacaagctgtgtgagagaatcgaaggactgtatcctcctcgagctaagctggtgattcagcgacacctatcctcccttactgacaacgagcaggccgacatctttgaaagagtgcaaaaaatgaagcctgtgagtgatcaagaagaaaacgaattagtgatattgcatttgagacaattatgtgaagccaaacaaaaaactcatgttcacattggcgaggggccttcgacgataagcaacagtaccatcccagaaaatgccacctcatctgggcggtttaagcttgacatactgaaaaacaaggctaagaggtcacttacttcatccctggagaacatattttctaggggcgccaaccgaatgagaggccggctggggtccgtggatagcttcgaaaggtcgaatagcctggccagcgagaaagattattctcccggagactcgcctccagggacgccacctgcttctcctccttcctccgcctggcaaaccttccccgaagaggactcagacagccctcaattccgacgaagggcacacaccttctcacatcccccatcttctactaagcggaagctaaatctgcaggatggacgcgcacaaggagttagatctccactcctcagacagagcagcagcgaacaatgtagtaacctctcaagcgtgaggcgaatgtacaaagaatctaacagtagctcttcacttcccagtttgcacacatcgttttcagccccatcatttacagcaccctcttttttgaaatctttttatcaaaattcaggcaggttatccccgcagtatgagaatgagattcgccaggacacggcatctgagtcttccgacggagagggccgtaaaagaacttcatccacctgcagcaatgaatctttgtcggtcggcggcacctctgtgacacctcgtcggatctcttggcgccaacgcatctttctccgagtggcgtccccaatgaataagagcccgtcagcaatgcagcagcaggacggattggatcggaatgaattgctgccacttagtccgctttcccccactatggaggaagaacccctcgttgtgttcctaagcggcgaagatgatccggaaaagatagaagagaggaagaagtcaaaggagctgcggagtctgtggcgtaaggctatccaccagcaaattctacttttgcgaatggaaaaggagaaccagaaactcgaggctagcagagacgaactgcaaagcagaaaagtgaaactcgactacgaggaggtgggtgcttgtcaaaaggaggtgctcatcacatgggataagaaactgttaaattgtcgtgcaaaaataagatgtgatatggaggacatccatacactgctcaaggagggagttccgaagtctcgaaggggcgagatctggcaatttctcgccctgcagtaccgtctgcggcaccgcctgcccaataagcagcaaccaccagacatttcgtataaggaactactaaagcagctgaccgctcaacaacacgccatcctcgtggatttaggtcgcacgttccctacacacccctatttcagtgtgcagctcggccctggccagttgtctctgttcaatttgctgaaggcctactccctcctggataaggaggtcggctactgtcaggggatcagcttcgtggcgggagtccttttgctccatatgtctgaggaacaggcgttcgagatgctaaaattcttgatgtacgatctgggattcaggaagcagtacaggcctgatatgatgagcttacagatccagatgtaccagctgtcgcggctgcttcatgactatcatcgagatttatataatcacctggaggaaaacgaaattagcccatcattgtacgctgcaccatggttccttaccctcttcgcttcacaattttctttgggtttcgtggctcgggtctttgacattatcttcctccaaggaactgaggtgattttcaaggtagccctctctctcttatccagccaggagaccctgattatggagtgcgagtcatttgaaaacattgtggagttcctgaagaatactttgcccgatatgaataccagtgagatggagaagattatcacccaggtctttgaaatggacatatcaaagcagttgcacgcatatgaagtcgagtatcacgtgttacaagacgagctgcaggaatcctcttattcctgcgaagatagtgagaccctggagaagctggagagagccaattcccagttgaagcggcagaatatggacctgctggaaaaactgcaggtggctcacactaagattcaagctcttgagtcaaacctagagaatctcctgaccagagagacaaaaatgaaatcacttattcgaaccctggagcaagaaaagatggcctaccagaagacggtcgagcagctacggaaactgcttcccgccgatgcactcgtgaactgcgaccttttattgcgcgacttaaactgtaatccaaacaacaaggcgaagattggcaacaaaccttag

SEQ ID NO: 182523 - DNA, 3897 bp, Artificial Sequence
  derived and/or modified sequence
atggagccccccagctgcatccaggatgagcccttcccccaccccctggagcctgagcccggggtgtctgcccagcccggccctgggaagcccagcgacaagcgcttccggctgtggtacgtgggcggcagctgcctggaccacaggaccaccctgcccatgctgccctggctgatggccgagatcagaagaagaagccagaagccagaggccggcggctgtggggccccagctgcccgggaggtgatcctggtgctgagcgcccccttcctgcgctgtgtgcctgcccctggagctggggccagcggcggcaccagccccagcgccacccagcccaacccagctgtgttcatctttgagcacaaggcccagcacatcagccgcttcatccacaacagccatgacctgacctactttgcctacctgatcaaggcccagccagatgatcctgagagccagatggcctgccacgtgttccgggccacagaccccagccaggtgcctgatgtgatcagcagcatccggcagctgagcaaggccgccatgaaggaggatgccaagcccagcaaggacaatgaagatgccttctacaacagccagaagtttgaggtgctgtactgcggcaaggtgacagtgacccacaagaaggcccccagcagcctgattgatgactgcatggagaagttcagcctgcacgagcagcagaggctgaagatccagggcgagcagaggggccctgaccccggggaggacctggccgacctggaggtggtggtgcccggcagccctggggactgcctgcctgaggaggctgatggaacagacacccacctgggcctgcctgctggggccagccagcctgccctgaccagcagccgggtgtgcttccctgagcgcatcctggaggacagcggctttgatgagcagcaggagttccgcagccgctgcagctctgtgactggagtgcagaggagagtgcatgagggcagccagaagagccagcccaggagaagacatgccagcgcccccagccacgtgcagcccagcgacagcgagaagaacagaaccatgctgttccaggtgggccgctttgagatcaacctgatcagcccagacaccaagtctgtggtgctggagaagaacttcaaggacatcagcagctgcagccagggcatcaagcacgtggaccacttcggcttcatctgccgggagagccctgagcccggcctgagccagtacatctgctacgtgttccagtgtgccagcgagagcctggtggatgaggtgatgctgaccctgaagcaggccttcagcacagctgctgccctgcagagcgccaagacccagatcaagctgtgtgaggcctgccccatgcacagcctgcacaagctgtgtgagcgcatcgagggcctgtacccaccccgggccaagctggtgatccagaggcacctgagcagcctgacagacaatgagcaggccgacatctttgagcgggtgcagaagatgaagcctgtgtctgaccaggaggagaatgagctggtgatcctgcacctgcggcagctgtgtgaggccaagcagaagacccacgtgcacatcggggagggccccagcaccatcagcaacagcaccatcccagaaaatgccaccagcagcggccgcttcaagctggacatcctgaagaacaaggccaagaggagcctgaccagcagcctggagaacatcttcagcagaggagccaacaggatgaggggccgcctgggctctgtggacagctttgagaggagcaacagcctggccagcgagaaggactacagccctggggacagccccccaggcaccccaccagccagcccccccagcagcgcctggcagaccttcccagaagaagattctgacagcccccagttcagaagaagagcccacaccttcagccacccccccagcagcaccaagaggaagctgaacctgcaggacggccgggcccagggcgtgcgcagccccctgctgcggcagagcagcagcgagcagtgcagcaacctgagctctgtgcggaggatgtacaaggagagcaacagcagcagcagcctgcccagcctgcacaccagcttcagcgcccccagcttcaccgcccccagcttcctgaagagcttctaccagaacagcggccgcctgagcccccagtatgaaaatgagatccggcaggacacagccagcgagagcagtgatggagagggcaggaagaggaccagcagcacctgcagcaatgaaagcctgtctgtgggcggcacctctgtgaccccccggcgcatctcctggaggcagaggatcttcctgcgggtggccagccccatgaacaagagccccagcgccatgcagcagcaggacggcctggacagaaatgagctgctgcccctgagccccctgagccccaccatggaggaggagcccctggtggtgttcctgagcggggaggatgatcctgagaagattgaggagaggaagaagagcaaggagctgcggagcctgtggaggaaggccatccaccagcagatcctgctgctgaggatggagaaggagaaccagaagctggaggccagcagagatgagctgcagagcaggaaggtgaagctggactatgaggaggtgggcgcctgccagaaggaggtgctgatcacctgggacaagaagctgctgaactgccgggccaagatccgctgtgacatggaggacatccacaccctgctgaaggagggcgtgcccaagagcagaagaggagagatctggcagttcctggccctgcagtaccgcctgcggcaccggctgcccaacaagcagcagcccccagacatctcctacaaggagctgctgaagcagctgacagcccagcagcacgccatcctggtggacctgggccgcaccttccccacccacccctacttctctgtgcagctgggccctggccagctgagcctcttcaacctgctgaaggcctacagcctgctggacaaggaggtgggctactgccagggcatcagctttgtggccggcgtgctgctgctgcacatgtctgaggagcaggcctttgagatgctgaagttcctgatgtatgacctgggcttcaggaagcagtacagaccagacatgatgagcctgcagatccagatgtaccagctgagccggctgctgcatgactaccaccgggacctgtacaaccacctggaggagaatgagatcagccccagcctgtatgctgccccctggttcctgaccctgtttgccagccagttcagcctgggctttgtggcccgggtgtttgacatcatcttcctgcagggcacagaggtgatcttcaaggtggccctgagcctgctgagcagccaggagaccctcatcatggagtgtgagagctttgagaacatcgtggagttcctgaagaacaccctgcctgacatgaacaccagcgagatggagaagatcatcacccaggtgtttgagatggacatcagcaagcagctgcacgcctatgaggtggagtaccacgtgctgcaggatgagctgcaggagagcagctacagctgtgaggacagcgagaccctggagaagctggagcgggccaacagccagctgaagaggcagaacatggacctgctggagaagctgcaggtggcccacaccaagatccaggccctggagagcaacctggagaacctgctgacccgggagaccaagatgaagagcctcatccgcaccctggagcaggagaagatggcctaccagaagacagtggagcagctgaggaagctgctgcctgcagatgccctggtgaactgtgacctgctgctgcgggacctgaactgcaaccccaacaacaaggccaagattggcaacaagccctag

SEQ ID NO: 182524 - DNA, 3897 bp, Artificial Sequence
  derived and/or modified sequence
atggagccccccagctgcatccaggacgagcccttcccccaccccctggagccagagccaggggtctcagcacagccaggccctggtaaaccgtcagacaagaggtttcgcctgtggtacgttggagggtcttgcttggaccacagaaccactttgccgatgctcccttggttaatggcagagattcggaggagaagccagaagcccgaggctggcgggtgtggtgctcctgcggctcgcgaggtcatcctcgtgttatctgcacccttcctgcggtgtgtgcccgcaccaggcgccggtgctagcgggggtacaagtcctagcgctacccagcccaatccagccgttttcattttcgagcacaaggctcagcacatcagccgcttcattcacaatagtcacgacctgacatacttcgcttacctgatcaaggctcaacccgatgatccagaatctcaaatggcctgtcatgtgtttcgtgccactgacccctcccaagtacccgatgttattagctctatcagacagttgtcgaaggcagccatgaaggaggatgccaagcccagtaaagacaacgaagacgccttctacaattcccagaaattcgaagttctgtactgtggcaaagtcacagtgacgcacaaaaaggcccctagctcacttattgatgattgcatggaaaagttcagtctgcacgaacagcagcgattaaaaattcagggagagcaacggggtccagaccctggtgaggacctggcagatttggaagtggttgttcccggatctccaggtgattgtctgcctgaagaggcagacgggactgatacccatcttggcttgccggctggtgcatctcaacctgcactgacttcctcgcgtgtgtgtttccctgaacgcatcctggaggactctggatttgatgaacagcaggaattccggtccaggtgcagttcagtgacaggcgtgcagaggcgggtgcacgagggctcacagaaaagtcaaccacgacggagacacgcgagtgccccttcccatgtccagcccagcgacagcgagaaaaaccggacaatgctatttcaggtggggcgtttcgaaattaacctgataagtccggacactaaatctgtggttttggagaaaaatttcaaggacatttccagctgttcacaaggaatcaagcatgtggatcacttcggattcatttgtcgtgagtcacctgagcccggcttgagtcagtacatttgctatgtattccagtgcgctagcgaaagcttggtggacgaggtgatgctgacgctgaagcaagcattctccactgcagctgccctgcagagtgccaagactcagattaaactttgtgaagcgtgcccaatgcactccctacataagctgtgtgagcgcatcgagggactctatccacctagagcaaagctcgtgattcagagacacctgagttcactaactgacaatgaacaggcagatatttttgagagagtgcaaaaaatgaagccagtttcggaccaggaggagaacgaattggtcatcttgcacctgaggcagctgtgtgaggcaaaacagaagacgcacgtccacattggcgagggccctagtacaatcagcaatagcacaatccctgaaaacgccacatcatctggacgtttcaaactggatatcttgaagaataaggccaaaagaagcctgacttcttcacttgaaaacatttttagtcggggagctaacagaatgcgtggtcgcctgggcagcgtggacagttttgaacgctcaaattctctggcgtctgagaaagattattcccctggggactcaccccccggaacaccaccagcaagcccacctagttcagcctggcagacgtttcctgaggaagattctgattcaccacagttccggcggagagcacacaccttcagccacccgccgtccagtacaaagaggaagttgaatcttcaggatggacgtgcccagggggtgcgcagccctctcctacgtcagagctcgagcgagcagtgtagtaacttgtccagcgtgcgccgcatgtataaagagtccaattccagcagctccttacccagcttacacacttccttcagcgcccccagctttacagcccctagtttcctgaagagtttttatcaaaacagcggcaggctttcccctcagtacgaaaacgagatcagacaagacaccgcctctgaaagcagtgatggagaagggcgcaagagaacctcctccacctgcagcaacgagtctcttagcgtgggtggcacaagcgtgacaccacgtcgcatctcttggcgccagagaatcttcctcagggtggcctctcccatgaacaagtccccgtccgccatgcagcagcaggatggcctggataggaacgagttgctcccactgtctcctctaagcccaactatggaggaggagcccctggtggtgtttctgagcggagaagatgatcctgaaaagatcgaggagcgcaagaaatcaaaagaactccggagcctttggagaaaggccatccaccaacagattctactgcttaggatggaaaaggagaaccaaaaactggaagcaagtcgtgatgagctacagtctaggaaggtgaagctcgactatgaagaggtcggcgcctgtcagaaggaggtgctgattacctgggacaagaagctgttaaactgccgcgctaagatcagatgcgacatggaggacattcataccttactgaaggagggagtgcctaagagtcgcagaggagagatctggcagtttctcgctttgcagtacaggctcaggcacagacttccaaataaacagcaaccgcctgacatcagctacaaggaactgctgaagcagctgacggcacagcaacatgcgattctggtggacctggggaggaccttccccacacatccatactttagcgtccagctcggccctgggcagctgagcttgttcaacttgctgaaagcctactcgttactggacaaagaggtcgggtattgccaagggatctcctttgtcgccggggtactgctgctgcacatgagcgaggaacaagcattcgagatgctgaagttcttaatgtatgaccttggctttcgaaaacagtatagacccgacatgatgagcttgcagatacaaatgtatcagctctcaagacttttacacgattaccatcgggacctctacaaccacctggaggaaaacgagatttcaccctccctctatgctgctccttggttccttactctttttgccagtcagttttcgctcggcttcgtggccagagtttttgacatcatcttcctacaggggaccgaggtgatattcaaagtcgctctgagccttctgagtagccaggaaacacttataatggaatgtgaatcttttgagaatatcgtggaattcctgaagaacaccttgcctgatatgaacacttccgaaatggaaaagattatcactcaggttttcgaaatggacattagcaaacagttacacgcgtacgaggtggagtaccacgtcttacaggatgagctgcaagagagctcttactcatgtgaagactcagagactctggaaaaactggaacgcgccaattcacagctgaagagacaaaatatggacctgctggagaaactccaagtagcccacactaagattcaggccctggaatccaacctcgaaaacctgcttacccgcgagacaaagatgaaaagtctgatccgcacactggaacaggaaaaaatggcgtaccaaaaaacagttgaacagctgcggaagctccttcccgcggacgcccttgtgaattgcgatctcttactgcgcgacctcaattgtaatcccaacaataaagctaaaatcggaaataaaccgtag

SEQ ID NO: 182525 - DNA, 3897 bp, Artificial Sequence
  derived and/or modified sequence
atggagccgccttcctgcatccaggatgaaccattcccccacccgctcgagcctgagcctggagtaagcgcacagcctggacccggaaaaccttcagacaaaagatttcgcctatggtatgtaggcggaagctgcctcgaccatcgcaccacactgcctatgctgccatggcttatggctgagattaggaggaggtcccagaagcccgaagctggaggctgtggtgctcccgcagccagagaggtgattttagttctgtccgctccattcctgaggtgtgtccccgcaccaggagcaggggcatcagggggtacaagtccaagcgcgacacagcctaaccccgctgtgttcatattcgagcacaaggcgcaacacatttcccgcttcatccataacagccacgaccttacttattttgcctacttgattaaagcacaacctgacgaccccgaatctcaaatggcttgccacgtgtttcgagccaccgatcccagccaagtccccgacgtgatatcttctattcgtcaactgtctaaagcagccatgaaggaagacgccaaacccagcaaagacaatgaggacgcattctacaattcccagaaatttgaagttctgtattgtggcaaggtgaccgtgactcacaagaaagcccctagttccctaatagacgactgcatggagaagttctcactgcacgagcagcagcgcctgaagattcagggagaacagcgtgggcctgatccaggggaagaccttgccgatctggaagtcgtggtgccgggttcgcccggtgactgtttaccagaggaggccgatggtacggacactcatcttgggctgcccgcaggagcgagtcagcctgcactgaccagcagcagagtgtgtttccccgagagaattctggaagatagcgggttcgacgagcagcaggagttcagatcacgatgctcttctgtgaccggtgtgcaacgcagagtccatgaaggtagccagaagtctcagccaaggaggagacatgctagcgctcctagccatgtccagcctagcgattcagagaagaaccggaccatgctatttcaagtcggcagatttgagattaatctgatctctcccgacaccaaaagtgtcgtcctggagaaaaactttaaagatatcagctcatgctcacaggggattaaacacgtagaccatttcggtttcatatgccgcgagtctccagagccaggcctctctcaatacatctgttatgtctttcagtgtgcttccgaatccctcgtggacgaggtgatgttgactctcaagcaggctttctctaccgctgctgctctgcaatccgccaagacccagattaagctctgcgaggcctgccctatgcatagtctgcacaaattgtgcgaacgaattgaaggtctttaccctcccagggccaagctggtcattcagagacacttgagttctcttaccgataatgaacaagcggacattttcgagagggttcagaagatgaagcccgttagtgaccaagaggaaaatgagctggttattctgcacttacgccaactgtgtgaggccaaacagaagactcatgttcacataggggaaggcccaagcaccatcagtaatagtactatccctgagaacgccacgtcgagcgggcgtttcaaactggacattctgaagaacaaggcaaagaggtccttgacgagcagtctggaaaatatctttagcagaggagcaaaccgcatgcgtggacgtttaggttccgttgacagtttcgaacgctctaattctctggctagtgagaaggattattcgcccggtgacagtccaccgggaactcctcctgcctctccacctagctccgcttggcagacattccctgaggaagacagcgacagtcctcagttccgacggagagcccatacttttagtcatcctccatcgtccaccaaacgtaaactgaacctgcaggatggtcgtgcacagggagtccggtctcccctgctgagacagtccagctcagaacaatgctcaaacctctcctctgtgcgacgaatgtataaggaatctaatagcagttcctcactgccctccttgcacacatcgtttagcgccccttccttcaccgcacctagcttccttaagtcattttaccagaactccggcaggctctcaccacagtatgagaatgaaatccgacaagacaccgcctccgagtccagcgatggcgagggcaggaagaggacttccagcacgtgctcaaacgagtcactgtccgttggaggcaccagcgttactcccaggcgaatctcatggaggcagcgcatcttcctgagggttgctagtccaatgaataagtcaccatctgcaatgcagcagcaagatggcctggatcgcaacgaacttctgcccttaagccctctgagccccacgatggaagaggaaccactggtggtttttctgtcaggcgaggacgaccctgagaagatcgaggaacgcaagaagtctaaagaactgcgtagtctatggcgaaaagctatccaccaacaaattcttctcctacgcatggaaaaggagaatcagaaacttgaggccagcagggacgagctccagtccaggaaagtgaagctggactacgaagaagttggagcttgccagaaggaggtcctgatcacatgggataagaagctgctgaattgtagggccaagattcgttgcgatatggaggatatccacacattactgaaggaaggagtgcctaagtcgcgcagaggagaaatatggcagtttctggcgctgcagtacaggttgcggcatcgactccccaacaaacagcagcctcccgacatcagctataaagaactcctgaagcagctcaccgctcagcagcacgccatcctggtcgatttgggaaggaccttcccaactcacccttacttctccgttcaacttggaccaggccagctcagcctgtttaatctgctgaaggcctattctctgctcgataaagaggtcgggtactgtcaggggattagctttgttgccggtgtcctacttctccacatgtcggaagagcaggcgttcgagatgcttaagtttctgatgtacgatctgggattccgcaagcagtatcgccctgacatgatgagtctgcagattcagatgtaccagctgtcccgcttgctgcatgattaccacagagacctgtacaaccatttagaggagaatgaaataagcccatcactgtacgctgcaccttggttcctgactttatttgcctctcagttcagtttgggcttcgtggcacgcgtttttgatattatttttctgcaggggacggaggtcatatttaaggtcgccctctccctcttgagttcccaggagaccctgattatggaatgcgagagcttcgagaacatcgtggaattcctgaagaataccttgcccgacatgaacacctccgaaatggaaaagattattacgcaggtttttgagatggacatctccaagcagctgcacgcctatgaggtggaatatcacgttctacaggatgagctgcaagagtcctcctacagctgtgaggacagcgaaactctggagaaattggagagagccaactcccagctgaagaggcagaatatggacttgctcgaaaaacttcaggtcgcccacactaagattcaggccctggaatccaacctggaaaacctcttaacaagagaaacaaaaatgaagtcattgatcaggactctggaacaagagaagatggcctatcaaaaaacggtggagcagctgagaaagttactacccgctgacgcactggtgaactgtgatctattgttacgggacttaaactgcaatcccaacaacaaggcaaagatcggtaataaaccatag

SEQ ID NO: 182526 - DNA, 6364 bp, Artificial Sequence
  derived and/or modified sequence
gcggccgcggggaccctcggcgtggtcctctgaccctgcaaacccgcgacggaggaaggggaggtcctgcccgaggcgccagcccaaggaggaggatgcccatttaacccgccctcgcctgccgggcgcttgcctcggtgcccgccgccggagcctccgagccgcgcccgtggaagtgctgcatggggcagggctgctgaagcgcggagttcggggtcgcgccgctcccaggcaggcgcgggagcccggtgcggcagttggcacagtttcggcggcgccttctgcgcgggagtggggggcgcggtgcgcccggccggcctccgcggtgccctggtgaggcgagagttatggagccgcccagctgcattcaggatgagccgttcccgcaccccctggagcccgagccgggcgtctcagctcagcccggccccgggaagccaagcgataagcggttccggctgtggtacgttggggggtcgtgcctggaccacaggaccacgctgcctatgctgccctggctcatggccgagatccgcaggcgcagccagaagcccgaggcgggcggctgcggggcgccggcggcccgagaggtgatcctggtgctcagcgcgcccttcctgcgttgcgtccccgcgccgggcgctggggcctcggggggcactagtccgtcggccacgcagcccaacccggcggtattcatcttcgagcacaaggcgcagcatatctcgcgcttcatccacaacagccacgacctcacctactttgcctacctgatcaaggcgcagcccgacgaccccgagtcgcagatggcctgccacgttttccgcgccacagaccccagccaggttcctgatgttattagcagcataaggcaattatctaaagcggccatgaaagaggatgccaaacccagcaaagataatgaggacgccttttacaactctcagaagttcgaagtcctgtactgtggaaaggtgaccgtgacccacaagaaggccccctcaagcctcatcgatgactgcatggagaagttcagcctgcacgaacagcagcgcctgaagatccaaggggagcagcgcggtccggacccaggagaggacctggctgacttggaggtggtggtgcccgggtcccccggagactgcctgccggaggaggctgacggcaccgacacccaccttggcttacctgccggggccagccagcctgccctgaccagctctcgggtctgcttccctgagcggattttggaagattctggctttgatgagcagcaggagtttcggtctcggtgcagcagtgtcaccggcgtgcaacggagagttcacgagggcagccagaaatcccagccgcgacggagacacgcgagcgcacccagtcacgtccagccctcggactcggagaagaacaggaccatgctcttccaggttgggcgatttgagattaaccttatcagtccagacactaaatcagttgtgctagaaaagaattttaaagatatctcctcttgttctcagggtataaagcatgtggatcactttggctttatctgccgggagtctccagagcctggacttagccagtatatttgttatgtattccagtgtgccagcgaatctctggttgatgaggtaatgctgactctgaaacaggccttcagtacggcggctgccctgcagagtgccaagacgcagattaaactgtgtgaggcctgcccgatgcactctttgcataagctctgtgaaaggattgaaggtctctacccaccaagagccaagctggtgatacagaggcatctctcatcactgacagataatgagcaagctgacatctttgaaagagttcagaaaatgaagccagtcagtgaccaggaagaaaatgaacttgtgattttacacctgaggcagctgtgtgaagccaagcagaagacacacgtgcacatcggggaaggcccttctactatttcaaatagtacaatcccagaaaatgcaacaagcagtggaaggttcaaacttgacattctgaaaaataaagctaagagatccttaactagctccctggaaaatatcttctcaaggggagctaacagaatgagaggtcggcttggaagtgtggacagttttgaacggtccaacagtcttgcttcagagaaggactactcaccaggggattctccaccagggacaccgccagcgtccccaccgtcctcagcttggcaaacgtttcccgaagaggattccgactccccgcagtttcgaagacgggcacacacgttcagccacccaccttcaagcacaaagagaaagctgaatttgcaggatgggagggctcagggtgtgcgttcccctctgctgaggcagagctccagtgaacagtgcagcaatctttcgtcagttcgacgcatgtacaaggagagtaattcttcctccagtcttccaagtcttcacacttccttctctgccccttccttcactgccccctctttcctgaaaagcttttaccagaattcaggtagactgtccccacagtatgaaaatgaaatcagacaagacactgcttcagaatcaagtgatggagaagggagaaaaaggacctcatctacctgcagcaatgagtccctaagtgtgggaggaacctctgtcactcctcgccggatctcctggcggcagcgcattttcctcagggttgcttctcccatgaacaaatctccctcagcaatgcaacagcaagatggattggacaggaacgagctgctgccactgtcccccctctctccaaccatggaggaggaaccgctggttgtattcctgtctggggaggatgacccagaaaagattgaagaaagaaagaaatcaaaagaactgaggagcttgtggagaaaagctatacaccaacaaatcttgttacttcgaatggaaaaagaaaaccagaaacttgaagcaagcagagatgaactccagtccagaaaagttaaattagactatgaagaagttggtgcatgtcagaaagaggtcttaataacttgggataagaagttgttaaactgcagagctaaaatcagatgtgatatggaagatattcatactcttcttaaagaaggagttcccaaaagtcgacgaggagaaatttggcagtttctggctttacagtaccgactcagacacagattgcctaataaacaacagcctcctgacatatcctataaggaacttttgaagcagctcactgctcagcagcatgcgattctcgtggatttaggaaggacgtttcctactcacccttacttttcagtacagcttgggccaggacagctgtcactgtttaacctcctgaaagcctattctttgctggacaaagaagtgggatactgtcaggggatcagctttgtggctggagtcctgcttctgcacatgagtgaagagcaagcctttgaaatgctgaaattcctcatgtatgacctcggcttccgcaagcagtacagacctgacatgatgtcgctgcagattcaaatgtaccagctgtccaggctccttcatgactatcacagagatctctacaatcaccttgaagaaaatgaaatcagccccagtctttatgctgccccctggttcctcacattgtttgcctctcagttttcattaggatttgtagccagagtttttgatattatttttcttcagggaactgaagttatattcaaggttgcactcagcctactgagcagccaagagacacttataatggaatgtgagagctttgaaaatattgttgagtttcttaaaaacacgctacctgatatgaatacctctgaaatggaaaaaattattacccaggtttttgagatggatatttctaagcagttgcatgcctatgaggtggaatatcatgtgctacaggatgagcttcaggaatcttcatattcctgtgaggatagtgaaactttggagaagctggagagggccaatagccaactgaaaagacaaaacatggacctcctagaaaaattacaggtagctcatactaaaatccaggccttggaatcaaacctggaaaatcttttgacgagagagaccaaaatgaagtctttaatccggaccctggaacaagaaaaaatggcttatcaaaagacagtggagcaactccggaagctgctgcccgcggatgctctagtcaattgtgacctgttgctgagagacctaaactgcaaccctaacaacaaagccaagataggaaataagccataattgaagaggcacggcctcagcagaaagtgctccttagaatactacagagaggaagagcctgcatgtcgctggcccaaggctggaccctgaagctgatggaaccacctaatactggtgctgagcgcctagtcacagcaggtggacctcgtgctcatcagagcatgccaatcctaagccattggacatatgtagactggtttttgttgttgctatgtacatataaatatatatataaaatgaacatagttcatgctttcagataaaatgagtagatgtatatttagattaatttttttagtcagaacttcatgaaatccacaccaaaggaaaggtaaactgaaatttcccttggacatatgtgaaatctttttgtctttatagtgaaacaaagccagagcatctttgtatattgcaatatacttgaaaaaaatgaatgtatttttttctccaaagaacagcatgtttcactcaatggtgaaaaggtggaaacatttatgtaactttatgtgtatctgtcttgatatctactgacattgtctatatgaggaaaatgattactggtcatgctcctgtgagttttttgggaaggtagggtcatttctccctgcctgctttgtgccaactagcatgttgcatctacatgcattatgagtctggttaggcattactttaaacatacataaagagacagtaggacattgtggctgagtctacccagctcaaggtaaaggagaatgttgctaattttttagcaaactagaccagcattattactcaaactaaaaatatcacacctgaaaaatttaatttaggacctaaaatgtctagattagctttctgctttttttatttgaataactcattcagttgtgaatgaattcctctttatttggtgccacagtcaccaaatgacaaggatttgccactttcccaccaaattgtgagtgcttgtaatttaggtctctctaccttaaattcagtataaggaaacgtaattatgattgattttttccaaagatgacaagctgtgttgaaatacattttttcttttgaccaattgacagaatctaataagctttaataatcttccccttttatgtgaaaagttttgagaactgtgaaatgtttaggaacaaactgttgaaatccattggaagggaaaaaagaaagtggtaccagtgttaccagctcaactaaaacctgcaattctgcatttcaactcttcacttcctcagcctacaaatagctcattagatgacattcacgcatgctgggtataggcaaggaaagtaattttcaaagtacatttgcagttctctttttcagagatgattctatgatagtgcctctgaaagttgatgcagcatttttgcctttccaaaaagtatttatcctcactgctttttgcagtacttgtattttcacagatggattatctggggtaattttcttcaaagggagtttgttatacacagtgaaaatgtattatagagtagaatagtaaagctctaggggtttcagaaagctttgatgaacagatgacaaacatctgaaaccccctccgcactgttacccagtgtgtatataatgacttgttatagctcagtgtgcccttgaatccatacagtttcttaaaagacaataaaatcttattaataaagttaatgtaacttctaagttctagaaaatgctgattctgtctgccccattcaattgggggctactaattgatttgttgcttggatttcctgagaatttctctatttgtaggaggggttttttctttttacggtctgttgatgacaattactttatgggtgtgatgcaccgatggtagccaaggaatctgttggggaagttcggaaagaaaccttttctttcttttattcagtttaaagtaaactttatcctggatgtttagaatcaacattaagagttatattatggtgttcagagattaagctgacttggatacaatattttcttttgaaaatgaattttctttttcatttgtgatttttaaaaaatgttgcaccagttatgcttcatgcatcgttacatcttcatcaggttaatgtaatgtctagttcctttgcaataaatatattgctgcagctttc

SEQ ID NO: 182527 - DNA, 6204 bp, Artificial Sequence
  derived and/or modified sequence
gcggccgcggggaccctcggcgtggtcctctgaccctgcaaacccgcgacggaggaaggggaggtcctgcccgaggcgccagcccaaggaggaggatgcccatttaacccgccctcgcctgccgggcgcttgcctcggtgcccgccgccggagcctccgagccgcgcccgtggaagtgctgcatggggcagggctgctgaagcgcggagttcggggtcgcgccgctcccaggcaggcgcgggagcccggtgcggcagttggcacagtttcggcggcgccttctgcgcgggagtggggggcgcggtgcgcccggccggcctccgcggtgccctggtgaggcgagagttatggagccgcccagctgcattcaggatgagccgttcccgcaccccctggagcccgagccgggcgtctcagctcagcccggccccgggaagccaagcgataagcggttccggctgtggtacgttggggggtcgtgcctggaccacaggaccacgctgcctatgctgccctggctcatggccgagatccgcaggcgcagccagaagcccgaggcgggcggctgcggggcgccggcggcccgagaggtgatcctggtgctcagcgcgcccttcctgcgttgcgtccccgcgccgggcgctggggcctcggggggcactagtccgtcggccacgcagcccaacccggcggtattcatcttcgagcacaaggcgcagcatatctcgcgcttcatccacaacagccacgacctcacctactttgcctacctgatcaaggcgcagcccgacgaccccgagtcgcagatggcctgccacgttttccgcgccacagaccccagccaggttcctgatgttattagcagcataaggcaattatctaaagcggccatgaaagaggatgccaaacccagcaaagataatgaggacgccttttacaactctcagaagttcgaagtcctgtactgtggaaaggtgaccgtgacccacaagaaggccccctcaagcctcatcgatgactgcatggagaagttcagcctgcacgaacagcagcgcctgaagatccaaggggagcagcgcggtccggacccaggagaggacctggctgacttggaggtggtggtgcccgggtcccccggagactgcctgccggaggaggctgacggcaccgacacccaccttggcttacctgccggggccagccagcctgccctgaccagctctcgggtctgcttccctgagcggattttggaagattctggctttgatgagcagcaggagtttcggtctcggtgcagcagtgtcaccggcgtgcaacggagagttcacgagggcagccagaaatcccagccgcgacggagacacgcgagcgcacccagtcacgtccagccctcggactcggagaagaacaggaccatgctcttccaggttgggcgatttgagattaaccttatcagtccagacactaaatcagttgtgctagaaaagaattttaaagatatctcctcttgttctcagggtataaagcatgtggatcactttggctttatctgccgggagtctccagagcctggacttagccagtatatttgttatgtattccagtgtgccagcgaatctctggttgatgaggtaatgctgactctgaaacaggccttcagtacggcggctgccctgcagagtgccaagacgcagattaaactgtgtgaggcctgcccgatgcactctttgcataagctctgtgaaaggattgaaggtctctacccaccaagagccaagctggtgatacagaggcatctctcatcactgacagataatgagcaagctgacatctttgaaagagttcagaaaatgaagccagtcagtgaccaggaagaaaatgaacttgtgattttacacctgaggcagctgtgtgaagccaagcagaagacacacgtgcacatcggggaaggcccttctactatttcaaatagtacaatcccagaaaatgcaacaagcagtggaaggttcaaacttgacattctgaaaaataaagctaagagatccttaactagctccctggaaaatatcttctcaaggggagctaacagaatgagaggtcggcttggaagtgtggacagttttgaacggtccaacagtcttgcttcagagaaggactactcaccaggggattctccaccagggacaccgccagcgtccccaccgtcctcagcttggcaaacgtttcccgaagaggattccgactccccgcagtttcgaagacgggcacacacgttcagccacccaccttcaagcacaaagagaaagctgaatttgcaggatgggagggctcagggtgtgcgttcccctctgctgaggcagagctccagtgaacagtgcagcaatctttcgtcagttcgacgcatgtacaaggagagtaattcttcctccagtcttccaagtcttcacacttccttctctgccccttccttcactgccccctctttcctgaaaagcttttaccagaattcaggtagactgtccccacagtatgaaaatgaaatcagacaagacactgcttcagaatcaagtgatggagaagggagaaaaaggacctcatctacctgcagcaatgagtccctaagtgtgggaggaacctctgtcactcctcgccggatctcctggcggcagcgcattttcctcagggttgcttctcccatgaacaaatctccctcagcaatgcaacagcaagatggattggacaggaacgagctgctgccactgtcccccctctctccaaccatggaggaggaaccgctggttgtattcctgtctggggaggatgacccagaaaagattgaagaaagaaagaaatcaaaagaactgaggagcttgtggagaaaagctatacaccaacaaatcttgttacttcgaatggaaaaagaaaaccagaaacttgaaggagttcccaaaagtcgacgaggagaaatttggcagtttctggctttacagtaccgactcagacacagattgcctaataaacaacagcctcctgacatatcctataaggaacttttgaagcagctcactgctcagcagcatgcgattctcgtggatttaggaaggacgtttcctactcacccttacttttcagtacagcttgggccaggacagctgtcactgtttaacctcctgaaagcctattctttgctggacaaagaagtgggatactgtcaggggatcagctttgtggctggagtcctgcttctgcacatgagtgaagagcaagcctttgaaatgctgaaattcctcatgtatgacctcggcttccgcaagcagtacagacctgacatgatgtcgctgcagattcaaatgtaccagctgtccaggctccttcatgactatcacagagatctctacaatcaccttgaagaaaatgaaatcagccccagtctttatgctgccccctggttcctcacattgtttgcctctcagttttcattaggatttgtagccagagtttttgatattatttttcttcagggaactgaagttatattcaaggttgcactcagcctactgagcagccaagagacacttataatggaatgtgagagctttgaaaatattgttgagtttcttaaaaacacgctacctgatatgaatacctctgaaatggaaaaaattattacccaggtttttgagatggatatttctaagcagttgcatgcctatgaggtggaatatcatgtgctacaggatgagcttcaggaatcttcatattcctgtgaggatagtgaaactttggagaagctggagagggccaatagccaactgaaaagacaaaacatggacctcctagaaaaattacaggtagctcatactaaaatccaggccttggaatcaaacctggaaaatcttttgacgagagagaccaaaatgaagtctttaatccggaccctggaacaagaaaaaatggcttatcaaaagacagtggagcaactccggaagctgctgcccgcggatgctctagtcaattgtgacctgttgctgagagacctaaactgcaaccctaacaacaaagccaagataggaaataagccataattgaagaggcacggcctcagcagaaagtgctccttagaatactacagagaggaagagcctgcatgtcgctggcccaaggctggaccctgaagctgatggaaccacctaatactggtgctgagcgcctagtcacagcaggtggacctcgtgctcatcagagcatgccaatcctaagccattggacatatgtagactggtttttgttgttgctatgtacatataaatatatatataaaatgaacatagttcatgctttcagataaaatgagtagatgtatatttagattaatttttttagtcagaacttcatgaaatccacaccaaaggaaaggtaaactgaaatttcccttggacatatgtgaaatctttttgtctttatagtgaaacaaagccagagcatctttgtatattgcaatatacttgaaaaaaatgaatgtatttttttctccaaagaacagcatgtttcactcaatggtgaaaaggtggaaacatttatgtaactttatgtgtatctgtcttgatatctactgacattgtctatatgaggaaaatgattactggtcatgctcctgtgagttttttgggaaggtagggtcatttctccctgcctgctttgtgccaactagcatgttgcatctacatgcattatgagtctggttaggcattactttaaacatacataaagagacagtaggacattgtggctgagtctacccagctcaaggtaaaggagaatgttgctaattttttagcaaactagaccagcattattactcaaactaaaaatatcacacctgaaaaatttaatttaggacctaaaatgtctagattagctttctgctttttttatttgaataactcattcagttgtgaatgaattcctctttatttggtgccacagtcaccaaatgacaaggatttgccactttcccaccaaattgtgagtgcttgtaatttaggtctctctaccttaaattcagtataaggaaacgtaattatgattgattttttccaaagatgacaagctgtgttgaaatacattttttcttttgaccaattgacagaatctaataagctttaataatcttccccttttatgtgaaaagttttgagaactgtgaaatgtttaggaacaaactgttgaaatccattggaagggaaaaaagaaagtggtaccagtgttaccagctcaactaaaacctgcaattctgcatttcaactcttcacttcctcagcctacaaatagctcattagatgacattcacgcatgctgggtataggcaaggaaagtaattttcaaagtacatttgcagttctctttttcagagatgattctatgatagtgcctctgaaagttgatgcagcatttttgcctttccaaaaagtatttatcctcactgctttttgcagtacttgtattttcacagatggattatctggggtaattttcttcaaagggagtttgttatacacagtgaaaatgtattatagagtagaatagtaaagctctaggggtttcagaaagctttgatgaacagatgacaaacatctgaaaccccctccgcactgttacccagtgtgtatataatgacttgttatagctcagtgtgcccttgaatccatacagtttcttaaaagacaataaaatcttattaataaagttaatgtaacttctaagttctagaaaatgctgattctgtctgccccattcaattgggggctactaattgatttgttgcttggatttcctgagaatttctctatttgtaggaggggttttttctttttacggtctgttgatgacaattactttatgggtgtgatgcaccgatggtagccaaggaatctgttggggaagttcggaaagaaaccttttctttcttttattcagtttaaagtaaactttatcctggatgtttagaatcaacattaagagttatattatggtgttcagagattaagctgacttggatacaatattttcttttgaaaatgaattttctttttcatttgtgatttttaaaaaatgttgcaccagttatgcttcatgcatcgttacatcttcatcaggttaatgtaatgtctagttcctttgcaataaatatattgctgcagcttt

SEQ ID NO: 182528 - protein, 1700 aa, Artificial Sequence
  derived and/or modified sequence
MSSAQCPALVCVMSRLRFWGPWPLLMWQLLWLLVKEAQPLEWVKDPLQLTSNPLGPPESWSSHSSHFPRESPHAPTLPADPWDFDHLGPSASSEMPAPPQESTENLVPFLDTWDSAGEQPLEPEQFLASQQDLKDKLSPQERLPVSPKKLKKDPAQRWSLAEIIGITRQLSTPQSQKQTLQNEYSSTDTPYPGSLPPELRVKSDEPPGPSEQVGPSQFHLEPETQNPETLEDIQSSSLQQEAPAQLPQLLEEEPSSMQQEAPALPPESSMESLTLPNHEVSVQPPGEDQAYYHLPNITVKPADVEVTITSEPTNETESSQAQQETPIQFPEEVEPSATQQEAPIEPPVPPMEHELSISEQQQPVQPSESPREVESSPTQQETPGQPPEHHEVTVSPPGHHQTHHLASPSVSVKPPDVQLTIAAEPSAEVGTSLVHQEATTRLSGSGNDVEPPAIQHGGPPLLPESSEEAGPLAVQQETSFQSPEPINNENPSPTQQEAAAEHPQTAEEGESSLTHQEAPAQTPEFPNVVVAQPPEHSHLTQATVQPLDLGFTITPESKTEVELSPTMKETPTQPPKKVVPQLRVYQGVTNPTPGQDQAQHPVSPSVTVQLLDLGLTITPEPTTEVGHSTPPKRTIVSPKHPEVTLPHPDQVQTQHSHLTRATVQPLDLGFTITPKSMTEVEPSTALMTTAPPPGHPEVTLPPSDKGQAQHSHLTQATVQPLDLELTITTKPTTEVKPSPTTEETSTQPPDLGLAIIPEPTTETGHSTALEKTTAPRPDRVQTLHRSLTEVTGPPTELEPAQDSLVQSESYTQNKALTAPEEHKASTSTNICELCTCGDEMLSCIDLNPEQRLRQVPVPEPNTHNGTFTILNFQGNYISYIDGNVWKAYSWTEKLILRENNLTELHKDSFEGLLSLQYLDLSCNKIQSIERHTFEPLPFLKFINLSCNVITELSFGTFQAWHGMQFLHKLILNHNPLTTVEDPYLFKLPALKYLDMGTTLVPLTTLKNILMMTVELEKLILPSHMACCLCQFKNSIEAVCKTVKLHCNSACLTNTTHCPEEASVGNPEGAFMKVLQARKNYTSTELIVEPEEPSDSSGINLSGFGSEQLDTNDESDFISTLSYILPYFSAVNLDVKSLLLPFIKLPTTGNSLAKIQTVGQNRQRVKRVLMGPRSIQKRHFKEVGRQSIRREQGAQASVENAAEEKRLTSPAPREVEQPHTQQGPEKLAGNAVYTKPSFTQEHKAAVSVLKPFSKGTPSTSSPAKALPQVRDRSKDLTHAISILESAKARVTNTKTSKPIVHARKKYRFHKTRSHVTHRTTKVKKSPKVRKKSYLSRLMLANRLPFSAAKSLINSPSQGAFSSLGDLSPQENPFLEVSALSEHFIEKNNTKHTTARNAFEENDFMENTNMPEGTISENTNYNHPPEADSAGTAFNLGPTVKQTETKWEYNNVGTDLSPEPKSFNYPLLSSPGDQFEIQLTQQLQSLIPNNNVRRLIAHVIRTLKMDCSGAHVQVTCAKLISRTGHLMKLLSGQQEVKASKIEWDTDQWKIENYINESTEAQSEQKEKSLELKKEVPGYGYTDKLILALIVTGILTILIILFCLIVICCHRRSLQEDEEGFSRGIFRFLPWRGCSSRRESQDGLSSFGQPLWFKDLYKPLSATRINNHAWKLHKKSSNEDKILNRDPGDSEAPTEEEESEALP

SEQ ID NO: 182529 - DNA, 5103 bp, Artificial Sequence
  derived and/or modified sequence
atgagcagcgcccagtgccccgccctggtgtgcgtgatgagcagactgagattctggggcccctggcccctgctgatgtggcagctgctgtggctgctggtgaaggaggcccagcccctggagtgggtgaaggaccccctgcagctgaccagcaaccccctgggcccccccgagagctggagcagccacagcagccacttccccagagagagcccccacgcccccaccctgcccgccgacccctgggacttcgaccacctgggccccagcgccagcagcgagatgcccgcccccccccaggagagcaccgagaacctggtgcccttcctggacacctgggacagcgccggcgagcagcccctggagcccgagcagttcctggccagccagcaggacctgaaggacaagctgagcccccaggagagactgcccgtgagccccaagaagctgaagaaggaccccgcccagagatggagcctggccgagatcatcggcatcaccagacagctgagcaccccccagagccagaagcagaccctgcagaacgagtacagcagcaccgacaccccctaccccggcagcctgccccccgagctgagagtgaagagcgacgagccccccggccccagcgagcaggtgggccccagccagttccacctggagcccgagacccagaaccccgagaccctggaggacatccagagcagcagcctgcagcaggaggcccccgcccagctgccccagctgctggaggaggagcccagcagcatgcagcaggaggcccccgccctgccccccgagagcagcatggagagcctgaccctgcccaaccacgaggtgagcgtgcagccccccggcgaggaccaggcctactaccacctgcccaacatcaccgtgaagcccgccgacgtggaggtgaccatcaccagcgagcccaccaacgagaccgagagcagccaggcccagcaggagacccccatccagttccccgaggaggtggagcccagcgccacccagcaggaggcccccatcgagccccccgtgccccccatggagcacgagctgagcatcagcgagcagcagcagcccgtgcagcccagcgagagccccagagaggtggagagcagccccacccagcaggagacccccggccagccccccgagcaccacgaggtgaccgtgagcccccccggccaccaccagacccaccacctggccagccccagcgtgagcgtgaagccccccgacgtgcagctgaccatcgccgccgagcccagcgccgaggtgggcaccagcctggtgcaccaggaggccaccaccagactgagcggcagcggcaacgacgtggagccccccgccatccagcacggcggcccccccctgctgcccgagagcagcgaggaggccggccccctggccgtgcagcaggagaccagcttccagagccccgagcccatcaacaacgagaaccccagccccacccagcaggaggccgccgccgagcacccccagaccgccgaggagggcgagagcagcctgacccaccaggaggcccccgcccagacccccgagttccccaacgtggtggtggcccagccccccgagcacagccacctgacccaggccaccgtgcagcccctggacctgggcttcaccatcacccccgagagcaagaccgaggtggagctgagccccaccatgaaggagacccccacccagccccccaagaaggtggtgccccagctgagagtgtaccagggcgtgaccaaccccacccccggccaggaccaggcccagcaccccgtgagccccagcgtgaccgtgcagctgctggacctgggcctgaccatcacccccgagcccaccaccgaggtgggccacagcaccccccccaagagaaccatcgtgagccccaagcaccccgaggtgaccctgccccaccccgaccaggtgcagacccagcacagccacctgaccagagccaccgtgcagcccctggacctgggcttcaccatcacccccaagagcatgaccgaggtggagcccagcaccgccctgatgaccaccgcccccccccccggccaccccgaggtgaccctgccccccagcgacaagggccaggcccagcacagccacctgacccaggccaccgtgcagcccctggacctggagctgaccatcaccaccaagcccaccaccgaggtgaagcccagccccaccaccgaggagaccagcacccagccccccgacctgggcctggccatcatccccgagcccaccaccgagaccggccacagcaccgccctggagaagaccaccgcccccagacccgacagagtgcagaccctgcacagaagcctgaccgaggtgaccggcccccccaccgagctggagcccgcccaggacagcctggtgcagagcgagagctacacccagaacaaggccctgaccgcccccgaggagcacaaggccagcaccagcaccaacatctgcgagctgtgcacctgcggcgacgagatgctgagctgcatcgacctgaaccccgagcagagactgagacaggtgcccgtgcccgagcccaacacccacaacggcaccttcaccatcctgaacttccagggcaactacatcagctacatcgacggcaacgtgtggaaggcctacagctggaccgagaagctgatcctgagagagaacaacctgaccgagctgcacaaggacagcttcgagggcctgctgagcctgcagtacctggacctgagctgcaacaagatccagagcatcgagagacacaccttcgagcccctgcccttcctgaagttcatcaacctgagctgcaacgtgatcaccgagctgagcttcggcaccttccaggcctggcacggcatgcagttcctgcacaagctgatcctgaaccacaaccccctgaccaccgtggaggacccctacctgttcaagctgcccgccctgaagtacctggacatgggcaccaccctggtgcccctgaccaccctgaagaacatcctgatgatgaccgtggagctggagaagctgatcctgcccagccacatggcctgctgcctgtgccagttcaagaacagcatcgaggccgtgtgcaagaccgtgaagctgcactgcaacagcgcctgcctgaccaacaccacccactgccccgaggaggccagcgtgggcaaccccgagggcgccttcatgaaggtgctgcaggccagaaagaactacaccagcaccgagctgatcgtggagcccgaggagcccagcgacagcagcggcatcaacctgagcggcttcggcagcgagcagctggacaccaacgacgagagcgacttcatcagcaccctgagctacatcctgccctacttcagcgccgtgaacctggacgtgaagagcctgctgctgcccttcatcaagctgcccaccaccggcaacagcctggccaagatccagaccgtgggccagaacagacagagagtgaagagagtgctgatgggccccagaagcatccagaagagacacttcaaggaggtgggcagacagagcatcagaagagagcagggcgcccaggccagcgtggagaacgccgccgaggagaagagactgaccagccccgcccccagagaggtggagcagccccacacccagcagggccccgagaagctggccggcaacgccgtgtacaccaagcccagcttcacccaggagcacaaggccgccgtgagcgtgctgaagcccttcagcaagggcacccccagcaccagcagccccgccaaggccctgccccaggtgagagacagaagcaaggacctgacccacgccatcagcatcctggagagcgccaaggccagagtgaccaacaccaagaccagcaagcccatcgtgcacgccagaaagaagtacagattccacaagaccagaagccacgtgacccacagaaccaccaaggtgaagaagagccccaaggtgagaaagaagagctacctgagcagactgatgctggccaacagactgcccttcagcgccgccaagagcctgatcaacagccccagccagggcgccttcagcagcctgggcgacctgagcccccaggagaaccccttcctggaggtgagcgccctgagcgagcacttcatcgagaagaacaacaccaagcacaccaccgccagaaacgccttcgaggagaacgacttcatggagaacaccaacatgcccgagggcaccatcagcgagaacaccaactacaaccacccccccgaggccgacagcgccggcaccgccttcaacctgggccccaccgtgaagcagaccgagaccaagtgggagtacaacaacgtgggcaccgacctgagccccgagcccaagagcttcaactaccccctgctgagcagccccggcgaccagttcgagatccagctgacccagcagctgcagagcctgatccccaacaacaacgtgagaagactgatcgcccacgtgatcagaaccctgaagatggactgcagcggcgcccacgtgcaggtgacctgcgccaagctgatcagcagaaccggccacctgatgaagctgctgagcggccagcaggaggtgaaggccagcaagatcgagtgggacaccgaccagtggaagatcgagaactacatcaacgagagcaccgaggcccagagcgagcagaaggagaagagcctggagctgaagaaggaggtgcccggctacggctacaccgacaagctgatcctggccctgatcgtgaccggcatcctgaccatcctgatcatcctgttctgcctgatcgtgatctgctgccacagaagaagcctgcaggaggacgaggagggcttcagcagaggcatcttcagattcctgccctggagaggctgcagcagcagaagagagagccaggacggcctgagcagcttcggccagcccctgtggttcaaggacctgtacaagcccctgagcgccaccagaatcaacaaccacgcctggaagctgcacaagaagagcagcaacgaggacaagatcctgaacagagaccccggcgacagcgaggcccccaccgaggaggaggagagcgaggccctgccctag

SEQ ID NO: 182530 - DNA, 5103 bp, Artificial Sequence
  derived and/or modified sequence
atgagtagtgctcagtgcccagccctggtgtgcgtgatgagtagactgaggttttggggcccatggccgctgctgatgtggcagctactctggctactcgtgaaagaggcccagccacttgagtgggtgaaggaccctctgcagctgaccagtaatcccctgggaccacccgagtcctggtcaagccactctagccatttccctagagagtcaccacacgcgcctaccctacccgcagacccgtgggattttgaccatctgggaccttctgctagctcagagatgcctgcgccaccccaggaatctacagaaaacttggtgccatttctcgatacgtgggatagcgcaggtgagcaacccctcgaaccagagcaatttctggcttctcagcaagatttgaaggacaaattgtccccccaggagaggctccccgtgtcgcctaaaaaactgaaaaaggatcccgcccaaagatggtccctagcggagatcattggaatcacacgtcagctttcaaccccacagtcacagaagcaaaccctgcaaaatgaatactcgtcaaccgacaccccataccctgggtccctgcctccggagctgagggttaaaagcgatgagccccctgggccaagcgagcaggtgggcccctcccagttccacctggaacctgaaacccagaatccagaaaccctcgaggatatacagtcttcctctctgcaacaggaggcacccgcccagcttccacaactgttagaagaggagccttccagcatgcagcaggaggcccccgcccttccccccgagtcttcaatggagtccctgacccttcctaatcatgaagtcagcgtccagccccccggcgaggatcaagcatattatcacctgcctaacatcaccgtgaagccagcggacgttgaggtcactatcacaagcgagcccacaaacgagacggagtcctctcaggcacaacaggaaacaccaattcagtttccagaagaggtggagcccagcgctactcagcaagaggcccccatcgagccacctgtgcccccaatggaacatgagctgagtatttccgagcaacagcagcctgtccagccctctgagtctcccagagaggtcgaatctagtcccacccagcaggagacacctggccagccccccgagcaccacgaagttaccgtcagcccgccaggccaccatcagacacatcacttagcctcgccaagcgtgagtgtgaaacctcctgacgttcaactgaccattgccgctgaacccagtgccgaagtgggaaccagtctcgttcaccaagaagccacaacaagactgagcggttcggggaacgatgtagaaccaccagccatacagcacggcggcccccccctgctaccggaatcttcagaagaagcagggcctttagcagtgcagcaagagacaagtttccagtcccccgagccgataaataacgagaacccctcaccgacacagcaggaagccgctgccgagcatcctcaaacagcggaagaaggagagtcctctctaactcatcaggaggcccctgctcaaacgcctgaatttcccaacgtggtggtggctcagccccccgagcattctcaccttacccaggcgacagtccagcctctagaccttggttttaccattaccccggagagcaagaccgaagttgagttgagtcctacaatgaaggagacgcccactcagcctccgaaaaaggtagtgcctcagttacgagtgtatcagggtgtcactaaccccacgcccggccaggatcaggcccaacatccggtttcaccttccgttacagtccagctgctggatctgggcctgactatcacccctgagccaactacagaagtgggccattctacacctccgaaacgaacgattgtgagtccaaagcaccccgaagtaaccttaccgcaccctgaccaagttcagacacaacactctcacctgacgcgcgctacggtccagcctcttgatttgggattcaccattacacctaagtcaatgaccgaagtagagccaagtacggccttaatgacgaccgccccgccccctggccaccctgaagtgactctgcctcccagtgacaaggggcaggcccagcattcccacctgacacaagcaacagtgcagcctttggatctagagctcacaattaccacaaagccaacaactgaagttaaaccttcgcccaccacagaagaaactagcacacaaccccctgatttgggccttgcgatcattcctgaacccactaccgagaccggacacagtaccgctcttgaaaagaccacggcgcctcgcccagaccgagttcagactctgcaccggagtctcactgaggtgacaggacctcccacagaactggagcctgcccaggacagtctagtgcaaagcgaaagctacacccagaacaaggctcttactgcacccgaggagcataaagcatctactagtacgaacatctgtgaactgtgtacttgcggggacgagatgctgtcctgtatagatctgaaccccgaacagcgtctgaggcaagtgcctgtgcccgagcctaacacccataatggcacgtttacaattttgaactttcaggggaattacatttcttatatcgacggaaatgtctggaaagcgtattcctggaccgagaaactgattctgcgcgaaaataatctgaccgaactgcacaaagactctttcgaaggtcttctcagtttgcagtaccttgacctgagttgcaacaaaattcagtcaattgaaagacatactttcgagcccttacccttcctgaagttcatcaacttgtcctgcaacgttataaccgagctgagcttcggtacgtttcaggcatggcatggcatgcagttcttacacaagctgatcctcaatcataatcctctgaccaccgtggaagatccctacctgtttaagctccccgccctgaagtatctggacatgggcactaccctggtgcctttaactactctgaaaaatatcctaatgatgacagtggagctggaaaaactcatcctgccgtcccacatggcgtgttgcttgtgtcagtttaaaaactctatcgaagcagtatgcaagacagtgaaactgcattgtaactctgcctgtcttacgaacacaacccactgtccagaggaggctagtgttggcaaccccgagggtgcattcatgaaggttttacaggccaggaaaaattataccagcaccgagctcattgtcgagccggaggaaccctccgattcgtccggtattaacctgagtggctttgggtctgaacagctagacaccaatgatgaatccgatttcatcagtaccctctcatatatcttaccctactttagcgcagtcaaccttgatgtaaagagcttgctgctaccttttattaagttgccgacaacaggcaactcacttgccaagatccagactgttggacagaatcggcaaagggtaaaacgcgttctgatgggaccacgttccattcagaaaaggcacttcaaggaggtggggcgccaatcaatcaggagagagcagggtgcgcaagcttcggtggagaatgccgctgaggagaaaaggctcaccagtccggcccctcgcgaagtggagcagcctcatacccagcagggtcccgagaagctcgccggaaacgccgtgtatactaagccttctttcactcaggagcacaaggccgctgtgtcggtcctcaagcctttctccaagggcactccttctaccagcagtcccgctaaggccctgccccaggtaagagacaggtctaaagatctaacccacgctatctccatcctggagagtgccaaggcccgggtcacaaatacgaaaacttccaaacccatcgttcatgcccgaaaaaaatatcgctttcacaagacccgcagccacgtcactcacaggaccacaaaggtaaagaagtctccgaaggttcgtaagaaatcatacctaagtcggctgatgctggctaaccggcttccttttagcgccgccaaaagtttgatcaattcaccatctcaaggtgcattctcatccttaggggacctgtcaccgcaggagaacccatttctcgaggtttccgcgctgtctgagcactttatcgagaagaacaataccaagcatacaactgcccgcaacgcctttgaagagaacgactttatggagaacaccaatatgcctgagggaactatctctgagaacactaattataatcaccccccggaggcggactctgcgggtaccgccttcaatcttggccccacagtcaaacagaccgagactaaatgggagtacaataatgtggggactgatcttagcccagagcccaaatcctttaactaccccctactgagtagcccaggggaccagtttgagatccagttaacccagcagctacagtccctcattccaaataacaatgtgagacgactgatcgcccacgtaatcagaaccctgaagatggattgcagcggagcgcatgtacaggttacatgcgctaagctcatatcacgaactggccatctgatgaagctgcttagtggacagcaggaggtgaaagctagcaaaatagagtgggacaccgatcagtggaagatagagaactatataaacgagtccactgaagcccagtcagagcagaaagagaaaagtctcgaactgaaaaaagaagtgcctggctatggctatacagataaactaatcttggctttgatcgtgactgggattttgacaatccttattattctattctgcctgatcgtaatctgctgccataggcggagtctgcaagaggatgaagaaggcttctcccggggaatctttcggtttttgccctggaggggttgcagttccagacgggagtcacaggacggcttgtcttccttcggacagcccctgtggtttaaggatctctataagccgctgagtgcaacaaggattaacaaccacgcctggaaactgcacaagaaatcctcaaatgaggataagatcctgaacagggatcccggcgactcagaggcgccgactgaagaagaggaatctgaagctctgccctag

SEQ ID NO: 182531 - DNA, 5103 bp, Artificial Sequence
  derived and/or modified sequence
atgtcgtcagctcaatgcccagcactggtgtgcgtgatgtcccgccttagattttgggggccttggcctctcctgatgtggcaactcttgtggctcttagtgaaagaagcacagccactggaatgggttaaggaccctttacaactgacaagcaaccctctcgggccccccgagtcctggagttctcattccagccacttccctagggagtcaccacacgccccaacactgccagccgacccatgggacttcgatcaccttggaccaagcgcctcttccgagatgccggccccacctcaggaaagtaccgagaatctagtgccatttttagacacatgggactctgccggcgaacagccgctggagcctgagcagtttctagcctctcagcaggacctcaaagacaagttgagcccccaggaacggttgccagttagccctaagaaactgaaaaaggacccagcacagagatggtctcttgccgagatcataggtataactcgccagttgagtaccccccaaagccagaagcagactctccagaacgaatattcctccaccgacactccctaccccggaagcctgcctccggaattgcgagtaaaaagcgacgagcctccaggcccttctgagcaggtcggtcctagccagttccacctggagcccgagactcagaaccctgagactctggaagatatccagagctcttccttacagcaggaagcccccgcgcagcttccacagcttctcgaggaggagcctagctcaatgcagcaagaggccccagcactgcctcctgaatcatctatggagagcctgactctccctaatcatgaggtctcagtccagcctccaggagaagatcaagcctactatcacctccccaacatcaccgtcaagcccgctgacgttgaggtgacaatcacaagtgagcctacgaatgaaacagagtcgtcccaggcacaacaggagactcccattcagtttcccgaggaggtcgaaccatccgcaacccaacaggaagcacctattgaacctcctgtgccaccaatggaacacgagttatcgatctctgagcagcagcagcctgtgcagccgagtgaatcccctcgggaggtagagagctcacctacacagcaggaaacccccggtcaaccgccagaacaccacgaggtgacggtttctcccccgggacaccaccaaacacaccacttagcgtcaccgtccgtgtccgtcaagccacccgacgtgcagctcaccattgctgccgagccctcagccgaagttggcacctctttagttcatcaagaagctactacaagactctcgggctccggaaatgacgtggagccccctgccatccagcatggtggcccgcctctgctacctgagagctctgaagaggccgggccgctggcggtgcaacaggagacatcattccagtcccctgagccaatcaataatgagaacccttccccaactcagcaagaagcagccgccgagcacccgcagacagccgaggagggggagtcaagcctcactcaccaggaggcccctgcccagaccccagagtttcctaatgtggtggtagcccagccccccgaacactctcacctcacccaggctacagtgcagcccctggatttagggttcaccatcactcccgagagcaagacagaagtggagctgagccctacgatgaaagaaacacccacacagccacccaagaaggtagtgcctcagctgcgcgtgtatcaaggcgtaaccaaccctacccccggccaggaccaagcgcagcaccccgtgtccccatctgtgaccgttcagctgctggatctcggccttaccataactcctgagcccaccacagaagtcggtcatagcacaccacccaagcgtacaattgtaagccctaagcatccagaggttacacttccccacccagaccaggtgcaaacacagcattcgcacttaacgagggctacagtgcaacctctggacctcggattcaccatcaccccgaaatcaatgacagaggtggagccctctaccgctctcatgacaacagcgccccctcccggccatcctgaagtgacactcccaccaagcgataaaggtcaggcccagcatagccatctgacacaggccaccgtccagcctttagatctcgagctgacgatcactacaaagccaaccacagaggtaaagcctagtcctacaactgaggaaaccagtactcaaccgcccgacctgggcctggcgatcattcctgagcctactacagagaccggccactccactgctcttgagaaaactacggcaccacggccagatagggtgcagacactccatcggagtctgacggaagttactggcccccctacagagttggaacccgcccaggactctctagtccaaagcgaatcatacacacaaaataaggccctaacagcccctgaggagcacaaagcttccacttctaccaatatctgcgagttgtgcacttgtggtgatgaaatgctgtcctgtattgatctgaatcccgagcagagactccggcaagtccctgtgccggaaccaaacactcataacgggactttcactatcttaaatttccaaggtaattacatctcctatattgatgggaacgtttggaaggcctacagttggacggagaaactcattctgagagagaataatctaactgagctgcacaaagatagtttcgagggcctactctcgctgcaatatctggatctttcatgtaataagattcagagtattgagcgtcacacatttgagcccctgccttttctgaagtttataaatttgagctgcaatgtgattacagagcttagctttggcacatttcaggcctggcacggaatgcagtttctgcacaaactcatcctaaaccacaaccccctcacaaccgtagaggacccgtacctcttcaagctgcccgcactcaagtatctcgacatggggaccaccctcgtgccacttacgacactgaagaacatcctcatgatgaccgtagagctcgagaagctgatcctgccttcacacatggcttgttgcctatgtcaattcaaaaactcgattgaagccgtgtgcaagaccgtgaaacttcattgtaactctgcttgcctgacgaatacaactcactgcccagaagaggcatcagtcggaaatcctgaaggcgcgtttatgaaagtgttacaagccagaaagaattatacctcaaccgagctcatcgtagaacccgaggaaccatctgatagtagcggcattaacttgtctggatttgggagcgagcagctcgacaccaatgacgagtctgattttattagcacactttcatacatcttgccatacttcagcgccgtgaatctcgacgtgaagagtttactgctcccattcattaagctacccacaactggcaatagcctggccaagatccaaacagtgggtcaaaatagacagcgcgtaaagagggtgctgatgggacctcggtcaatccagaagagacatttcaaagaggttggaaggcagagcatccgaagggagcagggcgcccaggcaagtgtggagaacgcggccgaggagaaacggcttacttcacctgcaccccgagaggtggaacaaccacacacgcaacagggacctgagaagctggccggcaacgccgtgtacacaaagccttccttcacacaggaacacaaagctgccgtgagcgtgttgaaacctttctccaaagggacccccagcacaagctccccagccaaagccctgccacaggtgagggataggtcaaaggatttaacacatgcgatctcgattttggagtcggccaaggccagggtcacaaacaccaaaacttccaagcccatcgtacacgcccgaaaaaagtatagatttcacaaaacaagatcacatgtgacacacaggacgaccaaggtcaagaaaagccccaaagtgcggaagaaatcttatctcagccgcctaatgctggctaataggcttcctttcagtgctgctaaatcattaattaactcaccctcacagggggctttcagctccctcggcgatctgtctcctcaggagaacccctttttagaagtgagcgcactgtctgagcatttcatcgaaaaaaataataccaaacacaccacggcccggaatgcttttgaagagaatgacttcatggaaaatactaacatgcctgaggggaccatctccgagaacaccaactacaaccaccccccagaagccgattctgcaggtacagccttcaatttaggaccgacagtgaagcagacagagaccaagtgggaatacaacaatgtgggaaccgatctgtccccagagcctaaaagttttaattatcctctgttatcatctccaggtgatcagttcgagatccagcttactcaacagctgcaatctctgatacccaacaataatgtccgtcgccttatcgctcacgtgatccggacactgaagatggattgtagcggggcccacgtccaagtcacatgcgctaaactgatctctcggacgggacatctgatgaagttactctccggccagcaggaagtgaaggcctccaaaattgagtgggatacggatcagtggaagatagagaattatattaacgagtccactgaggcccagagcgaacagaaggagaagagcctggaactaaagaaagaggttcccggatatggctacaccgataagttgatactggccctgatcgtgaccggaatcctgactatcctgataattctgttttgccttattgtcatttgttgtcatcgcagaagtttacaagaagacgaggagggattctccagagggatttttaggtttctgccttggagggggtgctcatcaaggagggagagccaggatgggctctccagctttgggcagcccctgtggtttaaagatctttataagcccctgagtgcgaccaggattaacaatcatgcgtggaagctgcataagaaatccagcaacgaagacaagatcttaaacagagacccaggagattccgaggccccaaccgaagaggaagaaagtgaggccttgccatag

SEQ ID NO: 182532 - DNA, 5177 bp, Artificial Sequence
  derived and/or modified sequence
agaatgtcttctgctcagtgcccggcactagtgtgtgtcatgtcccggctgcgtttctggggcccatggcccctccttatgtggcaactattgtggctactagtcaaggaggctcagcctctggagtgggtcaaggacccgctccagctcacctctaatcccctggggccgcctgagtcctggtcttcccactcctcccatttcccacgggaatctccccatgcgcctactctcccagcagacccgtgggactttgatcacctggggccctctgcttcctcagagatgccagccccaccccaggaatcgactgaaaatttggttccattcctggacacctgggattcagctggagagcagcccctggagccagagcagttcttggcttcacagcaggatttaaaggacaagctgagtccacaggaaaggctccctgtttcgcccaagaagctgaagaaagatccagctcagcgttggagccttgctgagattattggaattacacgccaattatccacacctcagagtcagaaacagactttgcagaatgaatattccagtacagatacaccgtatcccggtagcctgcctccagaactccgggtgaagtcagatgagcctccagggccctctgagcaagttggaccttctcaattccatctagagcccgaaactcaaaatccagagacccttgaagacatccagtcctcttcactccagcaagaagccccagcacagcttccacagctccttgaggaagaaccttcttcaatgcagcaggaggccccagctctgcctccagagtcctctatggagagtctaactctaccgaatcatgaggtgtcagttcaacctccaggtgaggatcaagcttattatcacttgcccaacattacagttaaacctgcagatgtggaggttaccataacttcagagcctaccaatgagacagaatcttcccaagcccagcaggagaccccaattcagtttccagaggaggtggaaccttctgcaacccaacaggaggccccaattgagcctccagttcctcctatggagcatgaactttccatcagtgagcagcagcagccagttcagccttctgagtctcctagggaggtcgaatcttctccgacccagcaggagaccccaggtcagcctccagaacatcatgaagtcacagtttcacctccaggtcaccatcaaactcatcatttagcttcacccagtgtctctgtgaagcctccagacgtgcagctcaccatagcagcagagcctagtgcagaggtgggaacttctctagtccaccaggaggctacaactcggctctcagggtcaggtaatgatgtagaacctcccgccatccagcacgggggcccacctctgcttccagagtcatcagaagaagctggacctttagcagttcaacaggagacttcatttcaatctccggaacctattaataatgagaacccctctccaacccagcaggaggctgcagctgagcatccacagaccgctgaggagggtgagtcttccctaacccatcaggaggccccagctcagactccagagttccctaatgtagttgtagctcaacctccagagcattcacacctgactcaagccacagttcaacctttggatctggggtttaccatcactccagaatccaagacagaggttgaactttctccaaccatgaaggagaccccaactcagcctcctaagaaagttgtaccccaacttcgagtatatcaaggggtaacaaatccaacaccaggtcaggatcaagctcagcatccagtgtcacccagcgttacagttcaacttttggacctgggacttaccatcactccagaacctactacggaggttggacattctacacccccgaagaggactatagtttctccaaagcatcctgaggtgacacttccacatccagaccaggttcagactcagcattcacacctgactcgagccacagttcaacctttggacctggggtttaccatcactccaaaatccatgacagaggttgaaccttctacagccctgatgactacagctcctcctccaggacaccctgaggtgacacttccaccttcagacaagggtcaggctcagcattcacacctgactcaagccaccgttcaacctctggacctggagcttaccataactacaaaacctactacagaggttaaaccatctccaaccacggaggagacctcaactcagcctccagacctgggacttgccatcattccagaacccactacagagactggacattctacagccctggagaagactacagctcctcgtccagaccgggttcagactctgcatcgaagcctgactgaagtcacaggtccacctactgaactagaacctgctcaggattcactggtgcagtctgaaagttacacccaaaataaggctttaactgcaccagaggaacacaaggcctccacaagcaccaacatatgtgagctctgtacctgcggagatgagatgttgtcatgtattgatctcaacccagagcagaggctccgccaagtgcctgtgccagagcccaacacccacaatggcaccttcaccatcttaaatttccaaggaaactatatttcttacattgatggaaatgtatggaaagcatacagttggactgagaaactaattctcagagaaaataacttgactgaattacacaaggattcatttgaaggcctgctatccctccagtatttagatttatcctgcaataaaatacagtctattgaaagacatacatttgaaccactaccatttttgaagtttataaatcttagttgcaatgtaattacagaactcagctttggaacatttcaggcctggcacggaatgcagtttttacataagttaattctcaatcacaatcctctgacaactgttgaagatccgtatctctttaaattgccagcattaaaatatctagacatgggaacaacgctagtcccacttacaacacttaagaacattctcatgatgactgttgaactggaaaaactgatcttacctagccatatggcctgctgcctctgccaatttaaaaacagcattgaggctgtctgcaagacagtcaagctgcattgcaacagtgcatgtctgacaaacaccacacattgtcctgaagaagcatcggtagggaatccagaaggagcgttcatgaaggtgttacaagcccggaagaactacacaagcactgagctgattgttgagccagaggagccctcagacagcagtggcatcaacttgtcaggctttgggagtgagcagctagacaccaatgacgagagtgattttatcagtacactaagttacatcttgccttatttctcagcggtaaacctagatgtgaaatcactgttactaccgttcattaaactgccaaccacaggaaacagcctggcaaagattcaaactgtaggccaaaaccggcagagagtgaagagagtcctcatgggcccaaggagcatccagaaaaggcacttcaaagaggtaggaaggcagagcatcaggagggaacagggtgcccaggcatctgtggagaacgctgccgaagaaaaaaggctcacgagtccagccccaagggaggtggaacagccccacacacagcaggggcctgagaagttagcgggaaacgccgtctacaccaagccttcgttcacccaagagcataaggcagcagtctctgtgctgaaacccttctccaagggcacgccttctacctccagccctgcaaaagccctaccacaggtgagagacagatcgaaagacttaacccacgctatttccattttagaaagtgcaaaggctagagttacaaatacgaagacgtctaaaccaatcgtacatgccagaaaaaaataccgctttcacaaaactcgctcccacgtgacccacagaacaaccaaagtcaaaaagagtccaaaggtcagaaagaaaagttatctgagtagactgatgctcgcaaacaggcttccattctctgcagcgaagagcctcataaattccccttcacaaggggctttttcatccttaggagacctgagtcctcaagaaaacccttttctggaagtatctgctctttcagaacattttatagagaagaataatacaaaacacacaactgcaagaaatgcctttgaagaaaatgattttatggaaaacactaacatgccagaaggaaccatctctgaaaacacaaactacaatcatcctcctgaggcagattccgctgggactgcattcaacttagggccaactgttaaacaaactgagacaaaatgggaatacaacaacgtgggcactgacctgtcccccgagcccaaaagcttcaattacccattgctctcgtccccaggtgatcagtttgaaattcagctaacccagcagctacagtcccttatccccaacaacaatgtgagaaggctcattgctcatgttatccggaccttgaagatggactgctctggggcccatgtgcaagtgacctgtgccaagctcatctccaggacaggccacctgatgaagcttctcagtgggcagcaggaagtaaaggcatccaagatagaatgggatacggaccaatggaagattgagaactacattaatgagagcacagaagcccagagtgaacagaaagagaagtcgcttgagctcaaaaaagaagttccaggatatggctatactgacaaactcatcttggcattaattgttactggaatactaacgattttgattatacttttctgcctcattgtgatatgttgtcaccgaaggtcattacaagaagatgaagaaggattctcaaggggcattttcagatttctgccatggaggggatgctcttcgcgaagggagagtcaggatggactttcctcatttggacagccgctctggtttaaagatctgtacaaacctctcagtgccacaagaataaataatcatgcatggaagctgcacaagaagtcatctaatgaggacaagatcctcaacagggaccctggggacagcgaagccccaacggaggaggaggagagtgaagccctgccataggaggagaacacagcccacctcaggcctcctgcaaaaatacatagaataaacaacaacagttactaaatgaa

SEQ ID NO: 182533 - DNA, 5818 bp, Artificial Sequence
  derived and/or modified sequence
cttcctgtgaaatgtgagaggaagtcagcactcatttcagaaatctgattataacgatagctccatccctaaatgaggtgaatcttggactctcttccattttattttattttatttttttgagatggagtttctctcttgttgcccaggctgaagtgcaatgttgcgatctcggctcactgcaacctctgcctcccaggttcaagtgattctcctgctttggcctcctgagtagctgggattgcaggtcagttgctctccctggaaggaagagtgttctcggatttcaccttaaaggaggaaggctgccagaactgaactagcacttctgaatatcctgaggcgaggtccggtgacttccttgggaagctctgccgcgcccccaccccaccctaccccaccctaccccaccacagcaggcgctggagtcctgggaccaccagggtctgaggcccaaatccttcctcactaaggggaggagaggggtgttccggcagggcaggatgggaaggcgtgcttgggcgggattgtgacataagagtgccctggtgacatggagcagatctgtgacataaataaaggtgtcataaagacagggcggggctcacgcttagaaggggcacgagcgtctcggagctgccagaatgtcttctgctcagtgcccggcactagtgtgtgtcatgtcccggctgcgtttctggggcccatggcccctccttatgtggcaactattgtggctactagtcaaggaggctcagcctctggagtgggtcaaggacccgctccagctcacctctaatcccctggggccgcctgagtcctggtcttcccactcctcccatttcccacgggaatctccccatgcgcctactctcccagcagacccgtgggactttgatcacctggggccctctgcttcctcagagatgccagccccaccccaggaatcgactgaaaatttggttccattcctggacacctgggattcagctggagagcagcccctggagccagagcagttcttggcttcacagcaggatttaaaggacaagctgagtccacaggaaaggctccctgtttcgcccaagaagctgaagaaagatccagctcagcgttggagccttgctgagattattggaattacacgccaattatccacacctcagagtcagaaacagactttgcagaatgaatattccagtacagatacaccgtatcccggtagcctgcctccagaactccgggtgaagtcagatgagcctccagggccctctgagcaagttggaccttctcaattccatctagagcccgaaactcaaaatccagagacccttgaagacatccagtcctcttcactccagcaagaagccccagcacagcttccacagctccttgaggaagaaccttcttcaatgcagcaggaggccccagctctgcctccagagtcctctatggagagtctaactctaccgaatcatgaggtgtcagttcaacctccaggtgaggatcaagcttattatcacttgcccaacattacagttaaacctgcagatgtggaggttaccataacttcagagcctaccaatgagacagaatcttcccaagcccagcaggagaccccaattcagtttccagaggaggtggaaccttctgcaacccaacaggaggccccaattgagcctccagttcctcctatggagcatgaactttccatcagtgagcagcagcagccagttcagccttctgagtctcctagggaggtcgaatcttctccgacccagcaggagaccccaggtcagcctccagaacatcatgaagtcacagtttcacctccaggtcaccatcaaactcatcatttagcttcacccagtgtctctgtgaagcctccagacgtgcagctcaccatagcagcagagcctagtgcagaggtgggaacttctctagtccaccaggaggctacaactcggctctcagggtcaggtaatgatgtagaacctcccgccatccagcacgggggcccacctctgcttccagagtcatcagaagaagctggacctttagcagttcaacaggagacttcatttcaatctccggaacctattaataatgagaacccctctccaacccagcaggaggctgcagctgagcatccacagaccgctgaggagggtgagtcttccctaacccatcaggaggccccagctcagactccagagttccctaatgtagttgtagctcaacctccagagcattcacacctgactcaagccacagttcaacctttggatctggggtttaccatcactccagaatccaagacagaggttgaactttctccaaccatgaaggagaccccaactcagcctcctaagaaagttgtaccccaacttcgagtatatcaaggggtaacaaatccaacaccaggtcaggatcaagctcagcatccagtgtcacccagcgttacagttcaacttttggacctgggacttaccatcactccagaacctactacggaggttggacattctacacccccgaagaggactatagtttctccaaagcatcctgaggtgacacttccacatccagaccaggttcagactcagcattcacacctgactcgagccacagttcaacctttggacctggggtttaccatcactccaaaatccatgacagaggttgaaccttctacagccctgatgactacagctcctcctccaggacaccctgaggtgacacttccaccttcagacaagggtcaggctcagcattcacacctgactcaagccaccgttcaacctctggacctggagcttaccataactacaaaacctactacagaggttaaaccatctccaaccacggaggagacctcaactcagcctccagacctgggacttgccatcattccagaacccactacagagactggacattctacagccctggagaagactacagctcctcgtccagaccgggttcagactctgcatcgaagcctgactgaagtcacaggtccacctactgaactagaacctgctcaggattcactggtgcagtctgaaagttacacccaaaataaggctttaactgcaccagaggaacacaaggcctccacaagcaccaacatatgtgagctctgtacctgcggagatgagatgttgtcatgtattgatctcaacccagagcagaggctccgccaagtgcctgtgccagagcccaacacccacaatggcaccttcaccatcttaaatttccaaggaaactatatttcttacattgatggaaatgtatggaaagcatacagttggactgagaaactaattctcagagaaaataacttgactgaattacacaaggattcatttgaaggcctgctatccctccagtatttagatttatcctgcaataaaatacagtctattgaaagacatacatttgaaccactaccatttttgaagtttataaatcttagttgcaatgtaattacagaactcagctttggaacatttcaggcctggcacggaatgcagtttttacataagttaattctcaatcacaatcctctgacaactgttgaagatccgtatctctttaaattgccagcattaaaatatctagacatgggaacaacgctagtcccacttacaacacttaagaacattctcatgatgactgttgaactggaaaaactgatcttacctagccatatggcctgctgcctctgccaatttaaaaacagcattgaggctgtctgcaagacagtcaagctgcattgcaacagtgcatgtctgacaaacaccacacattgtcctgaagaagcatcggtagggaatccagaaggagcgttcatgaaggtgttacaagcccggaagaactacacaagcactgagctgattgttgagccagaggagccctcagacagcagtggcatcaacttgtcaggctttgggagtgagcagctagacaccaatgacgagagtgattttatcagtacactaagttacatcttgccttatttctcagcggtaaacctagatgtgaaatcactgttactaccgttcattaaactgccaaccacaggaaacagcctggcaaagattcaaactgtaggccaaaaccggcagagagtgaagagagtcctcatgggcccaaggagcatccagaaaaggcacttcaaagaggtaggaaggcagagcatcaggagggaacagggtgcccaggcatctgtggagaacgctgccgaagaaaaaaggctcacgagtccagccccaagggaggtggaacagccccacacacagcaggggcctgagaagttagcgggaaacgccgtctacaccaagccttcgttcacccaagagcataaggcagcagtctctgtgctgaaacccttctccaagggcacgccttctacctccagccctgcaaaagccctaccacaggtgagagacagatcgaaagacttaacccacgctatttccattttagaaagtgcaaaggctagagttacaaatacgaagacgtctaaaccaatcgtacatgccagaaaaaaataccgctttcacaaaactcgctcccacgtgacccacagaacaaccaaagtcaaaaagagtccaaaggtcagaaagaaaagttatctgagtagactgatgctcgcaaacaggcttccattctctgcagcgaagagcctcataaattccccttcacaaggggctttttcatccttaggagacctgagtcctcaagaaaacccttttctggaagtatctgctctttcagaacattttatagagaagaataatacaaaacacacaactgcaagaaatgcctttgaagaaaatgattttatggaaaacactaacatgccagaaggaaccatctctgaaaacacaaactacaatcatcctcctgaggcagattccgctgggactgcattcaacttagggccaactgttaaacaaactgagacaaaatgggaatacaacaacgtgggcactgacctgtcccccgagcccaaaagcttcaattacccattgctctcgtccccaggtgatcagtttgaaattcagctaacccagcagctacagtcccttatccccaacaacaatgtgagaaggctcattgctcatgttatccggaccttgaagatggactgctctggggcccatgtgcaagtgacctgtgccaagctcatctccaggacaggccacctgatgaagcttctcagtgggcagcaggaagtaaaggcatccaagatagaatgggatacggaccaatggaagattgagaactacattaatgagagcacagaagcccagagtgaacagaaagagaagtcgcttgagctcaaaaaagaagttccaggatatggctatactgacaaactcatcttggcattaattgttactggaatactaacgattttgattatacttttctgcctcattgtgatatgttgtcaccgaaggtcattacaagaagatgaagaaggattctcaaggggcattttcagatttctgccatggaggggatgctcttcgcgaagggagagtcaggatggactttcctcatttggacagccgctctggtttaaagatctgtacaaacctctcagtgccacaagaataaataatcatgcatggaagctgcacaagaagtcatctaatgaggacaagatcctcaacagggaccctggggacagcgaagccccaacggaggaggaggagagtgaagccctgccataggaggagaacacagcccacctcaggcctcctgcaaaaatacatagaataaacaacaacagttactaaatgaa

SEQ ID NO: 182534 - DNA, 5103 bp, Artificial Sequence
  derived and/or modified sequence
atgagcagcgcccagtgcccagccctggtgtgtgtgatgagccggctgcgcttctggggcccctggcccctgctgatgtggcagctgctgtggctgctggtgaaggaggcccagcccctggagtgggtgaaggaccccctgcagctgaccagcaaccccctgggccccccagagagctggagcagccacagcagccacttcccccgggagagcccccacgcccccaccctgcctgctgacccctgggactttgaccacctgggccccagcgccagcagcgagatgcctgccccaccccaggagagcacagagaacctggtgcccttcctggacacctgggacagcgctggggagcagcccctggagcctgagcagttcctggccagccagcaggacctgaaggacaagctgagcccccaggagcggctgcctgtgagccccaagaagctgaagaaggaccctgcccagcgctggagcctggccgagatcatcggcatcacccggcagctgagcaccccccagagccagaagcagaccctgcagaatgagtacagcagcacagacaccccctacccaggcagcctgcccccagagctgcgggtgaagagtgatgagcccccaggccccagcgagcaggtgggccccagccagttccacctggagcctgagacccagaaccctgagaccctggaggacatccagagcagcagcctgcagcaggaggccccagcccagctgccccagctgctggaggaggagcccagctccatgcagcaggaggccccagccctgcccccagagagctccatggagagcctgaccctgcccaaccacgaggtgtctgtgcagcccccaggagaggaccaggcctactaccacctgcccaacatcaccgtgaagccagcagatgtggaggtgaccatcaccagcgagcccaccaatgaaacagagagcagccaggcccagcaggagacccccatccagtttcctgaggaggtggagcccagcgccacccagcaggaggcccccatcgagccccctgtgccccccatggagcacgagctgagcatcagcgagcagcagcagcctgtgcagcccagcgagagcccccgggaggtggagagcagccccacccagcaggagaccccaggccagcccccagagcaccacgaggtgacagtgagccccccaggccaccaccagacccaccacctggccagccccagcgtgtctgtgaagcccccagatgtgcagctgaccatcgctgctgagcccagcgctgaggtgggcaccagcctggtgcaccaggaggccaccacccggctgagcggcagcggaaatgatgtggagcccccagccatccagcacggcggcccccccctgctgcctgagagcagcgaggaggccggccccctggccgtgcagcaggagaccagcttccagagccctgagcccatcaacaatgaaaaccccagccccacccagcaggaggccgctgctgagcacccccagacagctgaggagggggagagcagcctgacccaccaggaggccccagcccagaccccagagttccccaacgtggtggtggcccagcccccagagcacagccacctgacccaggccaccgtgcagcccctggacctgggcttcaccatcaccccagagagcaagacagaggtggagctgagccccaccatgaaggagacccccacccagccccccaagaaggtggtgccccagctgcgggtgtaccagggcgtgaccaaccccaccccaggccaggaccaggcccagcaccctgtgagccccagcgtgacagtgcagctgctggacctgggcctgaccatcaccccagagcccaccacagaggtgggccacagcaccccacccaagaggaccatcgtgagccccaagcaccctgaggtgaccctgccccacccagaccaggtgcagacccagcacagccacctgacccgggccaccgtgcagcccctggacctgggcttcaccatcacccccaagtccatgacagaggtggagcccagcacagccctgatgaccacagcccctcctcctggccaccctgaggtgaccctgcccccaagtgacaagggccaggcccagcacagccacctgacccaggccaccgtgcagcccctggacctggagctgaccatcaccaccaagcccaccacagaggtgaagcccagccccaccacagaggagaccagcacccagcccccagacctgggcctggccatcatccctgagcccaccacagaaacaggccacagcacagccctggagaagaccacagcccccaggccagacagagtgcagaccctgcacaggagcctgacagaggtgactggaccacccacagagctggagcccgcccaggacagcctggtgcagagcgagagctacacccagaacaaggccctgacagcccctgaggagcacaaggccagcaccagcaccaacatctgtgagctgtgcacctgtggagatgagatgctgagctgcatcgacctgaaccctgagcagaggctgcggcaggtgcctgtgcctgagcccaacacccacaacggcaccttcaccatcctgaacttccagggcaactacatctcctacattgatggaaatgtgtggaaggcctacagctggacagagaagctgatcctgcgggagaacaacctgacagagctgcacaaggacagctttgagggcctgctgagcctgcagtacctggacctgagctgcaacaagatccagagcattgaaagacacacctttgagcccctgcccttcctgaagttcatcaacctgagctgcaacgtcatcacagagctgagctttggcaccttccaggcctggcacggcatgcagttcctgcacaagctgatcctgaaccacaaccccctgaccaccgtggaggacccctacctgttcaagctgcctgccctgaagtacctggacatgggcaccaccctggtgcccctgaccaccctgaagaacatcctgatgatgacagtggagctggagaagctgatcctgcccagccacatggcctgctgcctgtgccagttcaagaacagcattgaagctgtgtgcaagacagtgaagctgcactgcaacagcgcctgcctgaccaacaccacccactgcccagaggaggcctctgtgggcaaccctgagggcgccttcatgaaggtgctgcaggccaggaagaactacaccagcacagagctgattgtggagcctgaggagcccagcgacagcagcggcatcaacctgagcggctttggaagtgagcagctggacaccaatgatgaaagtgacttcatcagcaccctgagctacatcctgccctacttctctgctgtgaacctggatgtgaagagcctgctgctgcccttcatcaagctgcccaccactggaaacagcctggccaagatccagacagtgggccagaaccggcagagggtgaagagggtgctgatgggccccaggagcatccagaagaggcacttcaaggaggtgggccggcagagcatccggcgggagcagggcgcccaggcctctgtggagaatgctgctgaggagaagaggctgaccagccctgccccccgggaggtggagcagccccacacccagcagggccctgagaagctggccggaaatgctgtgtacaccaagcccagcttcacccaggagcacaaggctgctgtgtctgtgctgaagcccttcagcaagggcacccccagcaccagcagccctgccaaggccctgccccaggtgcgggacaggagcaaggacctgacccacgccatcagcatcctggagagcgccaaggcccgggtgaccaacaccaagaccagcaagcccatcgtgcacgccaggaagaagtaccgcttccacaagaccaggagccacgtgacccacaggaccaccaaggtgaagaagagccccaaggtgaggaagaagagctacctgagccggctgatgctggccaaccggctgcccttctctgctgccaagagcctcatcaacagccccagccagggcgccttcagcagcctgggggacctgagcccccaggagaaccccttcctggaggtgtctgccctgtctgagcacttcatcgagaagaacaacaccaagcacaccacagccagaaatgcctttgaagaaaatgacttcatggagaacaccaacatgcctgagggcaccatcagcgagaacaccaactacaaccaccccccagaggccgacagcgctggaacagccttcaacctgggccccaccgtgaagcagacagagaccaagtgggagtacaacaacgtgggcacagacctgagccctgagcccaagagcttcaactaccccctgctgagcagccctggggaccagtttgagatccagctgacccagcagctgcagagcctcatccccaacaacaacgtgagaagactcatcgcccacgtgatccgcaccctgaagatggactgcagcggggcccacgtgcaggtgacctgtgccaagctgatcagcaggacaggccacctgatgaagctgctgagcggccagcaggaggtgaaggccagcaagattgagtgggacacagaccagtggaagattgagaactacatcaatgaaagcacagaggcccagagcgagcagaaggagaagagcctggagctgaagaaggaggtgcccggctacggctacacagacaagctgatcctggccctgattgtgacaggcatcctgaccatcctgatcatcctcttctgcctgattgtcatctgctgccaccggcgcagcctgcaggaggatgaggagggcttcagccggggcatcttccgcttcctgccctggaggggctgcagcagccggcgggagagccaggacggcctgagcagctttggccagcccctgtggttcaaggacctgtacaagcccctgagcgccacccgcatcaacaaccacgcctggaagctgcacaagaagagcagcaatgaagacaagatcctgaacagagaccccggggacagcgaggcccccacagaggaggaggagagcgaggccctgccctag

SEQ ID NO: 182535 - DNA, 5103 bp, Artificial Sequence
  derived and/or modified sequence
atgagcagcgcccagtgccccgccctggtgtgcgtgatgagccggttgaggttttggggaccttggccgctccttatgtggcagctgctgtggttattggtgaaggaggcacaacccctggagtgggtcaaagacccactacagttaacttctaacccactcgggccacctgagagttggtcgagccacagctcacacttcccacgggaaagtccacacgccccaactctccccgctgatccatgggatttcgaccacctggggccatcggcctcaagtgaaatgccagccccaccccaggagagcactgaaaacttggtgccattcctcgacacgtgggattcagccggcgaacagccgctagagcccgagcagttcttggcttctcagcaggatctcaaggacaagctttccccccaggagaggctgccagtcagtcccaaaaaactgaagaaagacccagcccagcgctggtctctcgccgaaataatcgggatcacgcgacagctgagcaccccacagagccaaaaacaaacactgcagaatgagtattcatccaccgacactccatatccgggatctctgcctcctgaactcagggttaagtcagatgagccacctggcccctccgagcaagtgggtccatctcagttccatcttgagcctgaaacccagaatcctgaaacgctggaggacattcagagcagcagcctccagcaggaggctcctgcgcaactgccccagttgttagaagaggagccaagtagcatgcagcaggaggctcccgcactgccaccagagagttcaatggagagccttactctgccaaatcatgaagtgtcggtgcagcctccaggtgaggaccaggcctactaccacctgcccaatatcactgtgaagccagccgacgtggaagtcactatcacttcagaaccaaccaacgagaccgagtccagccaagcccagcaggagacacccattcagttccctgaggaagtggagccttcagcaactcaacaggaagccccaatcgagccccctgtgccgccgatggagcacgagctctcaatctctgaacaacagcagccagtgcagccaagtgaaagtccaagggaggtggagagctccccaacacagcaggagactccaggacaacctcctgagcaccatgaagtgactgtgtcccccccaggccaccaccagacgcaccatctggcttcacccagtgtgtccgttaaaccacccgacgtacaactcaccattgccgccgagccctcagcggaagtgggtacgtccctggtacaccaagaagccaccacacgattatccggctccgggaacgacgtggaaccaccagcaatacaacatgggggtccaccactactgcccgagtcatcagaggaagctggtccgctcgccgtccaacaggagacaagcttccagtctccagagccaattaacaacgaaaacccgagccccacacagcaagaagccgccgccgagcacccacagaccgccgaagaaggggaatcatcccttacacaccaggaagccccggcccagacccctgaattccccaatgttgttgtggctcaaccgcccgagcatagccaccttacacaagctactgtgcagcctctggatctgggtttcactataaccccggaaagcaagactgaggttgagctcagtcctacaatgaaggagactccaacacagcccccgaagaaagtcgttcctcagcttagggtgtatcagggggtcacaaacccgactccgggacaggatcaagcccagcatcctgtttctcctagcgttacagtacagctgcttgatcttggtcttactataactccggaaccgaccactgaagtaggccattccacacccccaaagcgaaccattgtcagtcctaaacaccccgaagtgaccctgccccaccccgatcaagtgcagacccagcattcacatctaacccgcgccactgtgcagcctctggacttgggttttaccatcacacctaagtccatgactgaggtcgagccctccacggcgctaatgaccacagcaccaccaccaggtcaccccgaagttacccttccgccttccgataagggacaggcccaacactctcatttgacccaggctacagtacagcccctggatctggaactgacaattaccaccaaaccaaccactgaggtgaaaccaagtccaactactgaggaaacttccacacagcctccggacctggggcttgcaattatcccggagcccacaactgagacaggacactctacagccttggaaaagacgacggccccacggcccgaccgagtgcagaccctgcaccgctccttgaccgaggtaacgggaccaccgacagagcttgagcccgcgcaggatagcctggtgcagtccgaaagctacacacagaataaggcccttacggctccagaggagcataaggcatctactagcacaaacatatgcgagctgtgtacctgtggagacgagatgctgagctgtatcgacctaaatcccgaacagagactcaggcaagtgccggtaccggagcccaacacacataacggcacttttaccattcttaacttccaggggaactatatctcttacattgacggaaatgtgtggaaagcttattcttggacagaaaagctcattctgcgggagaacaacttaacagaacttcacaaagactcctttgaaggactcctgagcctccagtatttggacctgagttgcaacaaaatccagtcaattgagaggcacacttttgaaccgctgcctttcttgaagtttataaacctgtcatgcaacgttattacagaactgtcttttggaacattccaggcgtggcacggtatgcagttcttgcataagctcattctgaatcacaatccgctcactacagttgaggacccatatctgttcaagctccctgctcttaagtatcttgacatgggcaccacactggtaccactcaccaccctcaaaaatatcctaatgatgaccgtcgagctagaaaagcttattctgccaagccacatggcttgctgtttgtgccagttcaaaaattctatcgaggcagtgtgcaaaactgtcaagctgcactgcaatagcgcctgtctgaccaataccacccattgcccagaggaggctagtgtcgggaatccggagggtgcgttcatgaaggtgctgcaggcccggaaaaattacacaagcacagaacttatcgtcgagcccgaggaacctagcgacagcagcgggattaacctgagcggatttgggtcggagcagctcgacaccaacgacgagtccgattttataagcaccctgtcatatatcctgccatacttttcagcagtgaacctcgatgtgaagtccctcttgctgccttttatcaaactcccgacaactggaaattcactggccaagattcagaccgttgggcagaacaggcagagggtgaagcgggtcctgatgggacctcggagcattcaaaagcggcatttcaaggaggtggggaggcaaagtatcaggcgggagcagggagcccaagcttcagtggaaaacgccgctgaggagaagagattgacctcccccgcccctagagaggtcgaacagccacacacacaacaggggcccgaaaaactggcaggcaatgctgtgtatactaaaccttcttttacgcaggaacacaaagctgcggttagcgtgctcaagcctttctctaaagggactccatctacctcctccccagcgaaggccctcccacaagtgagggaccgttctaaggatttaacccacgccatcagcatacttgagtccgcgaaagccagagtgactaacacgaaaacctcaaaacctattgtccatgcccggaagaagtaccggttccataagaccagatcgcatgtgacccacaggacaaccaaagtgaagaagagtccgaaagtccgtaagaagtcctatctttccagattaatgcttgccaatcggttgccattctctgccgctaaaagcctcattaacagtccctcccagggagcattctcctccctgggcgatcttagccctcaggagaatccttttttagaggtgagtgccctctccgagcacttcatcgaaaagaacaatactaagcataccacggccaggaatgcctttgaggagaacgacttcatggaaaacaccaacatgccagaaggaaccatctcagaaaacactaactataatcaccctcccgaagccgatagcgctgggaccgcctttaatcttggaccaaccgtgaaacaaacggagaccaagtgggagtacaataatgtgggaacagatctcagccccgagcctaaatcttttaattaccctttattgagcagtcccggcgatcagtttgaaatccagctgacgcagcaactgcagagtctgatccctaacaataacgtccgccggctgatcgcccacgtaatacggacacttaagatggattgctccggcgcccacgttcaggttacatgcgcaaagttgatcagccggaccggacatctcatgaaactgctcagcggacagcaggaagtgaaggcttcaaagatcgagtgggatacagatcagtggaaaatcgaaaactatatcaacgaatcaaccgaggcgcagagtgaacagaaagagaagagtctggagctgaagaaggaggtccctgggtatgggtacaccgataaactgatcctcgcgttgatcgtgacaggaatcctcacaattcttattatccttttctgcctgattgtcatatgttgccacaggcgcagtctgcaggaagacgaggagggattctccaggggcatattccgttttcttccgtggaggggctgtagtagtcgcagggaatcccaggatgggcttagcagttttggacagcctttatggtttaaggatttgtataaaccactgtctgcaacgagaatcaacaatcacgcctggaagttacataaaaagagtagtaatgaagacaagatccttaacagggaccctggtgactctgaagccccaacagaggaagaggaatctgaggcgctgccatag

SEQ ID NO: 182536 - DNA, 5103 bp, Artificial Sequence
  derived and/or modified sequence
atgagcagcgcccagtgccccgccctggtgtgcgtgatgagccggctccggttttgggggccttggcccctgttgatgtggcagctgctttggctgctggtcaaggaagcacaacctcttgagtgggtgaaagatcctctccagctcactagcaacccgttaggcccacctgagagttggtcctctcatagcagtcactttcctcgtgagagccctcacgcaccaacattgccggctgatccttgggactttgaccatctgggcccttctgcctcctctgaaatgcctgccccaccccaagagtctaccgaaaacctggtgcctttcctcgacacctgggactctgccggtgagcagccacttgaacctgaacagtttttggcctcccagcaggacctgaaggataaactgagtccccaggaaaggctaccagtttctccaaaaaagctcaagaaggatcctgcacagcggtggagcttggcggagattatcgggattactaggcagttgtccactcctcaaagtcaaaaacaaactctgcagaacgagtacagtagtaccgacaccccctaccctggcagcctgcctccagagctgagggtcaaatcagacgaaccccccggaccatcagagcaggtaggtccttcacagtttcacctggaacctgagacacagaacccggaaaccctggaggacatccagtcttcatctcttcagcaggaggcgccggctcagctcccccagctgctggaggaagaaccatccagtatgcagcaagaggctccagcactgccccctgagtcttctatggaatcactgactcttccaaaccacgaagtgtccgtgcaaccccctggagaagaccaagcttattaccacctgccaaacatcaccgtgaagcccgcagacgtcgaagttactattactagcgagccgacaaacgaaacggaaagtagccaggcccagcaggagacacccattcagttcccggaggaagtggaaccttctgctacgcaacaggaagcacctatcgagcctcctgttccccctatggagcacgagctttccataagcgaacagcagcagcccgttcagccctccgaatctccccgcgaggtcgaatcatcaccaacacaacaggagaccccaggtcagcctcctgaacaccacgaagtcaccgtaagcccccctggacaccaccaaacacatcatttagcctccccaagcgttagtgtgaagccaccggacgtgcagctgactatcgccgctgaaccttcagccgaggtgggaacctcgctggtgcatcaggaggctactacccgcttgagcggaagcggcaatgacgtagaacccccagcaatccagcacggtggaccacccttgctgcccgaatcatcagaggaagcgggcccgctggcagtgcagcaggagacttcgtttcaaagtccggaaccaataaacaacgagaatccctccccgactcaacaagaggcagctgccgagcacccccagaccgctgaagaaggagaatcgtctctgacccaccaagaggcacccgcacaaacccccgagttccccaacgtcgtcgtcgcccaaccaccagaacattcacacttgacacaggccaccgtgcagcctcttgatctgggcttcacaatcaccccggagagtaagacagaggttgaactgagccctacaatgaaagaaacccccacccagccccccaagaaagttgtaccgcagctgcgtgtgtaccagggggtgaccaaccctacgcctggtcaggaccaggcccagcaccctgtttcccctagtgtgaccgtgcagctgctcgatcttggcctgactatcacgcccgaacccacaaccgaagttggtcactcaaccccgccaaaaagaacaatcgtaagtcccaagcacccggaagttaccctcccacaccccgaccaggtgcagacccagcacagccacctcactcgggcaacggtacagcctctcgatttgggttttactatcactcccaagagcatgactgaagtggagccgagcaccgccctcatgaccactgcaccccctcccggccatccagaggtgacactgccaccaagcgataaggggcaggctcagcactcgcacctaactcaagccactgtgcagccccttgacctcgagcttactataacgaccaagcccacaactgaggtgaaaccctcacctaccacagaagagacgagcacgcagccgcccgacttgggacttgctattattcctgaacctaccacggagacaggccactctaccgctttagaaaagactacagccccacgccctgaccgcgtgcaaacgcttcacagatcgctcacagaagtgactggcccgcctaccgaactggagcccgcacaggatagtttagtgcagagcgagagttacactcagaacaaggccctgactgccccagaagagcacaaagcaagcacatccaccaatatttgcgaactttgtacctgcggagacgagatgctgagctgtatcgaccttaatccagagcagaggctcagacaggtgccagttccggaacctaacacccataacgggacttttactatactcaatttccaggggaactacattagctacatcgatgggaacgtctggaaggcatactcttggactgagaaactgatcttgcgcgagaacaatctcaccgaactccacaaggactccttcgaggggttgctctctttgcaatacttggatctgagctgtaataaaattcagagtatcgagcgtcacacctttgaacctttgccattcctaaagttcataaacctctcttgcaacgtaattacagaattgagctttggaactttccaagcatggcacgggatgcaattccttcacaaactgattctgaaccacaacccactgactacagtagaggacccctatctcttcaagctacctgcactgaagtatttggatatggggaccacattggtgccgctgactactttaaagaatattctgatgatgaccgtcgaactggagaaattaattctaccttctcatatggcttgttgcctgtgccagtttaagaacagtattgaagccgtgtgcaagactgttaaattacattgtaacagtgcatgtttaacaaatactacccactgtcctgaagaagcctcagtgggcaatccggaaggagcttttatgaaggtgctacaggcacggaagaattacaccagcaccgagcttatcgtcgagcccgaagagcctagcgattcctcgggaatcaacctgtccggattcggctcagaacagctggatacaaatgacgagtcagactttatttctacattgtcctatattctgccttacttttctgctgtcaatttggacgtgaagagtttgctccttccattcatcaaattgcccactacgggaaacagcctggccaaaatccagactgtgggtcagaatagacagcgcgtgaaacgagtgctgatgggaccaagaagtatccagaagcgccattttaaagaggtcggtaggcagtcgattagaagagagcagggcgcacaagcatctgtcgaaaatgccgcggaggagaaaaggttgacgtctcccgcccctagggaggtcgagcagccacacactcaacaggggccggagaagctagccggtaacgcagtgtataccaaaccgagcttcacacaggaacacaaggctgcagtgtctgtcctgaaaccattttccaagggaacaccgtcaacctcttccccagcaaaggccctcccccaagtgagagatcgatccaaggatctgactcatgcaatctcgattctggaaagtgccaaagcccgtgttaccaatacaaagacgagtaaaccaattgtgcacgcaagaaaaaagtatcgatttcataaaacccgcagtcacgtaacgcatcgaaccactaaggttaaaaagagcccaaaagtccgtaaaaagagctacttgtcacgcttaatgttggctaacagattacctttctcagctgctaagtctcttatcaatagtccaagccagggcgctttcagctcccttggagacctgtccccacaggagaacccatttttagaggtatccgcactgtctgagcattttatagagaaaaataacaccaagcacactaccgccagaaacgctttcgaagagaatgattttatggagaacaccaacatgcctgaaggcaccatcagtgaaaacactaattacaaccatccacccgaggccgacagtgcaggcactgcatttaaccttggacctaccgttaagcaaaccgaaacaaaatgggagtacaataatgtgggtacagacctgtcacccgagcccaaatcattcaactatcctctgctcagtagccccggcgaccagttcgagatccaactgacacagcagctgcaatctctgattcccaataacaatgtccgacgcctcattgcccacgtgatccgcactctgaagatggactgctctggggctcacgtgcaggttacgtgcgccaaactgatttctaggacgggccatttaatgaagcttctgagcggccagcaggaggtaaaagcttctaaaattgaatgggacaccgaccagtggaagatcgaaaactacatcaacgaatcgacagaggcacagtctgaacaaaaagagaaatcactcgaactgaaaaaagaggtcccagggtacggatacaccgacaaacttatcctggccttgatcgtgacggggatcttgacgatcctgatcatcttgttttgccttatagtgatatgctgccataggagaagcctccaggaggatgaggaaggcttctctagggggatattccgctttctgccatggcgcgggtgcagttcaagacgggagtctcaggatggcctttctagcttcggccaacccctgtggttcaaggatctgtataagccactcagcgcaacgcggattaataatcatgcatggaaattgcataaaaaatcttccaacgaggataagatcctgaaccgtgaccctggcgacagtgaagctccaacagaggaagaggagagtgaagcccttccttag

SEQ ID NO: 182537 - DNA, 5103 bp, Artificial Sequence
  derived and/or modified sequence
atgtcaagtgcccagtgccccgctttggtttgcgtcatgtcccgcttgagattctggggcccatggcctctgctgatgtggcagcttctctggttactggtgaaggaggcacaaccccttgagtgggtcaaggaccctttacaactgaccagcaatcctctcggtccacctgaatcttggtcaagtcactcctctcattttcccagagagtctcctcatgcccctaccttgcctgccgacccgtgggattttgaccacttaggacctagcgcctcatcagagatgcctgccccacctcaggagtccacagagaatctcgtgcctttcctggacacctgggatagcgctggcgagcagccactcgagcccgagcagttcctcgcctctcagcaggacctaaaggacaagttaagccctcaagagaggcttcctgttagccctaagaagctcaagaaagaccctgcacaaaggtggtcgctggctgagattatcgggataactcggcagttgtctaccccgcagtctcaaaagcagaccctgcagaatgagtacagcagtaccgatactccttaccccggaagtttacctcccgagttgagagtgaagtctgacgaaccacctggaccgtccgagcaagttggaccttctcagtttcatttggagccagaaacacagaaccccgaaaccttagaggacattcagagctcgtctctgcagcaggaagcaccggcacagttaccacagctcctcgaggaagagccttcatctatgcagcaggaagcccctgcactccctcccgaatcttctatggagtccttaacccttcctaatcatgaggtgtccgttcagccacccggagaagaccaggcttattatcaccttcccaatataactgtaaagccagccgatgtggaggtcacgattaccagtgaaccaacaaacgaaacggagtcttctcaagcgcagcaagaaacccctattcaattccctgaagaggtggagccctccgcaacccagcaagaggctcccatcgagcctcccgtgcctcctatggagcacgaactcagcattagcgaacaacagcagccggtacaaccaagtgagtctcctcgagaggtagagagttcacccacccagcaggagaccccagggcagccaccagaacaccacgaggtgactgtctccccgcctggccatcatcagacacatcacttggcctctcccagcgttagcgtaaagccgccagacgttcagctaactattgccgcagaaccatccgccgaagtcggaactagtctcgtacaccaggaagccaccactcggctgtcaggctcaggaaacgacgtcgagccccctgccatacagcatgggggacccccactcctgccggaaagttcagaggaagccggacccctagccgtgcagcaggagacctcttttcagagtcctgagcccatcaacaatgagaacccttcacctacccagcaggaggctgccgcagaacaccctcagacagctgaagagggcgaaagctcactgacccatcaagaagcccctgcccagacccccgagttcccaaacgtggtcgtggcacagcctccagagcattcccatctgacacaggccacagtccagcctctagacctgggattcactattactcccgagagcaaaacagaggtggagctgagcccaaccatgaaggagacccctacacaaccaccaaaaaaagtggtaccgcagctgcgggtgtatcaaggggttaccaatcctaccccaggacaggaccaggcccagcaccccgtgtctccaagcgtcaccgtgcaactcctggacttgggtctaactattacccctgaacctacaacagaagtgggtcactccacaccccctaagcgtaccattgtgagtccgaagcaccccgaggtgaccctgccgcacccagaccaagtgcagactcaacacagtcacttgacaagggcaacggtgcagccactcgacctcggatttaccatcactcccaagtctatgaccgaagtcgaaccatcgacagccctcatgactaccgcccctccaccaggacatcctgaggtaactctaccccctagcgacaaaggtcaggcgcagcactcccaccttacgcaggcaacggtgcaaccgctagatttagaattgacgatcacgactaagccaacgacggaggtgaagccgagtccgaccaccgaggaaacgtccacgcagcctcctgacctgggcttggcaatcatacctgagccgaccaccgagacaggccatagtactgccctggagaaaaccacggccccaaggcccgacagagttcaaaccctgcataggagcctgacagaggtgactgggccacccacagagctcgagccggcacaggactccctggtgcagagcgagtcgtatacgcagaacaaggcactaacagctccagaagagcataaagcatccactagtacaaatatatgtgagctttgtacatgtggcgatgagatgctgtcgtgcatagacttgaatcccgagcagagactgcgccaggtacccgttcccgaaccgaatacacacaatggcacctttacaatactgaactttcagggaaactacatctcttatattgacggaaatgtctggaaagcatactcttggactgagaagttaatactccgcgaaaacaaccttactgagctccacaaggactcttttgaggggttactcagcctacagtacctggacctgagttgcaataagatccaatccatcgaacggcacaccttcgagcccttgcccttcctgaagttcattaacttaagctgtaatgttatcacagagctgtcctttggcacttttcaagcatggcacgggatgcaattccttcacaaattgatcctgaaccataacccacttaccaccgttgaagatccctatctcttcaaacttccagctctcaaatacctggatatgggaaccactctagttcctctgaccacgctaaaaaacattctcatgatgaccgtcgaactggaaaagcttatcctgcctagtcacatggcatgttgcctatgtcaattcaaaaacagtattgaggccgtgtgtaagactgtcaaactgcactgcaatagcgcatgtctgaccaatactactcattgccctgaagaagcttccgttggaaaccctgaaggcgctttcatgaaggtgttgcaggcccgaaagaattacacttctactgaattgatcgtcgagcccgaagagcctagcgattctagcgggatcaacctgtctggtttcggaagtgaacagcttgacaccaacgacgagagcgacttcatttcaactctgagctacattctgccctattttagcgcggttaacctagacgtgaaatctctgctgcttccctttatcaagctgccaaccaccgggaattctctcgccaagatccagaccgtgggtcagaaccggcagcgcgtaaaacgcgtgctgatgggtcctagatctattcagaagcgccatttcaaagaggtgggcaggcaatccatcagaagggagcagggcgctcaggcatccgtcgaaaatgccgctgaagaaaagcgtctaacaagccccgctcctagggaagtcgagcagccccatacgcagcaaggaccggagaaactggccggaaacgcagtctacaccaaaccaagcttcacccaggagcataaggctgcagtgagtgttctcaagcctttttctaaggggaccccctcaacttctagccccgcaaaggccctgccgcaggtaagggacagatcaaaagacctgacccacgcgatctccattctggagtcggccaaggcaagagttaccaacaccaaaacaagcaagccaatcgtgcatgccagaaagaaataccgatttcacaagaccagatcgcatgttacccacagaacaacaaaggtgaaaaaatcgcctaaggtgcgcaagaaatcctacctgtcgagactcatgctggccaatagactgcccttctccgcagcaaagtcattgattaactctccgtcccagggtgcgttcagttcccttggtgacctctccccacaggagaatccttttttggaagtgagcgcgctcagtgaacacttcattgagaagaacaataccaagcacactaccgcccgtaacgcctttgaagagaacgattttatggagaatacaaacatgccggagggcactattagcgaaaacacgaactacaaccacccaccagaggcagacagtgccggaacagcttttaacctgggacccaccgtgaaacagaccgagacgaagtgggaatacaacaatgtcggcacagatttgtcacccgaacctaagagtttcaactatccattgctgtcatctccaggggaccagtttgaaatccagctcacacagcagctgcagtctcttatccccaataataacgtacgcagactcattgcacatgtgatccgaacactgaagatggactgtagtggagcccacgttcaggtgacctgtgcaaaactaattagcaggactgggcatctaatgaagttgttgagtggccagcaagaagtgaaggcgagcaagatcgagtgggacactgatcagtggaagatcgagaactacatcaacgaaagtaccgaagctcaatcggagcaaaaggaaaagtcacttgaactcaagaaagaagttcctggttacggctataccgataagctcattctggctctgattgtgactggcatcctgactatcttgattatcctgttttgtctgatagtgatttgttgccaccgcaggtctctgcaggaggacgaagagggtttctcacggggaatttttcggtttttgccttggcgagggtgtagtagtcggcgagagtctcaggacggtctctccagcttcggccagcctctgtggttcaaagacctgtacaagcccctttcagctacaaggataaacaatcacgcgtggaagctgcacaagaagagctctaatgaagacaagatacttaaccgggacccgggagactctgaggcgccaacagaggaagaagagtcagaagctcttccttag

SEQ ID NO: 182538 - DNA, 5102 bp, Artificial Sequence
  derived and/or modified sequence
atgtcttccgcccagtgccctgctctggtgtgcgtgatgtctcgactgagattttggggaccatggccgttgctgatgtggcaactgctgtggctgctagtcaaggaggcgcagcccctggagtgggtgaaagatccactacagctcacaagcaaccctctgggcccacccgaaagttggtcatcccacagttctcacttccccagggagtctccccatgctccaacccttcccgcagacccctgggactttgatcacctcgggccttccgcctcaagcgaaatgcccgcaccccctcaagagagtaccgaaaacctggtgcccttcctggacacctgggacagcgcaggggagcaacccctggagccagagcagtttctggcgtctcagcaggacctgaaggataaactctcgccccaggagcgcctacctgtgagccccaaaaaattaaagaaagaccccgcacagcggtggtcattagccgaaatcataggtattacacgccagttgtccaccccccagtcccagaaacagacactgcagaatgagtactcaagcaccgacactccttaccccggatcacttcccccagaactgcgagtgaaatctgatgaacccccaggcccatcagagcaggtcgggccatcccagtttcatctcgaacccgaaacacaaaatccagaaacactggaggatattcagtccagttctctgcagcaggaggcacccgcacagctgccacagctgctggaagaggaaccttcttccatgcaacaggaggcacctgctctgcccccagagagtagtatggagagtctgacccttccgaaccacgaggtttccgtgcagcctccaggcgaggaccaggcgtactatcatctgccaaatatcacggtgaaaccagccgacgttgaggtgaccattacttctgaacccactaatgaaacagagagcagccaggcgcaacaggagactcccatacagttcccggaagaggtggaaccgtctgctacacagcaggaagcccctatagaaccccctgttccccctatggagcatgaattaagcatatccgaacagcagcagcctgtgcagccttctgaatctcctagagaagtggagtcatcgcccacccagcaggagacccctggccagcctcctgagcatcacgaagtcaccgtttcacctcccggacaccaccagacacaccatctcgcatccccgtctgtctccgtgaagcctccagacgttcagctaaccatagcagctgaaccttcggcagaggtgggaacaagcctcgtccatcaggaggctactaccaggttaagcggctctgggaacgacgtggagccaccggcaatacagcacggcggaccacccctactacctgagtctagcgaggaggctggccctctggctgtgcaacaagaaacaagcttccagagccccgagcccataaacaatgagaatcctagtccaacacagcaagaagccgctgcagaacatccacaaactgccgaagaaggtgagtctagcttaactcaccaagaagctccagcccagacacctgaatttccaaacgtagttgtcgcgcagccccctgagcacagtcacctgactcaggccacagtccagccactcgatttagggttcacaatcactcctgaatcaaaaacagaagtggaactctcgcccaccatgaaggagacgcccacccagccgccaaaaaaagtggtccctcagttgcgtgtttaccagggggttaccaaccctacgcccggacaagaccaggcgcagcatccagtgagcccttctgtaaccgtgcagttactcgatctgggactcaccataactcccgagcccacaactgaggtcggccactccaccccccctaagagaacgatcgtgagcccaaagcaccccgaggtaaccctgccacaccccgaccaggttcagacacagcactcccacctgacacgggctactgtgcagcccctagatcttgggtttaccatcacccctaaatcaatgaccgaagtggaacctagcacggcactgatgactactgcgccacccccaggtcaccctgaggtgacactaccgccatcagataagggacaggcccaacactctcacctcacccaggctacagtgcagccactcgatctggaactcacgattaccacgaaaccaacaactgaggtcaaaccttctcccaccacggaagaaaccagtacccaacctccggatctgggccttgccattatccctgaaccaaccactgaaacaggacattctaccgcgctcgagaagacaaccgccccaaggccggatagagtgcagactctccacagatctctgaccgaagttaccggtcctcccacagagctggagccagcccaggacagcctcgtgcagagtgagtcatacacacagaacaaggcacttacagccccagaggagcacaaagccagcacttctacaaacatttgtgaactatgcacctgtggcgatgagatgctgtcttgcatcgatctaaatccagaacagagactcaggcaagttccagtgcccgaacctaatacacataatgggaccttcacaatattgaactttcagggaaactacatcagctacatcgatggaaatgtgtggaaggcttattcctggaccgaaaagttgattctcagagagaataacctgaccgaattgcacaaggattcatttgagggtttactgagccttcagtatttagacctatcgtgcaacaagatccagtccattgaacgccatacctttgagccacttcctttcctaaaattcattaacctctcatgcaacgtcatcaccgagctgtccttcggaacctttcaggcttggcacggcatgcagtttctccataagctgattctgaaccacaacccactgacaaccgtcgaggacccatatctgttcaaattgcctgccctaaaataccttgacatgggaaccactctggtaccccttacgaccttgaaaaatatcttaatgatgacagtagaattagagaaactgatcttgccatcgcatatggcctgttgcttgtgccagtttaaaaactccatcgaggcagtgtgtaaaaccgttaagctgcattgcaacagcgcctgcctgacgaacaccacccattgccctgaggaagcctcagttggcaaccccgagggtgcctttatgaaagttttgcaggcaaggaagaactatacatcaaccgagcttatagtagaaccggaggagccgtcagactccagcggcattaatctcagtggctttgggtctgagcagttggatacaaacgacgagtccgattttatttcaacactctcctacatcctgccctacttcagcgctgttaatctggatgtgaagagtctcttgttaccctttattaaattgcccactacggggaacagcctcgccaaaattcaaaccgtgggtcagaaccggcagagagtgaagagggtcctaatgggtcctcggtcaatccaaaagcgacatttcaaagaggtcggacggcaaagcattagacgcgagcaaggtgcgcaagcctcagtagaaaacgcggcagaagaaaagcgactgacctcaccggctcccagggaggttgagcagccacacacccagcaaggccctgaaaagttggccggtaatgctgtgtacacaaaaccgagctttacgcaggagcacaaggcagcagtatccgttcttaagcctttcagtaagggaacaccttccacatcttcacccgctaaggctcttccccaggttagggacaggagcaaggatttaacccatgcaatctccatccttgagagcgccaaagcccgagtcacaaataccaaaacttctaaacccattgtgcacgctaggaaaaagtaccgattccataaaacaagatcccatgtcacccatcgaacaacaaaggtgaagaagagccctaaagtgcggaaaaaatcctatttgtcacggttaatgctggccaatcgcctgcctttttcggcagcaaaatccctgatcaattcaccttcacaaggagctttttcaagcctcggtgatctgtcgccacaggagaacccattcctggaagtctcagccctgtctgagcacttcatcgaaaagaacaataccaagcacacaacagcacgaaacgcgttcgaagagaacgactttatggaaaacacaaacatgccagagggaacgatcagcgagaacaccaattacaatcacccacccgaagctgacagcgcagggacagcctttaacctcgggccaacagtgaagcagactgagactaaatgggagtataataacgtaggcaccgatctaagcccagaacctaaatcatttaattacccactcctgagcagccccggagatcaatttgagatacaactcacgcagcaactgcagagtttaataccaaacaataacgtgcgcaggcttatcgcacacgttatcagaacattgaagatggactgcagtggggctcatgtgcaggtgacatgtgcgaagcttatcagcagaacaggacaccttatgaaacttctttccgggcagcaggaggtaaaagcgagcaagattgaatgggacaccgaccagtggaagatcgagaattacattaatgaatctacggaggcacagagcgaacagaaggaaaagtctcttgaacttaaaaaggaagtgcctggatatgggtatactgacaagctgatcctggccctgatagtcaccggcattctgaccatcttgataattcttttttgtctgatagtcatatgctgtcacaggaggtccctacaggaggacgaggagggttttagccgtggcatcttccgtttcctgccctggagaggttgcagcagccgtagagagtctcaagatggcctctcatcctttggtcagcctctttggtttaaagacctgtacaagcccttgtcagctactcggattaacaaccatgcatggaagctccataagaaatcctctaatgaagataagattctaaaccgagatcccggagacagcgaagctcccacagaggaggaagagagcgaggctctgccata

SEQ ID NO: 182539 - protein, 468 aa, Artificial Sequence
  derived and/or modified sequence
MNGEEEFFDAVTEANQKVTGMIDLDTSKNNRIGKTGERPSQENGIQKHRTSLPAPMFSRSDFSVWTILKKCVGLELSKITMPIAFNEPLSFLQRITEYMEHVYLIHRASCQPQPLERMQSVAAFAVSAVASQWERTGKPFNPLLGETYELIREDLGFRFISEQVSHHPPISAFHSEGLNHDFLFHGSIYPKLKFWGKSVEAEPRGTITLELLKHNEAYTWTNPTCCVHNVIIGKLWIEQYGTVEILNHRTGHKCVLHFKPCGLFGKELHKVEGHIQDKNKKKLFMIYGKWTECLWGIDPVSYESFKKQERRGDHLRKAKLDEDSGKADSDVADDVPVAQETVQVIPGSKLLWRINTRPPNSAQMYNFTSFTVSLNELETGMEKTLPPTDCRLRPDIRGMENGNMDLASQEKERLEEKQREARRERAKEEAEWQTRWFYPGNNPYTGTPDWLYAGDYFERNFSDCPDIY

SEQ ID NO: 182540 - DNA, 1407 bp, Artificial Sequence
  derived and/or modified sequence
atgaacggcgaggaggagttctttgacgctgtgacagaggccaatcagaaggtgacggggatgatagacttggataccagcaaaaataatagaatcggcaagactggagagcggccatctcaagagaatggtattcaaaaacacaggactagcctgccggcaccgatgttcagccgttccgattttagcgtgtggactatcttaaaaaagtgtgttggcttagaattaagtaaaattaccatgccaatagctttcaatgagccactctcattcctccagcggatcacagaatacatggaacatgtttatttgatacatcgggccagctgccagccccaaccacttgagaggatgcaatctgtcgctgcattcgcagtctccgccgtggccagccaatgggagcgaaccgggaagccttttaatcccctattaggagagacgtacgagttaattagggaagacctaggtttccgattcatcagcgagcaggtctctcaccacccgcctatctcggcctttcatagcgaaggtctgaatcatgatttcctgttccacggcagcatctatccgaagctcaaattttggggcaagtccgtggaagccgaacccagaggaaccattactctggagctgctgaagcacaatgaggcatacacctggactaaccccacttgctgtgtccataatgttattataggaaaactgtggatcgagcagtacggcaccgtcgagatactgaatcatagaaccgggcacaagtgcgttctccatttcaagccgtgcggactgttcggcaaagagctgcacaaagtggaagggcatatccaggataaaaataagaaaaaactttttatgatttacggcaagtggacagaatgcttgtggggtattgatcctgtcagctacgagagttttaagaagcaggaaagacggggcgaccatctgagaaaggccaagttggacgaggattcaggcaaagcagatagtgatgtggcagatgatgtccctgttgcacaagaaaccgtacaggtgattcccggatctaaactattatggcggataaacacaaggccacccaattccgctcaaatgtacaatttcacaagttttactgtaagcttgaatgagctggagaccggcatggaaaaaacacttcctcctacagactgtcggctacgccccgacatcagggggatggagaatgggaacatggatctcgcctctcaggaaaaggagaggctcgaagagaagcagcgggaggctaggcgcgagagagctaaagaggaagcggagtggcaaacccgttggttttaccccggaaacaacccatacacaggcacgcccgactggctgtatgccggtgactacttcgaacggaatttctccgactgtccggatatctattag

SEQ ID NO: 182541 - DNA, 1407 bp, Artificial Sequence
  derived and/or modified sequence
atgaatggagaggaggagttctttgatgctgtgacagaggccaaccagaaggtgacaggcatgattgacctggacaccagcaagaacaaccgcatcggcaagacaggagagcggcccagccaggagaatggcatccagaagcacaggaccagcctgcctgcccccatgttcagcagaagtgacttctctgtgtggaccatcctgaagaagtgtgtgggcctggagctgagcaagatcaccatgcccatcgccttcaatgagcccctgtccttcctgcagaggatcacagagtacatggagcacgtgtacctgatccaccgggccagctgccagccccagcccctggagaggatgcagagcgtggccgcctttgctgtgtctgctgtggccagccagtgggagaggacaggcaagcccttcaaccccctgctgggggagacctatgagctgatccgggaggacctgggcttccgcttcatcagcgagcaggtgagccaccacccccccatcagcgccttccacagcgagggcctgaaccacgacttcctgttccacggcagcatctaccccaagctgaagttctggggcaagtctgtggaggccgagccccggggcaccatcaccctggagctgctgaagcacaatgaggcctacacctggaccaaccccacctgctgcgtgcacaacgtcatcatcggcaagctgtggattgagcagtatggcaccgtggagatcctgaaccacaggacaggccacaagtgtgtgctgcacttcaagccctgtggcctgtttgggaaggagctgcacaaggtggagggccacatccaggacaagaacaagaagaagctgttcatgatctacggcaagtggacagagtgcctgtggggcattgatcctgtgtcctatgagagcttcaagaagcaggagcggcggggggaccacctgaggaaggccaagctggatgaggacagcggcaaggctgacagtgatgtggctgatgatgtgcctgtggcccaggagaccgtgcaggtgattcctggcagcaagctgctgtggaggatcaacacccggccccccaacagcgcccagatgtacaacttcaccagcttcaccgtgtccctgaatgagctggagaccggcatggagaagaccctgcccccaacagactgccgcctgcggccagacatccggggcatggagaatggaaacatggacctggccagccaggagaaggagcggctggaggagaagcagcgggaggcccggcgggagcgggccaaggaggaggccgagtggcagacccgctggttctacccaggcaacaacccctacacaggcaccccagactggctgtatgctggggactactttgaaagaaacttcagtgactgcccagacatctactag

SEQ ID NO: 182542 - DNA, 1407 bp, Artificial Sequence
  derived and/or modified sequence
atgaacggcgaggaggagttcttcgacgccgtgaccgaggccaaccagaaagtcactggtatgattgacctggacacaagcaaaaacaatcgtatcggaaaaactggtgagagaccctcccaggaaaatggaatccagaaacatcgcaccagcctccctgcccccatgtttagccgctccgacttctcagtatggacaatcttgaagaaatgtgtcggcctcgaactgtcaaagattaccatgcccattgcctttaatgaacccctttcttttctccagaggattacagagtacatggaacatgtgtacctcatccatcgtgcaagttgccagccccagcccctggagaggatgcagagtgtggcagctttcgccgtctcagcggtcgcgagccagtgggagagaactgggaaacctttcaaccccttactgggggagacatatgaactgatcagagaagacctgggctttcggttcatcagtgaacaagtttcgcatcacccaccgatctctgcctttcattcagaggggctcaatcacgattttctatttcatggctccatctatcccaaactcaaattctggggaaaaagtgttgaagccgagccccgcggaactataacactggaactgcttaagcacaatgaggcttacacatggaccaatcccacgtgctgtgtccacaatgttattataggcaagctctggatagagcagtacggaacagtagagatacttaatcatcgcaccggccacaagtgcgtgctgcactttaagccatgtgggctcttcggaaaggagctgcacaaagtagaaggacacatacaggataagaataaaaagaaactgtttatgatctacgggaagtggacagagtgcctttggggaatagacccagtgtcctacgagtctttcaagaaacaggaacgacggggtgaccacctgaggaaagcgaagctggacgaagactccggtaaagccgacagcgacgtagcggatgacgtgccagtcgcacaggagaccgtgcaggttatccccggctcaaagctgctttggcgaattaatactcgacctcccaattctgcccagatgtacaattttactagttttaccgtaagccttaatgagttagagaccggcatggagaagactctccccccaacggattgcaggctgcgccctgatattagaggaatggagaatggcaacatggacctcgccagtcaggaaaaggaaagattagaggaaaagcagcgggaggccaggcgagagagagctaaggaagaagctgaatggcaaaccagatggttttatccaggaaacaatccttatactggaacacctgattggttgtacgcgggcgactacttcgagaggaactttagcgattgtcctgatatctattag

SEQ ID NO: 182543 - DNA, 3934 bp, Artificial Sequence
  derived and/or modified sequence
agtgggtcgcgggcctacggggcgggggcggggcggcagtgagctcggccggcaaccgagggacccgcgtccagatcttcagtgtctattggatttttccaagagaaagtttgtaaaattccttacactgtagatgtggatcagatacgatgattcagtagaagagcacatgtcaggggcagtggaggctggctgctgaaggatgaacggagaggaagaattctttgatgccgtcacagaggcaaatcagaaagtcacgggaatgattgacttagacaccagcaaaaataataggattgggaaaactggggagaggccctctcaagagaacggaattcagaaacacaggacatcgctgccggctcccatgttcagcagaagcgacttcagcgtgtggaccatcctgaagaagtgtgttggcctggagctgtccaagatcacgatgccaatcgccttcaacgagcctctgagcttcttgcagcggatcacggagtacatggagcacgtgtacctcatccacagggcctcctgccagccccagcccctggagaggatgcagtctgtggctgcttttgctgtttcggctgtggcttcccagtgggagaggaccggcaaaccatttaatccactcttgggagaaacgtatgaattaatcagggaagatttaggattcagatttatatcggaacaggtcagtcaccacccccccatcagtgcgttccactcggaaggtctcaaccatgacttcctgttccatggctccatctaccccaagctcaagttctggggcaaaagcgtggaggcggagccccgaggcaccatcaccctggagctgctcaaacataatgaagcctacacctggaccaaccccacctgctgcgtccacaacgtcatcatcgggaagctgtggatagagcagtatgggacagtggagattttaaaccacagaactggacataagtgtgtgcttcactttaaaccgtgtggattatttggaaaagaacttcacaaggtggaaggacacattcaagacaaaaacaaaaagaagctctttatgatctatggcaaatggacggaatgtttgtggggcatagatcctgtttcgtatgaatccttcaagaagcaggagaggagaggtgaccacctgagaaaggccaagctggatgaagactccgggaaggctgacagcgacgtggctgacgacgtgcctgtggcccaggagaccgtgcaggtcattcctggcagcaagctgctctggaggatcaacacccggccccccaactctgcccagatgtataatttcaccagtttcactgtgagcctcaacgagctggagacaggcatggagaagaccctgccacccacggactgccgcctgcgccctgacatccgcggcatggagaatggcaacatggatctggccagccaggagaaggagcggctggaggagaagcagagagaagcacggagggagcgggccaaggaggaggcagagtggcagacgaggtggttctacccaggcaataacccctacactgggacccccgactggttgtatgcaggggattactttgagcggaatttctccgactgcccagatatctactgagggcctggaggggcctggggcccgggaccggaggctgacgaggctggacttcctcgagtggccactgtgagcctcgtcacagcagaaaccaacttttctaacgactgagttcgcggagatagcatcatccctgatcaaggatgtaattctaattaactgttgattgccaaacatttcactctgctgtgccgtctcttcataaagcttcacttgggatcatcgtcttcattaaggtttcaacagggaaattcttcacggcgcccttttatgtggcagaaatcagctggggcttgtttagcttccagcacactctcagtcatagcatgtgtagctaaaggaagtaatgggaaggggttcatgttctctttataatgcagtggcaaaaggttctgaaagccttttaaactcgaaccagtgggggaaagatggatcttgaagctaatcctgcagagagttttatagaggccagggattgccttctaaattatgataaaacagaagtgaagagtttcagagcatcagattgagtgaaaagttgtcagattctgtattttttaacaatcttcaataatgtaaagattacttttaaaatatttaagttaaaactacttgaatagtattttgctgaagagcaagatatgcattaatcaccggttttatactgtccaaaatgaagcatccccgtgacaaaccagagtgggcagaagcatcgagagcgtgacaggaaatcccaagactgcttccgcctcagaggcgtcccggctgcgattcgctgccctgttgtcagtgaggcctggctgtcaccgcacaccgcgtccgtgtctccagggggttcctttcttctcacacgtcgcgtgtacccatagcactcttgtgtttctgtttttcccagtatgcatgtttaaaatagaagtgacaagaatcacatccggttgtgtcctgtgggagggtcagaggcagaatctacttacagtggtgtaattaaagttatttaaccaaaaataggtatgtgtccatctcagcattcacctttatcaagtgactgatttttttttcttttctttccttttttttttttttttgagacggagtttcactcttgttgcccaggctggagtgcaatggcatgatctcggctcaccgcaacctccgcctcccgggttcaagcgattctcctgcctcagcctcccaagtagctgggattacaggcacgcgccaccacacctggctgattttgtatttttagtagacacgggttttcaccatgttggtcaggctggtctcaaactcccgacctcaagtagtctgcctgcctcaacctcccaaagtgctgggattacaggcgtgagccactgcgcctggccgtgactgattttttttcatgtagaattgtcaacacgagagatcacagtggagcactttgaaagaccgtcggttgtgtgcacgcacgcacacactcatgcacacgctgacacgcggttgcatggagtccaggttactcaggccggcacttctgagtgacaggtgccacctgcgtgtgtcttggcgtccacatcacacctgtgacggaagcacttctggaagtgaacactcgttttgaaagcttgattttgtagctttggaagctggaagcgatggtgtttggtgccgagtcctgtgtcatcctcggggcctatgagctccgtaccagccactcaaaagtgtctgaacagaaccgctccgtgactggtagctgggtctgaggattcaggattgtggcgttattcaaagaggagactttgaaattccccgatggctggaatgtggagcccaggtgcctctggtggagggtcatctgcttttccagactgtggttgtgaaccggctccttctccaagaaaggttgcaagctgagaacatccagaggtgagactcagacacattgaaagtgactgcatttagggaggtttaacgagttcttactgatcattccacttgttactggttaagataatttgcccacgggtttgtttccaagtcctcttctaggaccaggctcctggtatttcaggggctggttggctgcacagacagcccctcttctgctgtccttgaggacagacaccaaaccagaggtggaggaagaacggtaggaaggctgatggcaaaagcggctgtgtgtcgaggttattttaactttttactactttttgttactgtttctgcaaatgctaacacataaaccatgacctaacttttgtcaccttggatatctattgaatgttaaacatctctaataaagatggccaccacttaatgtgtggaaagtgatggccttctcgtggg

SEQ ID NO: 182544 - DNA, 1407 bp, Artificial Sequence
  derived and/or modified sequence
atgaatggggaggaggagttcttcgatgcagttacagaggctaaccagaaagtaaccggcatgattgatctggacacaagcaagaacaaccggatcggcaaaacaggtgaacggccttcccaggaaaacggcattcaaaaacatcgtacatcactgccagccccaatgttttctagatcagatttcagcgtttggactatcctgaagaaatgcgtgggcttggagctgtctaaaatcacgatgcctattgcattcaacgaaccgttaagctttttgcagcgaattactgagtacatggaacacgtgtacctcattcaccgagcttcctgccagccccaaccactggagagaatgcaaagcgttgccgcttttgcagtgtccgccgttgcgtcccagtgggaacgaacaggcaagccatttaacccactcttaggagagacttatgagttgatccgggaagatcttggctttaggttcatctctgagcaggtgtcccaccatccccctatctccgcattccactcagaagggctcaaccacgatttcctgttccacggctccatctacccaaaacttaaattctggggcaaatccgtggaggccgagcccaggggcaccataactctggaacttttaaaacacaacgaggcctacacatggactaatccaacttgttgtgtacacaacgtgatcatcggaaagctctggattgagcagtacggaaccgtagagattctgaaccataggaccggccacaaatgtgtgttacactttaagccttgcggcctctttggaaaggaattgcacaaagtcgagggacatatccaggataaaaacaaaaaaaagctgtttatgatttatggcaaatggactgagtgtctctggggcatagatccagtgagttacgagtcctttaagaaacaggagcgacggggagatcacttgagaaaggctaagctagacgaggatagcggcaaggcagattccgacgtggcggacgatgtgcccgtcgcccaggagaccgtgcaggtgatacctgggtcgaagctcctgtggcgcatcaacaccagacccccaaacagcgctcagatgtacaactttacctcatttaccgtgagcctgaatgagctggagacaggcatggagaaaaccctaccccctaccgattgtagattgcgacctgacattcggggaatggaaaatggaaatatggacctggcctctcaagagaaggaaaggctggaggaaaaacagagagaggccagacgggagcgcgcaaaagaggaagccgagtggcagacaagatggttttatcctggcaacaacccgtataccggcacacccgactggttgtatgctggcgattattttgagaggaatttctcagattgtcccgacatctactag

SEQ ID NO: 182545 - DNA, 1407 bp, Artificial Sequence
  derived and/or modified sequence
atgaacggcgaggaggagttcttcgacgccgtgaccgaggccaaccagaaggtgaccggcatgatcgacctggacaccagcaagaacaacagaatcggcaagaccggcgagagacccagccaggagaacggcatccagaagcacagaaccagcctgcccgcccccatgttcagcagaagcgacttcagcgtgtggaccatcctgaagaagtgcgtgggcctggagctgagcaagatcaccatgcccatcgccttcaacgagcccctgagcttcctgcagagaatcaccgagtacatggagcacgtgtacctgatccacagagccagctgccagccccagcccctggagagaatgcagagcgtggccgccttcgccgtgagcgccgtggccagccagtgggagagaaccggcaagcccttcaaccccctgctgggcgagacctacgagctgatcagagaggacctgggcttcagattcatcagcgagcaggtgagccaccacccccccatcagcgccttccacagcgagggcctgaaccacgacttcctgttccacggcagcatctaccccaagctgaagttctggggcaagagcgtggaggccgagcccagaggcaccatcaccctggagctgctgaagcacaacgaggcctacacctggaccaaccccacctgctgcgtgcacaacgtgatcatcggcaagctgtggatcgagcagtacggcaccgtggagatcctgaaccacagaaccggccacaagtgcgtgctgcacttcaagccctgcggcctgttcggcaaggagctgcacaaggtggagggccacatccaggacaagaacaagaagaagctgttcatgatctacggcaagtggaccgagtgcctgtggggcatcgaccccgtgagctacgagagcttcaagaagcaggagagaagaggcgaccacctgagaaaggccaagctggacgaggacagcggcaaggccgacagcgacgtggccgacgacgtgcccgtggcccaggagaccgtgcaggtgatccccggcagcaagctgctgtggagaatcaacaccagaccccccaacagcgcccagatgtacaacttcaccagcttcaccgtgagcctgaacgagctggagaccggcatggagaagaccctgccccccaccgactgcagactgagacccgacatcagaggcatggagaacggcaacatggacctggccagccaggagaaggagagactggaggagaagcagagagaggccagaagagagagagccaaggaggaggccgagtggcagaccagatggttctaccccggcaacaacccctacaccggcacccccgactggctgtacgccggcgactacttcgagagaaacttcagcgactgccccgacatctactag

SEQ ID NO: 182546 - protein, 1171 aa, Artificial Sequence
  derived and/or modified sequence
MENNLKTCPKEDGDFVSDKIKFKIEEEDDDGIPPDSLERMDFKSEQEDMKQTDSGGERAGLGGTGCSCKPPGKYLSAESEDDYGALFSQYSSTLYDVAMEAVTQSLLSSRNMSSRKKSPAWKHFFISPRDSTKAICMYCVKEFSRGKNEKDLSTSCLMRHVRRAHPTVLIQENGSVSAVSSFPSPSLLLPPQPADAGDLSTILSPIKLVQKVASKIPSPDRITEESVSVVSSEEISSDMSVSEKCGREEALVGSSPHLPALHYDEPAENLAEKSLPLPKSTSGSRRRSAVWKHFYLSPLDNSKAVCIHCMNEFSRGKNGKDLGTSCLIRHMWRAHRAIVLQENGGTGIPPLYSTPPTLLPSLLPPEGELSSVSSSPVKPVRESPSASSSPDRLTEDLQSHLNPGDGLMEDVAAFSSSDDIGEASASSPEKQQADGLSPRLFESGAIFQQNKKVMKRLKSEVWHHFSLAPMDSLKAECRYCGCAISRGKKGDVGTSCLMRHLYRRHPEVVGSQKGFLGASLANSPYATLASAESSSSKLTDLPTVVTKNNQVMFPVNSKKTSKLWNHFSICSADSTKVVCLHCGRTISRGKKPTNLGTSCLLRHLQRFHSNVLKTEVSETARPSSPDTRVPRGTELSGASSFDDTNEKFYDSHPVAKKITSLIAEMIALDLQPYSFVDNVGFNRLLEYLKPQYSLPAPSYFSRTAIPGMYDNVKQIIMSHLKEAESGVIHFTSGIWMSNQTREYLTLTAHWVSFESPARPRCDDHHCSALLDVSQVDCDYSGNSIQKQLECWWEAWVTSTGLQVGITVTDNASIGKTLNEGEHSSVQCFSHTVNLIVSEAIKSQRMVQNLLSLARKICERVHRSPKAKEKLAELQREYALPQHHLIQDVPSKWSTSFHMLERLIEQKRAINEMSVECNFRELISCDQWEVMQSVCRALKPFEAASREMSTQMSTLSQVIPMVHILNRKVEMLFEETMGIDTMLRSLKEAMVSRLSATLHDPRYVFATLLDPRYKASLFTEEEAEQYKQDLIRELELMNSTSEDVAASHRCDAGSPSKDSAAEENLWSLVAKVKKKDPREKLPEAMVLAYLEEEVLEHSCDPLTYWNLKKASWPGLSALAVRFLGCPPSIVPSEKLFNTPTENGSLGQSRLMMEHFEKLIFLKVNLPLIYFQY

SEQ ID NO: 182547 - DNA, 3516 bp, Artificial Sequence
  derived and/or modified sequence
atggaaaacaaccttaagacctgtcctaaggaagatggtgatttcgtttctgataaaatcaaatttaaaatcgaggaggaggacgatgacgggatcccaccagacagtctggagagaatggacttcaaatctgagcaggaagatatgaaacaaactgatagtggaggagagcgcgcaggcctggggggaacaggctgcagttgcaaacctccaggaaagtacctctccgccgagtccgaagacgactatggcgcccttttttcccagtactctagcacattgtacgacgtcgccatggaggcggtcacacaatccttgctgtcctcccgtaacatgtcttcccgaaaaaagtcacctgcatggaaacacttttttatctccccgcgcgactctaccaaggccatctgtatgtattgcgtaaaggagttttctagggggaaaaatgaaaaggatttgtccacaagttgcctgatgcggcatgtccggcgggcacatccaacagtactgattcaggagaatggtagtgtgagtgcggtgtctagctttccttcacccagcctcctgttacccccccagccagccgacgctggcgaccttagtaccatcctgtcaccaattaagctcgtgcagaaagtggccagcaagataccaagcccagaccgcatcactgaggaatccgtcagcgttgtgtctagcgaggagattagttctgatatgagtgtgtcagagaaatgcgggagagaggaggcacttgtgggctcaagtcctcatctgcctgctctgcactatgatgaacccgccgagaatcttgccgagaagagcctccctctacctaagtctacctcagggagccgtcggaggtctgctgtgtggaagcatttttacttgagtcctctggataactccaaagcagtctgtattcactgtatgaatgagttctcccgaggcaagaatggcaaggacttaggcacaagttgcctaatccgtcatatgtggagggcccacagagccatcgtgctgcaggagaatggtgggacaggaattcctcctctgtactccacgccccctacactgctgccatccctcctgcctcctgagggagagctgagcagcgttagctctagccctgtgaagcccgtgcgcgagtccccctcagcttctagcagccccgaccgactcacagaagacctccagtctcacttgaaccccggggacggactgatggaagatgtggcggccttcagcagcagtgatgacataggagaggcatctgcttccagccccgagaagcagcaggccgatggattatccccccgtctctttgagtctggcgccatctttcagcagaataagaaggtgatgaaacgcctgaagagtgaagtttggcaccatttttctctggcgccgatggacagcctgaaggcagagtgccgatattgtggatgcgcaatatcccgagggaagaaaggtgatgtgggaacgagctgcctcatgcggcacctgtatagacgccacccagaggttgtggggtctcagaaagggtttctgggggcgtccttagctaacagcccctacgccacattggcatctgccgagtctagcagctcgaagctaactgatctaccgaccgtggtgaccaagaacaatcaagttatgtttcctgttaactcaaaaaaaacgtccaagctctggaaccatttttctatctgttccgcggatagcacgaaggtggtctgtttacattgcggacgcaccataagtagggggaaaaagccaaccaacctcggtacatcatgcctgttgaggcacttacagagattccattctaacgtcctgaagacggaagtctcagaaactgcgaggccatctagcccagatacccgcgtgcccaggggcacagagcttagcggcgcgtccagctttgacgacacaaatgaaaagttttacgattctcatccggtagccaaaaagatcacatccctcattgctgagatgatcgctctcgacctacaaccctatagtttcgtcgataacgtcggctttaatcgtctgcttgaatatttaaaaccacagtattctttgcctgctccaagctacttcagtaggaccgccatccccggcatgtatgataatgtgaagcagattattatgagccacctgaaggaagccgaatcaggggttatacacttcacttcaggcatttggatgagtaaccagactcgagagtacctgaccctaaccgcccactgggtgtctttcgagtcacccgcccgacctaggtgcgacgaccatcactgcagtgccttactcgacgtgtcccaggttgactgcgactacagtggcaacagcattcaaaaacagctggagtgttggtgggaggcttgggtgactagcaccggactgcaagttggcataacggtcaccgacaatgcatccattgggaaaaccctcaatgagggcgaacatagctctgtgcagtgcttctcacataccgtaaatcttattgtctctgaagcaatcaaatcccagcgaatggtccaaaatctcctctccctcgcaagaaaaatctgcgagagagtacatcgtagccctaaagcaaaagagaaactagctgaactgcagcgcgaatacgccctcccccagcatcatctgattcaggatgtgccctcaaaatggtccacttctttccacatgctcgaaagactcatagaacagaagcgggctatcaatgaaatgagtgttgagtgcaacttcagagagcttatcagctgtgaccagtgggaggtcatgcagagtgtatgtagagctcttaaaccatttgaagctgccagcagagagatgagcactcagatgtcaaccctgagtcaagtcatcccaatggtgcatatcctgaaccgtaaagtggagatgcttttcgaggagacaatgggtatcgataccatgctccgaagcctgaaagaagctatggtttcgagactgagcgcaacgttacacgatcccagatacgttttcgctacattactagatccccgctacaaggcctcactcttcaccgaagaggaggctgagcagtacaagcaggacctgatccgggagttggaattaatgaatagcactagtgaagatgtagctgcttctcaccgatgcgacgcaggctccccttcgaaagactccgccgccgaggagaatttgtggtcattggtggccaaggttaagaaaaaagatccccgagaaaagctgcctgaggctatggtactagcctacctggaggaggaggtcttagaacactcctgtgatccgctgacctattggaacctcaagaaggcctcctggccaggattgagtgctctggccgttcgattcctgggctgccccccgtctatagtccccagcgaaaaattgttcaacacaccaacagagaatggcagcttaggtcagtcccgcctcatgatggagcatttcgaaaagctcatcttcctcaaggtcaacttgccgctcatttatttccagtactag

SEQ ID NO: 182548 - DNA, 3516 bp, Artificial Sequence
  derived and/or modified sequence
atggagaacaacctgaagacctgccccaaggaggatggagactttgtgtctgacaagatcaagttcaagattgaggaggaggatgatgatggcatccccccagacagcctggagaggatggacttcaagtctgagcaggaggacatgaagcagacagacagcggcggggagagagctggcctgggcggcaccggctgcagctgcaagcccccaggcaagtacctgtctgctgagagtgaagatgattatggagccctcttcagccagtacagcagcaccctgtatgatgtggccatggaggccgtgacccagagcctgctgagcagcaggaacatgagcagcaggaagaagagccctgcctggaagcacttcttcatcagcccccgggacagcaccaaggccatctgcatgtactgtgtgaaggagttcagccggggcaagaatgagaaggacctgagcaccagctgcctgatgagacatgtgcggcgggcccaccccaccgtgctgatccaggagaatggatctgtgtctgctgtgtcctccttccccagccccagcctgctgctgcccccccagcctgcagatgctggggacctgagcaccatcctgagccccatcaagctggtgcagaaggtggccagcaagatccccagcccagaccgcatcacagaggagagcgtgtctgtggtgagcagcgaggagatcagcagtgacatgtctgtgtctgagaagtgtggccgggaggaggccctggtgggcagcagcccccacctgcctgccctgcactatgatgagcctgctgagaacctggccgagaagagcctgcccctgcccaagagcaccagcggcagcagaagaagatctgctgtgtggaagcacttctacctgagccccctggacaacagcaaggctgtgtgcatccactgcatgaatgagttcagccggggcaagaatggcaaggacctgggcaccagctgcctgatccgccacatgtggagggcccaccgggccatcgtgctgcaggagaatggaggcaccggcatcccccccctgtacagcaccccacccaccctgctgcccagcctgctgcccccagagggggagctgagctctgtgagcagcagccctgtgaagcctgtgcgggagagccccagcgccagcagcagcccagaccggctgacagaggacctgcagagccacctgaaccctggagatggcctgatggaggatgtggccgccttcagcagcagtgatgacatcggggaggccagcgccagcagccctgagaagcagcaggctgatggcctgagcccccggctgtttgaaagtggggccatcttccagcagaacaagaaggtgatgaagaggctgaagtctgaggtgtggcaccacttcagcctggcccccatggacagcctgaaggccgagtgccgctactgcggctgtgccatcagccggggcaagaagggagatgtgggcaccagctgcctgatgaggcacctgtacagaagacaccctgaggtggtgggcagccagaagggcttcctgggcgccagcctggccaacagcccctatgccaccctggccagcgctgagagcagcagcagcaagctgacagacctgcccaccgtggtgaccaagaacaaccaggtgatgtttcctgtgaacagcaagaagaccagcaagctgtggaaccacttcagcatctgcagcgctgacagcaccaaggtggtgtgcctgcactgcggccgcaccatcagccggggcaagaagcccaccaacctgggcaccagctgcctgctgcggcacctgcagcgcttccacagcaatgtgctgaagacagaggtgtctgaaacagcccggcccagcagcccagacaccagggtgccccggggcacagagctgagcggggccagcagctttgatgacaccaatgagaagttctatgacagccaccctgtggccaagaagatcaccagcctgattgctgagatgattgccctggacctgcagccctacagctttgtggacaacgtgggcttcaaccggctgctggagtacctgaagccccagtacagcctgcctgcccccagctacttcagcaggacagccatccctggcatgtatgacaacgtgaagcagatcatcatgagccacctgaaggaggccgagagcggggtcatccacttcaccagcggcatctggatgagcaaccagacccgggagtacctgaccctgacagcccactgggtgtcctttgagagccctgcccggccccgctgtgatgaccaccactgcagcgccctgctggatgtgtcccaggtggactgtgactacagcggcaacagcatccagaagcagctggagtgctggtgggaggcctgggtgaccagcacaggcctgcaggtgggcatcaccgtgacagacaatgccagcatcggcaagaccctgaatgaaggagagcacagctctgtgcagtgcttcagccacacagtgaacctgattgtgtctgaggccatcaagagccagaggatggtgcagaacctgctgagcctggccaggaagatctgtgagcgggtgcacaggagccccaaggccaaggagaagctggccgagctgcagcgggagtatgccctgccccagcaccacctgatccaggatgtgcccagcaagtggagcaccagcttccacatgctggagcggctgattgagcagaagagggccatcaatgagatgtctgtggagtgcaacttccgggagctgatcagctgtgaccagtgggaggtgatgcagagcgtgtgccgggccctgaagccctttgaggccgccagccgggagatgagcacccagatgagcaccctgagccaggtgatccccatggtgcacatcctgaacaggaaggtggagatgctgtttgaggagaccatgggcatcgacaccatgctgcggagcctgaaggaggccatggtgtcccggctgagcgccaccctgcatgacccccgctacgtgtttgccaccctgctggacccccgctacaaggccagcctcttcacagaggaggaggccgagcagtacaagcaggacctgatccgggagctggagctgatgaacagcaccagtgaagatgtggccgccagccaccgctgtgatgctggcagccccagcaaggacagcgctgctgaggagaacctgtggagcctggtggccaaggtgaagaagaaggacccccgggagaagctgcctgaggccatggtgctggcctacctggaggaggaggtgctggagcacagctgtgaccccctgacctactggaacctgaagaaggcctcctggccaggcctgagcgccctggccgtgcgcttcctgggctgccccccatccatcgtgcccagcgagaagctgttcaacacccccacagaaaatggcagcctgggccagagccggctgatgatggagcactttgagaagctgatcttcctgaaggtgaacctgcccctcatctacttccagtactag

SEQ ID NO: 182549 - DNA, 3516 bp, Artificial Sequence
  derived and/or modified sequence
atggagaacaacctgaagacctgccccaaggaggacggcgacttcgtgagtgacaaaatcaagtttaagatcgaagaggaagacgatgacgggatcccacctgattctctcgaaaggatggatttcaagagcgaacaagaagacatgaaacagacagatagtggaggcgagcgagctgggttagggggtacaggttgctcatgtaagcctcctggaaaatatctttcggccgagtccgaggacgactacggtgctctcttctcgcagtacagctcaaccctgtatgacgtggcgatggaagccgtgacacagagcctcttgtcgtccagaaacatgagcagtcgcaaaaaatccccagcctggaagcacttcttcattagcccccgggattccacgaaagctatttgcatgtactgtgtgaaagaatttagccgcggaaaaaatgaaaaggatctttccactagctgcttgatgcgtcacgttagacgggcacatcctaccgtgcttatccaagagaatggatccgtaagtgccgtcagcagctttcctagcccttctctgctcttaccgccgcagcccgcagacgcaggtgatctaagtacaatcttgagtcccatcaaattagtgcagaaggtagcatcgaagattcctagccccgataggatcacagaggaaagcgtgtccgttgtaagttcagaggagatcagctccgatatgtccgtgtcagagaaatgtggcagagaagaggcactggtcggatcgtcaccacacctccccgcgctgcattatgacgaacccgcggagaacctggccgaaaaatctcttcccctgcccaagtccacatccggctcacgcagaagaagcgccgtctggaagcacttctatctttcacccctggataattccaaagcagtttgcatccattgtatgaatgagttttcccggggaaagaacggcaaagacctgggcacgtcttgcttgatccggcatatgtggcgagcacatcgcgccattgtcctgcaagagaatggcggcacgggcattccccccctctactctacaccgccaacactgctcccgtccttgcttccaccagaaggggagctgtcctctgtttcctcatcccctgttaagccagttcgtgaaagccctagcgccagttcttcacctgatcggctgaccgaggacctgcaaagccacttaaatcctggggatggtctcatggaggatgtcgccgccttcagtagcagcgatgacatcggagaagcctccgccagttccccggagaaacagcaggccgatggactatctccccgcctgtttgagagcggtgctatattccagcagaataagaaagtgatgaagcggcttaagtcagaggtctggcaccacttctcgttggcgcccatggactcactcaaggcggagtgtcggtactgcggatgtgcgattagtcgcggtaaaaagggcgacgtgggtacgtcttgcctcatgaggcacctttataggagacatccagaggtggttggctcacaaaaagggtttctgggggcctcgctggctaacagcccctacgccacccttgcttctgccgaaagttcttcatctaaattgaccgatctcccaactgtggttaccaagaataaccaagtgatgttccctgtgaatagtaaaaagacgagcaagctgtggaaccattttagtatatgtagtgccgacagcaccaaggttgtctgcctgcattgtgggaggacaatctcacggggaaaaaaacctacgaacttaggaacaagctgtttgctgcggcatctgcaaaggttccactctaacgttctcaaaactgaggtgtccgaaacagctcggcctagctcacccgatactcgtgtgccaagagggactgaactctctggcgctagcagctttgacgacacaaatgaaaaattttacgactcacacccagtcgcaaaaaaaattacttctctgatcgcagaaatgattgcgttagacctccagccatacagctttgtggataatgtaggattcaatcgcttgctggaatatctgaaaccacagtacagcctcccggccccttcttacttttcaaggacggcgatacccggcatgtacgataatgtaaagcagatcattatgtctcacctgaaggaggcggaatcaggcgtaattcacttcaccagcggaatttggatgtccaaccagaccagggagtatcttaccctgaccgctcattgggtctcattcgagtcacctgcccgacccagatgtgacgaccaccactgcagcgccctgttagacgtatcacaggttgactgtgattactctgggaactctattcagaaacagctggaatgttggtgggaagcctgggtcacttccactggcctccaagtggggataaccgtgactgataatgcttctatcggcaagactctgaacgagggggaacacagctccgtgcagtgttttagccacacagtgaacctgatcgtgtcagaggctattaagagccaaaggatggttcaaaatctgctatcattggcgcgaaaaatatgtgaacgggtgcatcgctctccaaaggctaaggagaaattagcagagctacaacgagaatatgctcttccccagcatcatctaatacaggatgtgccatccaagtggtccactagcttccacatgctcgagcgactaattgagcagaaacgcgctattaatgaaatgagcgtagagtgtaactttcgcgagctgatatcttgtgaccagtgggaggtgatgcaaagcgtctgtagagctctgaaaccatttgaagccgcaagtagagagatgagcacgcagatgtccacactgtcacaagtcatcccaatggtccacattttgaaccgcaaggttgagatgctcttcgaggagacaatgggaattgacacaatgcttcgtagcctgaaagaggctatggtgagtcgcttgtccgccacccttcatgatcctcgttacgtcttcgctacactccttgacccgcggtataaagcctctctattcacagaagaagaagcagagcagtataagcaggacctcattcgcgagctggaacttatgaattctacgtcagaagacgtggctgcaagccatcggtgcgacgcaggatccccgagcaaagattctgccgctgaggagaacctgtggtctctggtagctaaagtcaagaagaaggacccaagggagaagttgcccgaagcgatggttctcgcatacctggaggaagaagtcctggaacacagttgtgatcctctgacctactggaacctgaaaaaagcttcttggccggggttgtcagcacttgccgtacgctttctggggtgcccgccaagcatagtcccttccgagaaactttttaacacacctaccgaaaatgggagtctgggccagtcacgacttatgatggaacactttgaaaagctcatttttctcaaggtaaatctgccgctgatctactttcaatactag

SEQ ID NO: 182550 - DNA, 3516 bp, Artificial Sequence
  derived and/or modified sequence
atggaaaacaatttgaagacttgccccaaagaggacggggactttgtaagtgacaagataaaatttaagatcgaagaggaagatgacgacggcatcccaccagactcactcgagcggatggatttcaagtccgaacaggaggatatgaaacagacggattccggcggagagcgcgctggcctggggggaacgggttgtagctgtaaaccgcctggcaaatacctttcagcagaaagcgaagatgattacggtgctttgtttagccaatactcctccacactgtacgacgtggcgatggaggccgttacccagagcctgttgtcttcacgcaacatgagttctcgaaagaaaagtcctgcatggaaacacttcttcatctcacccagagactccactaaggccatctgcatgtactgcgtaaaggagttcagtcgagggaagaatgagaaagatctgtccaccagctgccttatgcggcacgtgcgtcgagctcaccccacagttctgatacaggaaaacggctccgtgtcagcggtcagttcgtttcccagccctagtctgctcctgccgccacaacccgctgacgcgggagacctttctacgatcttgagcccgatcaagctggtgcagaaagttgcttccaagatcccaagcccagaccgaataacagaggaaagcgtgtcggtggtttcttcagaggagatctcaagcgatatgagcgtaagcgagaagtgcggccgtgaagaggccctggtcggcagttctcctcatttgcccgctctgcactatgatgagccggcagaaaatctggctgagaagagccttccactgccaaagtccacatcaggatctcgtagaaggtccgctgtgtggaagcacttttatcttagccccctcgacaattccaaagccgtgtgcatacattgtatgaacgaatttagcagaggcaagaatgggaaggatctcggcacctcctgcttgattaggcacatgtggcgagctcatcgggcaatagtcctacaggagaacggtggcacaggaattccaccgctttatagtaccccacctacactgctcccttctctgctcccccctgaaggcgaattgagttcggtttcctcatctccagtgaaacctgtgagggagtcgccttctgctagctcatccccagatcgcctgaccgaagaccttcagtcacacctaaatcctggggatgggttgatggaggatgtggcagctttttcgtcttctgacgacatcggtgaggcctcggcctcatccccggagaagcagcaggcggatgggctctcccctagactttttgagagtggcgcaattttccagcaaaacaaaaaggttatgaaacgactgaaaagcgaagtgtggcatcacttctcacttgctccaatggattctctgaaggccgagtgccggtactgcgggtgcgcgatatctcggggaaagaagggagatgtagggactagttgtttgatgcgccatttgtacaggcggcatccagaagtcgtgggttcacaaaaaggtttccttggtgcatcccttgccaattcaccttatgctactctggcttcggccgagtcatcctcaagcaaacttacggaccttcctactgtagtaactaagaacaatcaggtgatgtttccagtgaattctaagaaaacttctaaactgtggaaccacttcagcatctgttcggcagatagcaccaaggtggtgtgcctccactgcggtcgaacaatttctcgaggcaaaaaaccaactaatttagggacatcctgtctgctccgccatctgcaaaggtttcactcaaatgtcctgaaaaccgaggtctccgaaacagcaaggccatcctcacccgatacacgggtcccccgagggactgagctgtctggagcttcttcattcgacgacactaatgagaagttttatgattcacaccccgtcgccaaaaagataacatctctgattgccgagatgattgccctggacctgcaaccgtacagctttgttgataacgtcgggttcaaccgcctgctggaatatctgaagccacagtattcattgcctgctccgtcctatttcagccgtacagctatcccagggatgtatgacaatgtgaagcaaatcattatgtctcatctcaaagaggccgaaagcggcgtgattcatttcactagtggcatttggatgagtaatcagacacgggagtacctcactctcacagctcattgggtgtcttttgaatctcccgctaggcccagatgtgacgatcatcattgcagtgctctgctagacgtctcacaggtggactgcgactattctggaaatagcatccagaagcaactcgagtgctggtgggaagcttgggtcacgtcgactggcctgcaagtcggaataaccgtaaccgataacgcatccatcgggaagactcttaacgagggtgagcatagcagcgtacagtgcttttctcacacggtcaacctgattgtttcagaggccattaagtctcagcggatggtgcaaaatctactgagcctcgcgaggaagatctgtgagagggtgcataggagcccaaaggctaaagagaagctagctgaacttcaaagagagtatgctttgcctcaacaccaccttattcaggacgtcccctccaaatggagcaccagtttccatatgctggagcgcttaatcgagcagaagcgagctattaacgaaatgtcagtggagtgcaatttccgggagctgatttcctgtgatcagtgggaggtcatgcagtccgtgtgcagagccctcaaacctttcgaggctgcaagtagagagatgagcacacagatgtcaaccctttctcaggtgatacccatggtccacatactgaatcggaaggtggaaatgttgtttgaggagacaatgggcatcgacacgatgctgcggagtctgaaagaggccatggtgtcgagactctccgcaacactgcatgatcctagatatgttttcgctacccttctggatccacggtataaggcctctcttttcacagaagaggaggccgagcaatacaaacaggacctgattagagagcttgagctcatgaactccacatcagaggatgtcgctgcatcacatcggtgcgatgccggtagcccttcaaaagactccgctgcagaggagaatctgtggtcccttgtggccaaggtgaaaaagaaagacccacgagagaagttgcctgaggcaatggtcctcgcatacttggaggaagaggtgctggagcacagttgcgacccccttacatattggaacttaaagaaggctagctggcccggactctctgctttggccgttagattcctgggttgtcctccgtcaatagttccctctgaaaaattgttcaacactccgaccgagaatggctcattaggccagagcagactgatgatggagcatttcgagaaactgatcttcttgaaagtcaacttgcccttgatctacttccaatactag

SEQ ID NO: 182551 - DNA, 3516 bp, Artificial Sequence
  derived and/or modified sequence
atggagaacaacctgaagacctgccccaaggaggacggcgacttcgtgagcgacaagatcaagttcaagatcgaggaggaggacgacgacggcatcccccccgacagcctggagagaatggacttcaagagcgagcaggaggacatgaagcagaccgacagcggcggcgagagagccggcctgggcggcaccggctgcagctgcaagccccccggcaagtacctgagcgccgagagcgaggacgactacggcgccctgttcagccagtacagcagcaccctgtacgacgtggccatggaggccgtgacccagagcctgctgagcagcagaaacatgagcagcagaaagaagagccccgcctggaagcacttcttcatcagccccagagacagcaccaaggccatctgcatgtactgcgtgaaggagttcagcagaggcaagaacgagaaggacctgagcaccagctgcctgatgagacacgtgagaagagcccaccccaccgtgctgatccaggagaacggcagcgtgagcgccgtgagcagcttccccagccccagcctgctgctgcccccccagcccgccgacgccggcgacctgagcaccatcctgagccccatcaagctggtgcagaaggtggccagcaagatccccagccccgacagaatcaccgaggagagcgtgagcgtggtgagcagcgaggagatcagcagcgacatgagcgtgagcgagaagtgcggcagagaggaggccctggtgggcagcagcccccacctgcccgccctgcactacgacgagcccgccgagaacctggccgagaagagcctgcccctgcccaagagcaccagcggcagcagaagaagaagcgccgtgtggaagcacttctacctgagccccctggacaacagcaaggccgtgtgcatccactgcatgaacgagttcagcagaggcaagaacggcaaggacctgggcaccagctgcctgatcagacacatgtggagagcccacagagccatcgtgctgcaggagaacggcggcaccggcatcccccccctgtacagcaccccccccaccctgctgcccagcctgctgccccccgagggcgagctgagcagcgtgagcagcagccccgtgaagcccgtgagagagagccccagcgccagcagcagccccgacagactgaccgaggacctgcagagccacctgaaccccggcgacggcctgatggaggacgtggccgccttcagcagcagcgacgacatcggcgaggccagcgccagcagccccgagaagcagcaggccgacggcctgagccccagactgttcgagagcggcgccatcttccagcagaacaagaaggtgatgaagagactgaagagcgaggtgtggcaccacttcagcctggcccccatggacagcctgaaggccgagtgcagatactgcggctgcgccatcagcagaggcaagaagggcgacgtgggcaccagctgcctgatgagacacctgtacagaagacaccccgaggtggtgggcagccagaagggcttcctgggcgccagcctggccaacagcccctacgccaccctggccagcgccgagagcagcagcagcaagctgaccgacctgcccaccgtggtgaccaagaacaaccaggtgatgttccccgtgaacagcaagaagaccagcaagctgtggaaccacttcagcatctgcagcgccgacagcaccaaggtggtgtgcctgcactgcggcagaaccatcagcagaggcaagaagcccaccaacctgggcaccagctgcctgctgagacacctgcagagattccacagcaacgtgctgaagaccgaggtgagcgagaccgccagacccagcagccccgacaccagagtgcccagaggcaccgagctgagcggcgccagcagcttcgacgacaccaacgagaagttctacgacagccaccccgtggccaagaagatcaccagcctgatcgccgagatgatcgccctggacctgcagccctacagcttcgtggacaacgtgggcttcaacagactgctggagtacctgaagccccagtacagcctgcccgcccccagctacttcagcagaaccgccatccccggcatgtacgacaacgtgaagcagatcatcatgagccacctgaaggaggccgagagcggcgtgatccacttcaccagcggcatctggatgagcaaccagaccagagagtacctgaccctgaccgcccactgggtgagcttcgagagccccgccagacccagatgcgacgaccaccactgcagcgccctgctggacgtgagccaggtggactgcgactacagcggcaacagcatccagaagcagctggagtgctggtgggaggcctgggtgaccagcaccggcctgcaggtgggcatcaccgtgaccgacaacgccagcatcggcaagaccctgaacgagggcgagcacagcagcgtgcagtgcttcagccacaccgtgaacctgatcgtgagcgaggccatcaagagccagagaatggtgcagaacctgctgagcctggccagaaagatctgcgagagagtgcacagaagccccaaggccaaggagaagctggccgagctgcagagagagtacgccctgccccagcaccacctgatccaggacgtgcccagcaagtggagcaccagcttccacatgctggagagactgatcgagcagaagagagccatcaacgagatgagcgtggagtgcaacttcagagagctgatcagctgcgaccagtgggaggtgatgcagagcgtgtgcagagccctgaagcccttcgaggccgccagcagagagatgagcacccagatgagcaccctgagccaggtgatccccatggtgcacatcctgaacagaaaggtggagatgctgttcgaggagaccatgggcatcgacaccatgctgagaagcctgaaggaggccatggtgagcagactgagcgccaccctgcacgaccccagatacgtgttcgccaccctgctggaccccagatacaaggccagcctgttcaccgaggaggaggccgagcagtacaagcaggacctgatcagagagctggagctgatgaacagcaccagcgaggacgtggccgccagccacagatgcgacgccggcagccccagcaaggacagcgccgccgaggagaacctgtggagcctggtggccaaggtgaagaagaaggaccccagagagaagctgcccgaggccatggtgctggcctacctggaggaggaggtgctggagcacagctgcgaccccctgacctactggaacctgaagaaggccagctggcccggcctgagcgccctggccgtgagattcctgggctgcccccccagcatcgtgcccagcgagaagctgttcaacacccccaccgagaacggcagcctgggccagagcagactgatgatggagcacttcgagaagctgatcttcctgaaggtgaacctgcccctgatctacttccagtactag

SEQ ID NO: 182552 - DNA, 5257 bp, Artificial Sequence
  derived and/or modified sequence
gcgcagcgtccggcggcgtcgcgggcggcgggcggcggggccgcgggaggggcgcgggggcagacaaagccgcggtaatgaatggagcgtccgcccgcgccgccgtcgtccgcagccggccgggagccgccccagaggccgggccgaggtaatgcacaagggtcacgtgtatgctctcaagatgatcaggcagatcctgtcctcaggaccagaagcacgtctctgctgcacacattgttgtctacaccatgagtgtttagtagcaggactcttggaaagcagtgatctatgctgtaagaccatgagtcacagattctttttttcagtactatttatgattagccatatttctagaaacatcctgaaagatggaattatgacgaaaaagtgaagataatctacattcgggggcacaaatgagcacttggatcagtgttttatgaacctaagatacagccggagtagttatggtcagtcatggagaataacttgaaaacttgtcccaaagaggacggtgatttcgtttctgataaaataaagtttaaaatagaagaggaagatgatgatggaattcctcctgatagtttggaaagaatggactttaaaagcgagcaggaggacatgaagcagacagacagcggtggggagcgagcgggcctcggtgggacgggttgcagctgcaagcccccggggaagtacttgtctgcagagagtgaggatgactatggcgcgctgttctcccagtacagcagcaccctatacgacgtggccatggaggccgtgacccagagcctcctttccagccggaacatgagctccaggaagaagtctccagcctggaagcatttttttatctctccccgagacagcactaaagcaatatgcatgtactgtgtgaaggagttcagcagaggcaaaaacgagaaagacttgagtaccagttgtctcatgaggcacgtgaggcgcgcacacccgaccgtgctcattcaggaaaatggcagtgtgtctgccgtgtcctcgttcccctctccctcactcctgcttccaccacagcctgcggacgcgggtgacctcagcaccatcctctcacccatcaaacttgtccagaaagtggcgtctaagatcccgtcccccgatcgaataacagaggagtctgtgtctgtagtttcttctgaagaaatctcctctgacatgtccgtttcggagaagtgcggcagagaagaagccctggtggggtcgtctccccacctccctgctctccattacgatgaacctgcagagaacttagcggagaagagccttccacttccaaagagcacctctgggtccaggagaaggtccgctgtctggaagcacttctacctgtcgccactggacaactccaaagctgtctgcattcactgcatgaacgagttcagccgggggaagaatgggaaggacctgggcacgagctgcctcatcaggcacatgtggagggcacaccgcgccatcgtgttgcaggagaacgggggcacgggcatcccgccactgtactccacccctcccactctgctgccttccttgctgccgccggagggggagctcagctctgtgtcctcgtctccagtaaagccggtcagagagtccccttcggcctcctcctcccctgacaggctgactgaggacttgcagtctcacttgaaccctggagatgggctgatggaagacgtggcggccttctcatcttccgatgacataggggaggcctcggcgtcctctcctgagaagcagcaggctgatgggctgagtcctagattgtttgaatctggcgccatcttccagcagaataaaaaggtcatgaaaagactgaagtcggaggtctggcatcacttctccctggcccccatggacagcctcaaggccgagtgtcggtactgcggctgtgccatcagccgggggaagaagggtgatgtgggcaccagctgcctgatgagacatctctaccggcgccatccagaagttgtcgggagccagaagggcttcctgggtgcaagtctggcaaactctccgtatgccactttggcctctgcagaaagttcctcttccaaattgactgacttgccaacagtggtcacaaaaaacaatcaagttatgtttcctgttaatagcaaaaagacctcgaagctgtggaatcatttttctatttgctccgcagactccacaaaagtcgtgtgcttgcactgtggccggaccatcagccgggggaagaagccgactaacttgggtaccagctgtcttctgagacatttacagcggttccatagcaacgtgctgaaaactgaggtctcggagacggctcggccctcctctccggacacccgggtgccgcggggcacagaattatcaggcgcttcctcttttgatgacaccaatgagaagttttacgattctcacccagttgccaaaaaaatcacaagtctcatagctgaaatgattgcacttgacctccagccatattcttttgtagacaacgttggctttaacaggctgcttgaatacttgaaacctcagtactccctccccgccccttcctacttctccaggacagctatcccaggtatgtatgataatgtgaagcagataattatgtcccaccttaaggaagctgagagtggtgtgatccacttcacgtctggaatatggatgagtaaccagacccgtgagtacctgaccctcacggcccactgggtttccttcgagtcgccagcccggccgcgctgtgacgaccaccactgctcggcgctgttggacgtgtcgcaggtggactgcgactacagtggcaacagcattcagaagcagctggagtgctggtgggaagcgtgggtgacctccaccggccttcaggtgggcatcaccgtcaccgacaacgccagcatcgggaagacgctgaacgagggggagcactcgagcgtgcagtgcttcagccatacggtgaacctgatcgtcagcgaggccattaagagccagcggatggtgcagaacctgctgagcctcgcccggaagatctgcgagcgggtgcaccggtcgcccaaggcgaaggagaaactggccgagctgcagagggagtacgcgctgcctcagcatcacctcatccaggacgtcccgtccaagtggagcacttccttccacatgctcgagcggctcattgagcagaaaagggccattaacgagatgtccgtcgagtgtaacttccgagagctgatcagctgcgaccagtgggaggtcatgcagtccgtgtgccgtgcgctaaagcccttcgaggctgcgagccgggagatgagcacgcagatgtccaccctcagccaggtcatccccatggtacacatcctcaacaggaaggtggagatgctcttcgaggagacgatgggcatcgacaccatgctgcgctctctgaaggaggccatggtgagccgcctgtctgccaccctccacgacccgcggtacgtcttcgccacgctgctggatcctcgctacaaggcctccctgtttacggaggaggaggcggagcagtacaaacaggatttaatcagggaactcgaactcatgaattctacctcagaggacgtggctgcctcccacaggtgtgatgctggctccccgtcgaaagactctgccgcagaggagaacctgtggtcacttgtggccaaggtgaagaagaaagacccaagagaaaagctgcctgaagccatggtgcttgcgtatctggaggaggaggtgcttgaacacagctgtgacccgctcacctactggaacctgaagaaggcgtcctggccggggctgtccgcgctggccgtcagatttttgggctgccccccaagcatcgtcccttcagaaaagctgttcaacacacccactgagaacggtagccttggccaatccaggctcatgatggaacattttgaaaaacttatctttttgaaagtgaatcttcccttaatatactttcagtattgaaactcacgacggcaccactaggccagaggcgtggctgccccagcgttagcagcctgtaccaggtctatgacccgctctgcccacggctgtgtacgacatcagaccaggcactctcagggccgctctccagctcaccacagtgtctccacgtgccttaccccttctccttcaggccaagtttcgcggggtgttttattaagacgtccactagaaatagcttgtcctgtcaactatgaaatatggtgactagattttaattcataaccgtaaagttttttaaagttttgggttagtaatttgttttactagaatgacaaagaagatgtaaaccattttattctgtaggctttttactcaattatgtacaaaccacaaatcaggtactgtattttagtgaagcattgctttaattgcaacagaatagcttttgtggctatcaaatgaaatctgtaaataggaggtggagggcaagccatcctgactgagcagtttttaaccgcaggttctaaagtgtcccgcggagtacagataatattctggaaggtaactgtttactacgacagagacgtggcatttggaaacgaaacttagatgtttcatggagcttattttgagaactttcccatttcaggtttctgcattcaggctttacatggtcagttaactcagagataccccagctgtttatcatcagctcctctgaaatgtgatccctttgtaactgtgctcatcacttcgccagtgcgttcaatgacacgctgatggcaggtggtccctgctgaaacccccacgcctccgcttcagcatctccacgctctgaagctgtctttcaaaatgtgtgcactgacccccttgtttgatcaaatttgtgtaaaatttttttagaagagatggcttattaacagggaagaagcttgttatattccagttgtaagaatagccttagtgtttagatttttttatgatagggaagatgcggccatcactgggatattttcaaatcccaaggacatcagagtgaagtgtcagttgtcagatgattttaaaagttatgtcttcagagaaaaaaagattcattttctcattttaaaccaattaaatattctgagtgagactaatcactcatttgcctacgaccttttagaaaagttgttttgttgaaatactgtacgtacgcttaatctaaatttgcattgactatgttttagtgtatttataaatggtgaactcagtttctgaaattaaacttcttatttgcaatttt

SEQ ID NO: 182553 - protein, 661 aa, Artificial Sequence
  derived and/or modified sequence
MEGAAAPVAGDRPDLGLGAPGSPREAVAGATAALEPRKPHGVKRHHHKHNLKHRYELQETLGKGTYGKVKRATERFSGRVVAIKSIRKDKIKDEQDMVHIRREIEIMSSLNHPHIISIYEVFENKDKIVIIMEYASKGELYDYISERRRLSERETRHFFRQIVSAVHYCHKNGVVHRDLKLENILLDDNCNIKIADFGLSNLYQKDKFLQTFCGSPLYASPEIVNGRPYRGPEVDSWALGVLLYTLVYGTMPFDGFDHKNLIRQISSGEYREPTQPSDARGLIRWMLMVNPDRRATIEDIANHWWVNWGYKSSVCDCDALHDSESPLLARIIDWHHRSTGLQADTEAKMKGLAKPTTSEVMLERQRSLKKSKKENDFAQSGQDAVPESPSKLSSKRPKGILKKRSNSEHRSHSTGFIEGVVGPALPSTFKMEQDLCRTGVLLPSSPEAEVPGKLSPKQSATMPKKGILKKTQQRESGYYSSPERSESSELLDSNDVMGSSIPSPSPPDPARVTSHSLSCRRKGILKHSSKYSAGTMDPALVSPEMPTLESLSEPGVPAEGLSRSYSRPSSVISDDSVLSSDSFDLLDLQENRPARQRIRSCVSAENFLQIQDFEGLQNRPRPQYLKRYRNRLADSSFSLLTDMDDVTQVYKQALEICSKLN

SEQ ID NO: 182554 - protein, 208 aa, Artificial Sequence
  derived and/or modified sequence
MEGAAAPVAGDRPDLGLGAPGSPREAVAGATAALEPRKPHGVKRHHHKHNLKHRYELQETLGKGTYGKVKRATERFSGRVVAIKSIRKDKIKDEQDMVHIRREIEIMSSLNHPHIISIYEVFENKDKIVIIMEYASKGELYDYISERRRLSERETRHFFRQIVSAVHYCHKNGVVHRDLKLKRPSRENQVTTLPQSAVSLRSCWTVMM

SEQ ID NO: 182555 - DNA, 627 bp, Artificial Sequence
  derived and/or modified sequence
atggagggcgccgccgcccccgtggccggcgacagacccgacctgggcctgggcgcccccggcagccccagagaggccgtggccggcgccaccgccgccctggagcccagaaagccccacggcgtgaagagacaccaccacaagcacaacctgaagcacagatacgagctgcaggagaccctgggcaagggcacctacggcaaggtgaagagagccaccgagagattcagcggcagagtggtggccatcaagagcatcagaaaggacaagatcaaggacgagcaggacatggtgcacatcagaagagagatcgagatcatgagcagcctgaaccacccccacatcatcagcatctacgaggtgttcgagaacaaggacaagatcgtgatcatcatggagtacgccagcaagggcgagctgtacgactacatcagcgagagaagaagactgagcgagagagagaccagacacttcttcagacagatcgtgagcgccgtgcactactgccacaagaacggcgtggtgcacagagacctgaagctgaagagacccagcagagagaaccaggtgaccaccctgccccagagcgccgtgagcctgagaagctgctggaccgtgatgatgtag

SEQ ID NO: 182556 - DNA, 1986 bp, Artificial Sequence
  derived and/or modified sequence
atggagggggccgccgcccctgtcgctggggatcgtcctgatctgggactcggggcacccggcagccctagggaggcggtagctggcgccaccgcagccctggaacccaggaagccacacggagtgaagaggcatcatcacaagcacaatctcaaacaccgttatgagcttcaggagaccctgggcaagggcacatacggcaaggtaaagcgcgccacagaacgattttccggaagggtggtagcaattaagagtattagaaaagacaagatcaaggacgagcaggacatggtgcatattcgccgcgaaattgaaatcatgagttctctgaatcaccctcacataatatccatctacgaagtgttcgagaataaagataagatagtcatcataatggaatatgccagcaaaggcgaattatacgactacattagtgaaagaagacggttgtctgagcgcgaaaccaggcatttttttaggcagatagtaagcgccgtgcactactgtcacaagaacggcgtggtccacagggacttaaagctggaaaatattcttcttgatgacaactgcaacatcaagatcgctgactttggactatcaaatctgtatcagaaagataagtttctgcagacattctgcggctctcccctttacgcctctccggagattgtcaacggacggccataccggggccctgaagtggactcctgggccctgggagtgctcctgtacactttggtgtacggtactatgcccttcgacggctttgatcacaaaaacctcatccgtcagattagcagcggggaataccgagaacctacccagccgtcagatgctcgtggattaattaggtggatgctgatggttaaccctgacagaagagcgaccattgaggacatcgcgaatcactggtgggtcaactggggctacaagagttctgtctgcgattgcgatgcattacacgattccgaaagccctctacttgcccgtataatcgattggcaccatagatcaaccggactgcaagccgacaccgaggcgaaaatgaagggccttgccaaacctaccactagcgaagtgatgctcgagagacaacgcagcctaaagaaatcgaagaaagagaacgatttcgcccagagcggacaggatgccgttccagagtctccatccaagctttcatccaagaggccaaaaggcatcttaaagaagagatcaaattctgagcaccgttctcattccactggctttatcgaaggcgtggtgggcccagcactcccttctactttcaagatggagcaggatctgtgtagaactggcgtactgctaccgagtagccccgaggctgaagtgcctggcaagttgagtcctaaacaatccgccacaatgcctaagaaaggcattttaaagaagacccagcagcgggagtcaggatactactcttctcctgagagaagtgaatccagtgaactgctggactccaatgacgtcatgggcagtagtatcccttccccctctcctcctgatccagccagggtcacttcacattctctctcctgcaggcgcaagggcatccttaaacattcatccaaatactctgctggaacgatggatcccgccttggtttcacccgaaatgccaactcttgagagccttagcgagccgggcgtgccagcagagggcctttctagaagctattcgaggccgagtagtgtgattagcgatgattctgtcctcagttcagattcttttgacctgttggatcttcaggagaatagaccagcccgccaaaggataagatcatgcgtgtccgcagagaactttctccagattcaggatttcgaaggacttcagaacagaccacgcccacagtaccttaaaagatatcggaataggttggctgattcgtcgttttcactacttactgatatggatgatgtcacccaagtttacaaacaggccctagaaatctgtagcaaactgaactag

SEQ ID NO: 182557 - DNA, 687 bp, Artificial Sequence
  derived and/or modified sequence
gacatcccagcgctgtgcccggtcttgccctctgtagcccggctcgccccgcgcttggacatggaaggggccgccgcgcctgtggcgggggaccgccccgacttggggctgggggcgccgggctctccccgagaggcggtggcgggggcgactgcagccctggagcccaggaagccgcacggggtgaagcggcatcaccacaagcacaacttgaagcaccgctacgagctgcaggagaccctgggcaaaggcacctacggcaaagtcaagcgggccaccgagaggttttctggccgagtggttgctataaaatccattcgtaaggacaaaattaaggatgaacaagacatggttcacatcagacgagagattgagatcatgtcatctctcaaccatcctcatatcatcagtatttatgaagtgtttgagaacaaagataagattgtgatcatcatggaatatgccagcaaaggggagctgtacgattacatcagtgagcggcgacgcctcagtgagagggagacccggcacttcttccggcagatcgtctctgctgtgcactattgtcacaagaacggtgtggtccaccgggacttgaagctgaaaagacccagcagagagaatcaggttactactcttccccagagcgcagtgagtcttcggagctgttggacagtaatgatgtga

SEQ ID NO: 182558 - DNA, 627 bp, Artificial Sequence
  derived and/or modified sequence
atggagggggctgctgccccagtggctggggacagacccgatctggggctgggcgcgcccggttctccccgagaggccgtcgctggcgcaactgctgctctggagcctaggaaaccgcacggcgtcaagagacaccaccacaaacacaacttgaaacatcgctacgaattacaggaaactctgggcaagggcacatacggtaaagtgaagcgcgcgacagaacggttttccgggcgggttgtggctatcaaatcaatcaggaaggataagatcaaagatgagcaggacatggtgcacatcaggcgggagattgagatcatgagttcattgaatcatcctcacattatatccatttacgaagtgtttgagaataaggacaaaattgtgataattatggagtatgcaagtaaaggcgaattgtacgattacatttccgagcgcaggcgactgtctgaaagggaaactcgccactttttccggcaaatcgtgagcgcggtgcactactgtcataaaaatggtgttgtgcaccgagatctgaaattgaaaagaccgtcaagggagaaccaagtgaccacactgccacaatcagcagtctctctgaggagttgctggactgtgatgatgtag

SEQ ID NO: 182559 - DNA, 1986 bp, Artificial Sequence
  derived and/or modified sequence
atggagggcgctgctgcccctgtggccggggacagaccagacctgggcctgggcgcccctggcagcccccgggaggccgtggccggggccacagctgccctggagcccaggaagccccacggcgtgaagaggcaccaccacaagcacaacctgaagcacagatatgagctgcaggagaccctgggcaagggcacctacggcaaggtgaagagggccacagagcgcttcagcggccgggtggtggccatcaagagcatcaggaaggacaagatcaaggatgagcaggacatggtgcacatcagaagagaaattgagatcatgagcagcctgaaccacccccacatcatcagcatctatgaggtgtttgagaacaaggacaagatcgtcatcatcatggagtatgccagcaaaggagagctgtatgactacatcagcgagcggcggcggctgtctgagcgggagaccaggcacttcttccggcagatcgtgtctgctgtgcactactgccacaagaatggagtggtgcaccgggacctgaagctggagaacatcctgctggatgacaactgcaacatcaagattgctgactttggcctgagcaacctgtaccagaaggacaagttcctgcagaccttctgtggcagccccctgtatgccagccctgagatcgtgaatggccggccctaccggggccctgaggtggacagctgggccctgggcgtgctgctgtacaccctggtgtatggcaccatgccctttgatggctttgaccacaagaacctgatccggcagatcagcagtggagagtaccgggagcccacccagcccagtgatgcccggggcctcatccgctggatgctgatggtgaacccagacagaagagccaccatcgaggacatcgccaaccactggtgggtgaactggggctacaagagctctgtgtgtgactgtgatgccctgcatgattctgagagccccctgctggcccgcatcatcgactggcaccacaggagcacaggcctgcaggccgacacagaggccaagatgaagggcctggccaagcccaccaccagcgaggtgatgctggagcggcagaggagcctgaagaagagcaagaaggaaaatgactttgcccagagcggccaggatgctgtgcctgagagccccagcaagctgagcagcaagaggcccaagggcatcctgaagaagaggagcaacagcgagcacaggagccacagcacaggcttcattgaaggagtggtgggccctgccctgcccagcaccttcaagatggagcaggacctgtgcaggactggagtgctgctgcccagcagccctgaggccgaggtgcctgggaagctgagccccaagcagagcgccaccatgcccaagaagggcatcctgaagaagacccagcagcgggagagcggctactacagcagccctgagaggtctgagagcagcgagctgctggacagcaatgatgtgatgggcagcagcatccccagccccagccccccagaccctgcccgggtgaccagccacagcctgagctgcaggaggaagggcatcctgaagcacagcagcaagtacagcgctggcaccatggaccctgccctggtgtccccagagatgcccaccctggagagcctgtctgagcccggggtgcctgctgagggcctgagccgcagctacagccggcccagcagcgtcatcagtgatgacagcgtgctgagcagtgacagctttgacctgctggacctgcaggagaacagacctgcccggcagaggatccgcagctgtgtgtctgctgagaacttcctgcagatccaggactttgagggcctgcagaaccggccccggccccagtacctgaagcgctacagaaaccggctggccgacagcagcttcagcctgctgacagacatggatgatgtgacccaggtgtacaagcaggccctggagatctgcagcaagctgaactag

SEQ ID NO: 182560 - DNA, 627 bp, Artificial Sequence
  derived and/or modified sequence
atggagggcgctgctgcccctgtggccggggacagaccagacctgggcctgggcgcccctggcagcccccgggaggccgtggccggggccacagctgccctggagcccaggaagccccacggcgtgaagaggcaccaccacaagcacaacctgaagcacagatatgagctgcaggagaccctgggcaagggcacctacggcaaggtgaagagggccacagagcgcttcagcggccgggtggtggccatcaagagcatcaggaaggacaagatcaaggatgagcaggacatggtgcacatcagaagagaaattgagatcatgagcagcctgaaccacccccacatcatcagcatctatgaggtgtttgagaacaaggacaagatcgtcatcatcatggagtatgccagcaaaggagagctgtatgactacatcagcgagcggcggcggctgtctgagcgggagaccaggcacttcttccggcagatcgtgtctgctgtgcactactgccacaagaatggagtggtgcaccgggacctgaagctgaagaggcccagccgggagaaccaggtgaccaccctgccccagagcgctgtgtccctgcggagctgctggacagtgatgatgtag

SEQ ID NO: 182561 - DNA, 1986 bp, Artificial Sequence
  derived and/or modified sequence
atggagggcgccgccgcccccgtggccggcgaccggcccgacctgggacttggggcgccaggcagcccgagagaagcggttgcaggagcaactgctgccctggagcctcgcaaaccgcatggagtcaagcgccaccatcacaaacacaacttgaaacatcgttacgaattacaggagacgctgggcaaaggcacctatggtaaggtgaaaagggcaaccgaaaggtttagtgggcgggtggtggctatcaagtccatacgcaaggataagattaaagatgagcaggatatggtacatatcagacgcgagattgagataatgagcagtctgaaccaccctcacatcatctccatttatgaggttttcgagaacaaggacaagatcgtgataatcatggaatacgccagtaagggagagctgtacgactacatcagcgagaggcgccggctaagtgaaagggagacccgccacttctttaggcaaattgttagtgccgtgcactactgtcacaagaatggtgttgtgcacagggaccttaaactggagaatatactcctggacgacaattgtaacattaagattgctgattttggccttagcaatctgtaccagaaagacaagttcttgcagaccttctgcgggagcccactctacgcctctccagagattgtgaacggaaggccatatcgaggacctgaagtggacagttgggcgctgggcgttttactttacaccctggtttacggcaccatgccgttcgacgggttcgaccacaaaaatctaattcggcagatcagctctggcgagtacagggagcctacacagccttcagatgcccggggtctgatcaggtggatgctgatggtcaatccggacaggcgcgcaactattgaagatatcgctaaccactggtgggtgaactggggatacaaaagcagcgtgtgtgactgcgacgccctacatgatagcgaatctcctctgttggcaagaatcatcgactggcatcacagatccaccgggctgcaggcagatacagaggctaagatgaagggcctagccaagccgacaacatcagaagttatgctggagagacagcgcagcctcaagaagtccaagaaagaaaacgactttgcgcagagcggccaggacgccgtgccagaaagccctagtaagctgtcttccaagaggccaaagggtattctgaagaaacggtctaactccgaacaccgaagccattcaacgggcttcattgagggcgttgtgggcccggcactgccttctacctttaagatggagcaggatctatgtcggaccggggtgttgcttcctagcagccccgaggccgaggttcccggcaaactcagcccaaagcagagtgctacgatgccaaaaaaaggtattctgaagaagactcagcagcgcgagagtggatattacagctcacccgagcggtctgaatctagcgaactgttggattccaatgatgttatgggctctagcattccctcccctagcccaccggatcccgcgcgtgtgacttcacatagcctttcttgtcggagaaaggggattctcaagcactcttccaagtacagcgcaggaaccatggacccagccttagtgtcacccgaaatgccaaccctcgaatctttgagcgagccaggagttccagccgagggacttagcaggtcctatagtagaccctccagtgtaatcagtgacgattctgtactttcaagcgatagttttgaccttctggatctccaggagaaccgccctgccagacagcggatccgatcatgcgtgtccgctgagaattttctgcagatccaggactttgagggtttacagaatagaccccgtcctcaatatctgaagcggtatcggaaccgactagcagactcttcattcagtcttctaactgacatggatgatgtcacccaggtgtacaaacaggccctggagatttgctccaaactgaattag

SEQ ID NO: 182562 - DNA, 627 bp, Artificial Sequence
  derived and/or modified sequence
atggagggcgccgccgcccccgtggccggcgaccggcccgacctgggactgggtgcacccggcagcccaagggaagccgtggccggtgcgaccgctgccctcgaacccagaaagcctcatggcgtgaagagacaccaccacaagcacaacctgaaacaccgctacgaactccaggagacccttggcaaaggtacctacggaaaagtcaagcgcgctactgagaggtttagcggaagggtggtggccataaaatcaatccggaaagacaaaatcaaggacgagcaggacatggtccacatcagacgagaaatcgagattatgtcaagtttgaaccaccctcacatcatcagcatatatgaagtgtttgaaaacaaagacaaaatcgtgatcattatggagtatgccagtaaaggagagctgtacgactatatcagtgagcgcaggcgcctctccgaaagggaaaccagacacttctttagacagatcgtctctgcagtgcattactgtcacaagaacggcgtagtgcatagggatctaaagctaaaacgcccatcacgagaaaaccaggtgaccacactacctcagtctgcagttagcctgagatcatgctggacggtaatgatgtag

SEQ ID NO: 182563 - DNA, 1986 bp, Artificial Sequence
  derived and/or modified sequence
atggaaggagccgctgccccagtagcgggagaccgacctgacctaggactcggcgcacccggatccccaagagaggcagtggcaggggcaaccgccgctctcgagcccaggaaaccccatggcgtgaagagacatcatcacaaacacaacctgaagcaccggtatgaactgcaagaaactcttggcaaaggtacgtatggcaaagttaagcgtgccacggaaagattctctggcagagtggttgctattaaatcaatacgtaaagacaagatcaaagacgagcaggatatggtgcacatcaggcgagagatagagataatgtcaagtctgaaccaccctcacattatttccatatacgaggttttcgagaataaagacaaaattgtgatcataatggaatatgcaagcaagggggagctgtacgactacatatcagaacgtcgtaggctctctgagcgggagactaggcatttctttcgccaaatcgtatcagctgttcactattgtcataagaatggtgtggtgcaccgtgacctgaagcttgagaatatcctgctcgatgataactgtaatataaagattgccgatttcggcctatccaatctgtatcagaaggacaagttcctgcagactttttgtggatctccgctttatgcctcacctgagatcgtgaacggacggccttacagaggccctgaagtggactcgtgggcactgggggtgttgctctatactctggtttacggtacaatgcccttcgatgggtttgatcacaaaaacctcataaggcagatcagttccggggagtaccgggagcccacacagccatcagatgcgcgtggcctaattcgatggatgttaatggttaatcccgaccggagggctacgatagaggatattgcaaaccactggtgggtcaactggggctacaagtcctccgtatgtgactgcgatgccctgcacgattccgaatcccctctactcgccaggattattgactggcaccatcggagcaccggcttacaggccgacacagaggccaagatgaaagggctggcgaaaccgacaacgtccgaagtgatgctggaacggcagagaagtctcaagaaatcgaaaaaagagaacgactttgcacagtccggccaggatgctgtccccgagagcccatctaagctgtcttcgaaacggccaaagggcattctgaaaaagagatccaattcagagcaccggagccattctactggattcatcgaaggcgtcgtgggcccagctttgccatctacattcaagatggaacaggatctctgtaggaccggggtcctcctcccctcctctcccgaagcagaagtgcctgggaaactttccccaaagcagagtgccactatgccgaagaagggaattctgaagaaaacccaacaacgggagagcgggtactattcttcacctgagcggtccgagtccagtgagttgctggactcaaacgacgtgatgggaagttccattccaagtccttcaccacctgaccccgctagggttacatcacatagcttatcctgtcgcaggaagggaatcctaaagcactcctccaagtactctgctggaaccatggatccggctttggtgtctccagagatgccgaccctagagtctctctccgaacctggcgtgcctgccgaaggcctgtctcggagttacagccggccatcatctgtgatctctgacgacagcgtgctctctagtgactctttcgacctcctcgatttgcaggagaatagaccagcccgacagcggatccgatcctgcgtctcagccgaaaattttttacaaatccaggacttcgaagggcttcagaatcgccctcggccacagtacttaaagcgttatcgcaaccgcctggccgactcatccttctctctgctgacagacatggatgacgtaacccaagtttataagcaggccctcgagatctgcagcaagttaaactag

SEQ ID NO: 182564 - DNA, 627 bp, Artificial Sequence
  derived and/or modified sequence
atggagggcgctgcagcacctgtggccggtgatcgtcctgacctcgggctgggagctcctggctctcctcgcgaagcggtcgccggagcgactgcagctttggagcctcgcaaaccccacggggtgaagaggcatcaccataaacacaacttaaagcaccggtatgaactccaggagacactggggaagggaacctacggcaaggtaaagcgggcaaccgagcggttctctggacgtgtggtggccattaagagtatccgcaaggacaaaatcaaagacgagcaagatatggtacatattaggagggagatcgagattatgagttcgttgaaccaccctcacatcatttccatctatgaagtgttcgagaataaagacaaaatcgttatcattatggagtatgcgtcaaagggcgagctctacgactatatcagtgagcgacgacgtctgagcgagcgagaaactcgtcacttcttcagacagatcgtttccgcagtccactattgtcataagaatggcgtggtacaccgagatcttaagctgaaacgaccgtctcgggaaaatcaggtgactacgttacctcagtccgctgtgtccctacggtcatgttggaccgtgatgatgtag

SEQ ID NO: 182565 - DNA, 6828 bp, Artificial Sequence
  derived and/or modified sequence
aatctcccaaggcctaaggaggcaagaggcctgcaaatcgcctcctgctcagcaaacgggttgctcagcaggcccggggtcctggtccaccccaggtccctggtttgcccacctccgatggcggccttcgctggcagggtgggcgcctctggggagccagctccgtcccggcgcctttagagccccatctcttccacgtccctggccttcctccccttccaggcggctgtccccgccggggtccagatggtgtcggagggccggcggttcgacggcgggcccggggttcagcctcccggcctccctccgtccctgactctcctttcttcggagagggcgcgggggccggggccaaagcgccgctcttggggttctcctggactcggagttgccccaggcgggcgcagctctgccccgcggggtgccagcctcgggcgggcaaggtccgtgagtcaccgcctgtaaccgaacaccaggcctccctgccccctcccccagctccggccgccaggctgcggcgacacctacaagaaaatgaaggggcgcccaggcccgcggcggccccggccgtatcgcgagcaggtcccggcggcccccggctcgcggcgctctttcttccccggccccggggctcggccagccgcaaccgccgccccggcgccagcaggaatccaggccgagcgaccggccccggagcccgaggcggcggagggcccgcggtagctgcgactggcgagcccgagagcgcccggggagggggcgcccggcttggaatttcccggtcccttccggcccagcgaggacaaagcactcctggccgccgccgccgccgccgccgtggcctacgccgcgccgcacaaagggcgagtcgcgacacgctcccatccccctcccagctcacggcggccccggccccgggtggctgcagggaggtgggggaagccctggctgcaccgcccctcgctccccctcccctggggccgcgcgagcgccgcccccgccccgtctgcgcgtcctcccggggaggggttggggggcgcggcgccccacataacactccccctcctgcgctgcgagccaccctctcccctccctcctgcaaacaccaccgcctcccctgccaccgccgccacctcgcccgacgctccacagctcgccgcggccggggggcggtgcgcggaccgtgcgcgccgcgggcgccagatgtgcagtccccgccgccgccagtgaccgagccgcagtccgagcggtatcgggccgcctccctgatgctgcgggggcgaccttgagcgtacagcggcttccctcggtggggaccccgacatcccagcgctgtgcccggtcttgccctctgtagcccggctcgccccgcgcttggacatggaaggggccgccgcgcctgtggcgggggaccgccccgacttggggctgggggcgccgggctctccccgagaggcggtggcgggggcgactgcagccctggagcccaggaagccgcacggggtgaagcggcatcaccacaagcacaacttgaagcaccgctacgagctgcaggagaccctgggcaaaggcacctacggcaaagtcaagcgggccaccgagaggttttctggccgagtggttgctataaaatccattcgtaaggacaaaattaaggatgaacaagacatggttcacatcagacgagagattgagatcatgtcatctctcaaccatcctcatatcatcagtatttatgaagtgtttgagaacaaagataagattgtgatcatcatggaatatgccagcaaaggggagctgtacgattacatcagtgagcggcgacgcctcagtgagagggagacccggcacttcttccggcagatcgtctctgctgtgcactattgtcacaagaacggtgtggtccaccgggacttgaagctggaaaatatactgctcgatgacaactgcaatattaagattgctgactttgggctttccaacctgtaccagaaggataagttcttacaaacgttttgtgggagtccactctatgcatctcctgagattgtcaatgggagaccttaccgagggccagaggtggacagctgggccctgggtgtgttgctttacactcttgtttatggaacaatgcccttcgatggtttcgatcacaaaaacctcattcggcaaatcagcagcggagagtaccgggagccaacacagccctcagatgctcgaggactcatacggtggatgctgatggtgaaccccgatcgccgggccactattgaggacattgccaaccactggtgggtgaactggggctataagagcagcgtgtgtgactgtgatgccctccatgactctgagtccccactcctggctcggatcattgactggcaccaccgttccacagggctgcaggctgacaccgaagccaaaatgaagggcctggccaaacccacgacctctgaggtcatgctagagcggcagcggtcgctgaagaaatccaagaaagagaatgactttgctcagtctggtcaggatgcagtgcctgaaagcccatccaagttgagttctaagaggcccaaggggatcctgaagaagcgaagcaacagcgagcatcgctctcacagcactggcttcattgaaggtgtagttggtcctgccttaccctctactttcaagatggagcaggacttgtgcaggactggcgtgctcctcccaagctcaccagaggcagaggtgccgggaaaactcagccccaagcagtcggccacgatgcccaagaaaggcatcttgaaaaagacccagcagagagaatcaggttactactcttccccagagcgcagtgagtcttcggagctgttggacagtaatgatgtgatgggcagcagcatcccctcccccagccccccggacccagccagggtaacctcccacagcctctcctgccggaggaagggcatcttgaaacacagcagcaaatactcagcgggcaccatggacccagccctggtcagccctgaaatgcccacactggaatccctgtcagagcctggtgtccctgccgagggcctctcccggagctacagccgcccttccagtgtcatcagcgatgacagcgtgctgtccagcgactcttttgacttgctggatttgcaggagaatcgccctgcccgccagcgcatccgcagctgcgtctctgcagaaaacttcctccagatccaggactttgaggggctccagaaccggccccggccccagtacctgaagcggtaccggaaccggctggcagacagcagcttctccctcctcacagacatggatgatgtgactcaggtctacaagcaagcgctggagatctgcagcaagctcaactagcattccagggcgcccaggggcgggcgggggtacgagggaggaaggggagcaagacttgggctcacaggctggttacctctttgctggctgtgacaacagactgaaaaaggattggcactgtctcacttggccaagtttgcagccttgagccaacacctaaaagggagaggtgggctcttctgccagttctgtcaattgtcagtcagaatttgggccctgtttggcatttgctttatggcacctcctagaggaccagctgtccaggggaggtggtattgaccggcactcagtgggtggagaggaagcatatgtggaaggagcatttccttagaagtcatccagatgcttctggaggaggggcaggagacacttgggctgtttgccttgggtgagcccaaagaacttgccccttttctccttgtattagcaagctaggtctggctgcgtggagctggcaagtagatttcagcaacttgagcttgagttgacgatcaattaatagtggctgccagttgtgctggcgtaagtggcccacatcatggggaaggagtgctgtgattgactagtaatggctaccacgggaaagggaaggggaagcagtagcactaatgctatgtagttgtcatctttgatctggctaggccctgggaatcgggtttagtcatcctgtgggatctatgttaactctttcatgccactggtgaggcatttgttaatttgctactcaactttgaggaaagacagggccttggtcagagagagaatgctctgaactctgctaaggacatagagtcagcccatggtgatttagctccttgctgttcacctcctctttcctgatgtctgccttgctctacagcacaacctcttgagggtggacagggagaaagatgatggtgtcagaggtcaaaactattatatatgacagggcacaagatggtctgtgatctttgcacagatgaatggaagttgatgcacaccaacaagaggcaacttgtcactttctttctcaatattaactggaatgctgcctcttgggttctcacctgcatggatgctttgagttggacgtgatactgtccatattctccagaggattacctggctgaaccattggctctgttcaccagtgacagatggtttccccatccactgagtgtagcatcctcagaggtaggcaagtttgcttctagggagttagcatgtagatgggatattgggatgaggaaaggaaaatcaggtagatggtgctttttttcccccaaatctaagtattctatgtcatggttttaaactttgccatgaactcctgggctttgggggaagagaaagttccattcatttaaatgaataaggtgttgaaagagtgcagggggttgggaggaagcatgtaagagagggaacatttccttagatgttacccagatggttctgggggagacagaaaagaggtgcggcaggactcttatcttaaaaagtaaacaaaacaaaacaaaacaaaacaaaaaactagatatgtaatttctaaacacccagatcacaatgacaagatgccactccaaccatgggacaccttcatgatactaggtttgtacttcctggtctctgggatgacttcagattctgctggccaaggcaaattgaactcagttcaagatggccaccactggtagacgtgtagatagaaaagaggactggtcttgggaacatctttggaaaaaccaacaaacaatagttctagggagatgagaaaaaaattcaccttacagtgctaagaaagtgcattagaatggaattgccctttccttaaggagacagtttgggctctccccttgccaccggctctggtgttttggcttatgcgttccttcaggttgagctgagcagtgtgttatgggaagctgctcaatttcctttcattcaattccacctccttcctgaactctaatagaggttaaaagggaaaaaaaaaattctgtagatagcaaattgtgtgtgtgggggggggtgggggtgtgggtgcatggaggacaacctgcaactctgagctccctacttcctgcctcatttcatgcagtcttttctgaacagcctatgctgctgccctgctggccccttgtgcacggcagctggccgtgtccgtagctgtcagtatgacttagatctagctcctacctactggttgatgtgttttttccttttgccaagtgattgagtctgtttagtagtttccatcattctagtctttaagtaaaaatgacactattgaggaaagtcagtctactcccttcttcctccccccaaacacgtgttctcttttgtcaggaaactcagccagtggactgtggcagagaaagtcctccactcagaggcagagactgagttaagtcataggtggccttaggcatctgcattgtttgcaggggttaagttttccttccagtgagggctggagggatgaattagctggtacctgaagccccgcttagctctgacactctgccaacatcctctgattctaggtgtggtgttgactgtcctttcaaggaaaaacttgcaatagagggaaaagccattaaagcagctccctgcttcatcattaagtcctgtcatccctaccagccaatcccagtcaaagaagttatgctttattcacttctgtggaattacaagtgagagacacttttaggacctgatggacaaagcaggagattcactgtcagctttcctggtcctctccttacttctgtgggccttgcaccgtcttagtttacacatctgccaaaggggtagaattacacttctttttacaggtaaatgtcaaggcacaatcagttttcaggaagtgcttcaagaccccaggtgaaatgaaaatgctaagtaccctctgaatggccatgcctgttaccaggtgctgcttcttcagatgatggggagcacttttcagggtgaaattcaggcgagttttgcccaggcctgctgtcttgagtacaaatgtgaatgatcgactgactgcttgttgccaaactggaaatgttctgtagggatttactggcatggtatcattcctagaagaaaaaaagagagaaacttgactgcacattaaaaaaaaaaaaaaatccacattgtgacttttatttaatttctattttttttggtaataaaaagttgacttttttatttgaatttgtcttttttatttattggtctgaaaggcatttcaaaggtattataataatatattggtgtaatttaattggtgcaacatgctttatggctcctgtcaaaattggttttcactcatttgattggtttgagcccagaacagcctacaggggaaaaacaagctggataaccacccaaagtgtttgtattttcgttggaaactgatttttgtttcattttggtttttgtttctgtttttatttttaaattaaataaattgcaatgaactgaaccaga

SEQ ID NO: 182566 - DNA, 1986 bp, Artificial Sequence
  derived and/or modified sequence
atggagggcgccgccgcccccgtggccggcgacagacccgacctgggcctgggcgcccccggcagccccagagaggccgtggccggcgccaccgccgccctggagcccagaaagccccacggcgtgaagagacaccaccacaagcacaacctgaagcacagatacgagctgcaggagaccctgggcaagggcacctacggcaaggtgaagagagccaccgagagattcagcggcagagtggtggccatcaagagcatcagaaaggacaagatcaaggacgagcaggacatggtgcacatcagaagagagatcgagatcatgagcagcctgaaccacccccacatcatcagcatctacgaggtgttcgagaacaaggacaagatcgtgatcatcatggagtacgccagcaagggcgagctgtacgactacatcagcgagagaagaagactgagcgagagagagaccagacacttcttcagacagatcgtgagcgccgtgcactactgccacaagaacggcgtggtgcacagagacctgaagctggagaacatcctgctggacgacaactgcaacatcaagatcgccgacttcggcctgagcaacctgtaccagaaggacaagttcctgcagaccttctgcggcagccccctgtacgccagccccgagatcgtgaacggcagaccctacagaggccccgaggtggacagctgggccctgggcgtgctgctgtacaccctggtgtacggcaccatgcccttcgacggcttcgaccacaagaacctgatcagacagatcagcagcggcgagtacagagagcccacccagcccagcgacgccagaggcctgatcagatggatgctgatggtgaaccccgacagaagagccaccatcgaggacatcgccaaccactggtgggtgaactggggctacaagagcagcgtgtgcgactgcgacgccctgcacgacagcgagagccccctgctggccagaatcatcgactggcaccacagaagcaccggcctgcaggccgacaccgaggccaagatgaagggcctggccaagcccaccaccagcgaggtgatgctggagagacagagaagcctgaagaagagcaagaaggagaacgacttcgcccagagcggccaggacgccgtgcccgagagccccagcaagctgagcagcaagagacccaagggcatcctgaagaagagaagcaacagcgagcacagaagccacagcaccggcttcatcgagggcgtggtgggccccgccctgcccagcaccttcaagatggagcaggacctgtgcagaaccggcgtgctgctgcccagcagccccgaggccgaggtgcccggcaagctgagccccaagcagagcgccaccatgcccaagaagggcatcctgaagaagacccagcagagagagagcggctactacagcagccccgagagaagcgagagcagcgagctgctggacagcaacgacgtgatgggcagcagcatccccagccccagcccccccgaccccgccagagtgaccagccacagcctgagctgcagaagaaagggcatcctgaagcacagcagcaagtacagcgccggcaccatggaccccgccctggtgagccccgagatgcccaccctggagagcctgagcgagcccggcgtgcccgccgagggcctgagcagaagctacagcagacccagcagcgtgatcagcgacgacagcgtgctgagcagcgacagcttcgacctgctggacctgcaggagaacagacccgccagacagagaatcagaagctgcgtgagcgccgagaacttcctgcagatccaggacttcgagggcctgcagaacagacccagaccccagtacctgaagagatacagaaacagactggccgacagcagcttcagcctgctgaccgacatggacgacgtgacccaggtgtacaagcaggccctggagatctgcagcaagctgaactag

SEQ ID NO: 182567 - protein, 1411 aa, Artificial Sequence
  derived and/or modified sequence
MASISEPVTFREFCPLYYLLNAIPTKIQKGFRSIVVYLTALDTNGDYIAVGSSIGMLYLYCRHLNQMRKYNFEGKTESITVVKLLSCFDDLVAAGTASGRVAVFQLVSSLPGRNKQLRRFDVTGIHKNSITALAWSPNGMKLFSGDDKGKIVYSSLDLDQGLCNSQLVLEEPSSIVQLDYSQKVLLVSTLQRSLLFYTEEKSVRQIGTQPRKSTGKFGACFIPGLCKQSDLTLYASRPGLRLWKADVHGTVQATFILKDAFAGGVKPFELHPRLESPNSGSCSLPERHLGLVSCFFQEGWVLSWNEYSIYLLDTVNQATVAGLEGSGDIVSVSCTENEIFFLKGDRNIIRISSRPEGLTSTVRDGLEMSGCSERVHVQQAEKLPGATVSETRLRGSSMASSVASEPRSRSSSLNSTDSGSGLLPPGLQATPELGKGSQPLSQRFNAISSEDFDQELVVKPIKVKRKKKKKKTEGGSRSTCHSSLESTPCSEFPGDSPQSLNTDLLSMTSSVLGSSVDQLSAESPDQESSFNGEVNGVPQENTDPETFNVLEVSGSMPDSLAEEDDIRTEMPHCHHAHGRELLNGAREDVGGSDVTGLGDEPCPADDGPNSTQLPFQEQDSSPGAHDGEDIQPIGPQSTFCEVPLLNSLTVPSSLSWAPSAEQWLPGTRADEGSPVEPSQEQDILTSMEASGHLSTNLWHAVTDDDTGQKEIPISERVLGSVGGQLTPVSALAASTHKPWLEQPPRDQTLTSSDEEDIYAHGLPSSSSETSVTELGPSCSQQDLSRLGAEDAGLLKPDQFAESWMGYSGPGYGILSLVVSEKYIWCLDYKGGLFCSALPGAGLRWQKFEDAVQQVAVSPSGALLWKIEQKSNRAFACGKVTIKGKRHWYEALPQAVFVALSDDTAWIIRTSGDLYLQTGLSVDRPCARAVKVDCPYPLSQITARNNVVWALTEQRALLYREGVSSFCPEGEQWKCDIVSERQALEPVCITLGDQQTLWALDIHGNLWFRTGIISKKPQGDDDHWWQVSITDYVVFDQCSLFQTIIHATHSVATAAQAPVEKVADKLRMAFWSQQLQCQPSLLGVNNSGVWISSGKNEFHVAKGSLIGTYWNHVVPRGTASATKWAFVLASAAPTKEGSFLWLCQSSKDLCSVSAQSAQSRPSTVQLPPEAEMRAYAACQDALWALDSLGQVFIRTLSKSCPTGMHWTRLDLSQLGAVKLTSLACGNQHIWACDSRGGVYFRVGTQPLNPSLMLPAWIMIEPPVQPAGVSLVSVHSSPNDQMLWVLDSRWNVHVRTGITEEMPVGTAWEHVPGLQACQLALSTRTVWARCPNGDLARRYGVTDKNPAGDYWKKIPGSVSCFTVTASDELWAVGPPGYLLQRLTKTFSHSHGTQKSSQAAMPHPEDLEDEWEVI

SEQ ID NO: 182568 - DNA, 4236 bp, Artificial Sequence
  derived and/or modified sequence
atggccagcatcagcgagcccgtgaccttcagagagttctgccccctgtactacctgctgaacgccatccccaccaagatccagaagggcttcagaagcatcgtggtgtacctgaccgccctggacaccaacggcgactacatcgccgtgggcagcagcatcggcatgctgtacctgtactgcagacacctgaaccagatgagaaagtacaacttcgagggcaagaccgagagcatcaccgtggtgaagctgctgagctgcttcgacgacctggtggccgccggcaccgccagcggcagagtggccgtgttccagctggtgagcagcctgcccggcagaaacaagcagctgagaagattcgacgtgaccggcatccacaagaacagcatcaccgccctggcctggagccccaacggcatgaagctgttcagcggcgacgacaagggcaagatcgtgtacagcagcctggacctggaccagggcctgtgcaacagccagctggtgctggaggagcccagcagcatcgtgcagctggactacagccagaaggtgctgctggtgagcaccctgcagagaagcctgctgttctacaccgaggagaagagcgtgagacagatcggcacccagcccagaaagagcaccggcaagttcggcgcctgcttcatccccggcctgtgcaagcagagcgacctgaccctgtacgccagcagacccggcctgagactgtggaaggccgacgtgcacggcaccgtgcaggccaccttcatcctgaaggacgccttcgccggcggcgtgaagcccttcgagctgcaccccagactggagagccccaacagcggcagctgcagcctgcccgagagacacctgggcctggtgagctgcttcttccaggagggctgggtgctgagctggaacgagtacagcatctacctgctggacaccgtgaaccaggccaccgtggccggcctggagggcagcggcgacatcgtgagcgtgagctgcaccgagaacgagatcttcttcctgaagggcgacagaaacatcatcagaatcagcagcagacccgagggcctgaccagcaccgtgagagacggcctggagatgagcggctgcagcgagagagtgcacgtgcagcaggccgagaagctgcccggcgccaccgtgagcgagaccagactgagaggcagcagcatggccagcagcgtggccagcgagcccagaagcagaagcagcagcctgaacagcaccgacagcggcagcggcctgctgccccccggcctgcaggccacccccgagctgggcaagggcagccagcccctgagccagagattcaacgccatcagcagcgaggacttcgaccaggagctggtggtgaagcccatcaaggtgaagagaaagaagaagaagaagaagaccgagggcggcagcagaagcacctgccacagcagcctggagagcaccccctgcagcgagttccccggcgacagcccccagagcctgaacaccgacctgctgagcatgaccagcagcgtgctgggcagcagcgtggaccagctgagcgccgagagccccgaccaggagagcagcttcaacggcgaggtgaacggcgtgccccaggagaacaccgaccccgagaccttcaacgtgctggaggtgagcggcagcatgcccgacagcctggccgaggaggacgacatcagaaccgagatgccccactgccaccacgcccacggcagagagctgctgaacggcgccagagaggacgtgggcggcagcgacgtgaccggcctgggcgacgagccctgccccgccgacgacggccccaacagcacccagctgcccttccaggagcaggacagcagccccggcgcccacgacggcgaggacatccagcccatcggcccccagagcaccttctgcgaggtgcccctgctgaacagcctgaccgtgcccagcagcctgagctgggcccccagcgccgagcagtggctgcccggcaccagagccgacgagggcagccccgtggagcccagccaggagcaggacatcctgaccagcatggaggccagcggccacctgagcaccaacctgtggcacgccgtgaccgacgacgacaccggccagaaggagatccccatcagcgagagagtgctgggcagcgtgggcggccagctgacccccgtgagcgccctggccgccagcacccacaagccctggctggagcagccccccagagaccagaccctgaccagcagcgacgaggaggacatctacgcccacggcctgcccagcagcagcagcgagaccagcgtgaccgagctgggccccagctgcagccagcaggacctgagcagactgggcgccgaggacgccggcctgctgaagcccgaccagttcgccgagagctggatgggctacagcggccccggctacggcatcctgagcctggtggtgagcgagaagtacatctggtgcctggactacaagggcggcctgttctgcagcgccctgcccggcgccggcctgagatggcagaagttcgaggacgccgtgcagcaggtggccgtgagccccagcggcgccctgctgtggaagatcgagcagaagagcaacagagccttcgcctgcggcaaggtgaccatcaagggcaagagacactggtacgaggccctgccccaggccgtgttcgtggccctgagcgacgacaccgcctggatcatcagaaccagcggcgacctgtacctgcagaccggcctgagcgtggacagaccctgcgccagagccgtgaaggtggactgcccctaccccctgagccagatcaccgccagaaacaacgtggtgtgggccctgaccgagcagagagccctgctgtacagagagggcgtgagcagcttctgccccgagggcgagcagtggaagtgcgacatcgtgagcgagagacaggccctggagcccgtgtgcatcaccctgggcgaccagcagaccctgtgggccctggacatccacggcaacctgtggttcagaaccggcatcatcagcaagaagccccagggcgacgacgaccactggtggcaggtgagcatcaccgactacgtggtgttcgaccagtgcagcctgttccagaccatcatccacgccacccacagcgtggccaccgccgcccaggcccccgtggagaaggtggccgacaagctgagaatggccttctggagccagcagctgcagtgccagcccagcctgctgggcgtgaacaacagcggcgtgtggatcagcagcggcaagaacgagttccacgtggccaagggcagcctgatcggcacctactggaaccacgtggtgcccagaggcaccgccagcgccaccaagtgggccttcgtgctggccagcgccgcccccaccaaggagggcagcttcctgtggctgtgccagagcagcaaggacctgtgcagcgtgagcgcccagagcgcccagagcagacccagcaccgtgcagctgccccccgaggccgagatgagagcctacgccgcctgccaggacgccctgtgggccctggacagcctgggccaggtgttcatcagaaccctgagcaagagctgccccaccggcatgcactggaccagactggacctgagccagctgggcgccgtgaagctgaccagcctggcctgcggcaaccagcacatctgggcctgcgacagcagaggcggcgtgtacttcagagtgggcacccagcccctgaaccccagcctgatgctgcccgcctggatcatgatcgagccccccgtgcagcccgccggcgtgagcctggtgagcgtgcacagcagccccaacgaccagatgctgtgggtgctggacagcagatggaacgtgcacgtgagaaccggcatcaccgaggagatgcccgtgggcaccgcctgggagcacgtgcccggcctgcaggcctgccagctggccctgagcaccagaaccgtgtgggccagatgccccaacggcgacctggccagaagatacggcgtgaccgacaagaaccccgccggcgactactggaagaagatccccggcagcgtgagctgcttcaccgtgaccgccagcgacgagctgtgggccgtgggcccccccggctacctgctgcagagactgaccaagaccttcagccacagccacggcacccagaagagcagccaggccgccatgccccaccccgaggacctggaggacgagtgggaggtgatctag

SEQ ID NO: 182569 - DNA, 2202 bp, Artificial Sequence
  derived and/or modified sequence
atggccagcatcagcgagcccgtgaccttcagagagttctgccccctgtactacctgctgaacgccatccccaccaagatccagaagggcttcagaagcatcgtggtgtacctgaccgccctggacaccaacggcgactacatcgccgtgggcagcagcatcggcatgctgtacctgtactgcagacacctgaaccagatgagaaagtacaacttcgagggcaagaccgagagcatcaccgtggtgaagctgctgagctgcttcgacgacctggtggccgccggcaccgccagcggcagagtggccgtgttccagctggtgagcagcctgcccggcagaaacaagcagctgagaagattcgacgtgaccggcatccacaagaacagcatcaccgccctggcctggagccccaacggcatgaagctgttcagcggcgacgacaagggcaagatcgtgtacagcagcctggacctggaccagggcctgtgcaacagccagctggtgctggaggagcccagcagcatcgtgcagctggactacagccagaaggtgctgctggtgagcaccctgcagagaagcctgctgttctacaccgaggagaagagcgtgagacagatcggcacccagcccagaaagagcaccggcaagttcggcgcctgcttcatccccggcctgtgcaagcagagcgacctgaccctgtacgccagcagacccggcctgagactgtggaaggccgacgtgcacggcaccgtgcaggccaccttcatcctgaaggacgccttcgccggcggcgtgaagcccttcgagctgcaccccagactggagagccccaacagcggcagctgcagcctgcccgagagacacctgggcctggtgagctgcttcttccaggagggctgggtgctgagctggaacgagtacagcatctacctgctggacaccgtgaaccaggccaccgtggccggcctggagggcagcggcgacatcgtgagcgtgagctgcaccgagaacgagatcttcttcctgaagggcgacagaaacatcatcagaatcagcagcagacccgagggcctgaccagcaccgtgagagacggcctggagatgagcggctgcagcgagagagtgcacgtgcagcaggccgagaagctgcccggcgccaccgtgagcgagaccagactgagaggcagcagcatggccagcagcgtggccagcgagcccagaagcagaagcagcagcctgaacagcaccgacagcggcagcggcctgctgccccccggcctgcaggccacccccgagctgggcaagggcagccagcccctgagccagagattcaacgccatcagcagcgaggacttcgaccaggagctggtggtgaagcccatcaaggtgaagagaaagaagaagaagaagaagaccgagggcggcagcagaagcacctgccacagcagcctggagagcaccccctgcagcgagttccccggcgacagcccccagagcctgaacaccgacctgctgagcatgaccagcagcgtgctgggcagcagcgtggaccagctgagcgccgagagccccgaccaggagagcagcttcaacggcgaggtgaacggcgtgccccaggagaacaccgaccccgagaccttcaacgtgctggaggtgagcggcagcatgcccgacagcctggccgaggaggacgacatcagaaccgagatgccccactgccaccacgcccacggcagagagctgctgaacggcgccagagaggacgtgggcggcagcgacgtgaccggcctgggcgacgagccctgccccgccgacgacggccccaacagcaccccccagcacaccacccacctgaccagccaccacagcaccccccaccacaccaccccccactgcaccatcccccaccacatcagcccccaccacagcaccccccaccacaccacccaccacaccccccacagaaccgccccccacagaaccgccccctacctggccaccagccaccacaccaccccccaccacaccagcctgcccacccacggcgccggctgccccccccccggcgagcacaccagcgccgagaccgtgaagcccgacggctgcaagtggaacctggacgtgtgcacctgcgtgcccggcagagacggcaccggcggctgcatgggcagaggcggcgccgagcagggcagcctgacctag

SEQ ID NO: 182570 - DNA, 4236 bp, Artificial Sequence
  derived and/or modified sequence
atggcatcaatctccgaacctgtgaccttcagggagttttgtcctctctattatctccttaatgcaataccaacaaagatccaaaagggattcaggtccatcgtggtgtacctcaccgcactggatacaaatggtgactacatcgctgtaggcagtagcatcgggatgctgtatctgtactgcaggcaccttaatcaaatgagaaagtataatttcgaggggaaaaccgagtcaatcacggttgtgaagctgctgtcttgcttcgacgacctggtggcagctggcactgcctctggaagggttgccgtttttcagctggtgagctctctgcccggccggaataaacaactgcggcgtttcgatgttaccggtattcataagaacagcatcacggcactcgcttggtcgccaaatggaatgaaacttttctccggggatgacaaagggaaaattgtctacagcagcctggaccttgatcagggactgtgtaacagccagctggttctggaagagccatcctccattgtgcaattggattattctcagaaagttctattggtttctactctccagaggtctttactgttttacaccgaggaaaagagcgtcaggcagatcggcacacagccacggaagtccacgggaaagttcggcgcatgttttattccgggtctttgcaaacagtccgacttaactctttatgcctctagacctgggttgagattgtggaaggcagatgttcatggtaccgtgcaggctacgtttattctcaaggatgctttcgccggcggcgtcaagcccttcgagctgcaccctcggttggagtcacctaactctgggagctgtagtctacctgaaaggcacctcggattggttagttgcttttttcaagagggctgggttctgtcctggaatgagtacagtatttaccttctcgacaccgtcaatcaggcaacggttgcagggctcgagggatcgggcgacatcgtgtctgtatcttgtacagagaacgaaatcttttttttaaagggagatagaaatattattagaattagctcccgcccagaaggcttgacgagcacagtgcgtgacggcttagaaatgtctggttgttcggagcgtgtgcacgttcagcaagcggagaaactgccaggcgcgacagtgagcgaaaccaggttgaggggctccagcatggcatcgtctgtggctagcgagcccagaagtagatcgtctagccttaattcaaccgatagtggctccgggttgctgccccccggcctgcaggcaacgcctgagctcggtaagggtagccagcccttaagccagcggttcaacgccatatcctccgaagactttgatcaggagctggtcgttaagccaatcaaagtcaagagaaagaagaagaagaaaaagactgagggaggctctcgcagcacgtgccatagcagcctcgagtccacaccatgttccgagttccctggcgattcgcctcagagtctgaatactgacctcctaagtatgacaagttccgtgttagggtctagcgtagatcaactctctgccgagtcaccagaccaggagagttctttcaacggtgaggtaaacggtgtgcctcaagagaacaccgacccggaaacgtttaacgttctggaggtctcaggttccatgcccgactcattggccgaagaagatgacataagaaccgagatgccccattgtcatcatgcccacggaagggaactgctgaacggggcgagggaggacgttggaggctctgacgtgactggcctgggggacgagccatgtcccgctgacgatggtccaaatagtacccagctgccttttcaggagcaggattcttccccgggcgctcacgacggggaggatatccaaccgatcggccctcagagcaccttctgcgaagtacccctgctaaacagcctgacggtcccctccagcctcagctgggcaccttccgcggagcagtggctacctggtacaagggctgacgagggctcccccgttgaaccaagccaggagcaggacatcctgacatccatggaggccagcgggcacttatccaccaatctatggcacgccgtgacagacgacgacacagggcaaaaggaaatccctatctcagagagggtcttgggctcagtcggagggcagctcacccctgtaagcgctctcgcagcctctactcataagccctggcttgagcaaccaccccgtgatcagaccctgacttcctcagatgaagaggatatttacgcccacggactcccaagctcttccagcgaaactagcgtgacagagctgggaccaagttgttcccagcaggacctgtccagactgggagctgaggacgccggcctcctgaagcccgaccaatttgccgaaagctggatggggtacagtggccccggctacggaatcttgagccttgtggtgagtgaaaagtacatttggtgcctggattacaaaggcgggctcttttgcagtgcgctgcctggagccgggctacgctggcagaagttcgaggatgccgtgcagcaggtcgctgtctctccatctggagctctactgtggaaaattgagcaaaagagtaacagggccttcgcctgtgggaaagtcaccattaagggaaagaggcactggtacgaggcccttcctcaggccgtattcgtcgctttgagcgacgataccgcctggattataaggacgtctggcgatttgtacctccagactggcctcagcgttgaccgcccgtgcgctagggccgtgaaggttgactgtccatacccactttctcagatcacagctagaaataacgtggtgtgggcattgactgaacagcgcgcactcctatatcgggagggtgtgtcctcgttttgccccgagggcgagcaatggaagtgcgatatcgtgtccgagcggcaggcactggaacccgtttgtatcactttgggggatcagcaaaccttatgggccttagacattcacggcaacctctggttccgcaccggtataatctcaaagaagccccagggcgatgatgaccattggtggcaagtaagtataaccgactatgtggtcttcgaccagtgttctcttttccagactattatccatgccactcattcagtggcaacagctgcccaggcgccggttgagaaagtggctgacaaactgcgcatggcattctggagccagcaattgcaatgtcagccatctttgttgggtgtcaataatagtggggtctggattagtagcggaaagaacgaatttcacgtggccaaaggcagtctgatcggtacgtactggaaccatgtcgtccctcgcggaacagcctccgcgacaaaatgggcatttgtgttagctagcgctgcccccactaaggaagggtccttcctctggctgtgtcagtccagcaaggacctttgctctgtgtccgcacaatcagcgcaatctcgaccgtccacagtacagctcccacccgaggctgagatgcgggcatacgctgcttgtcaggatgctctatgggccttggatagtctgggacaggttttcatacgtaccctcagtaaaagttgtccaacaggaatgcactggacccggctagacttgtcccagctgggcgcggtgaagctgacatctcttgcctgcggcaatcagcatatatgggcttgtgacagtagaggcggcgtgtattttcgggtcggtacccagcctctgaacccctctcttatgctacctgcatggataatgattgaaccccccgtccagccggcaggcgtctcgctggtgtcagtccatagtagccccaatgaccaaatgctctgggtcctggacagccgatggaacgtgcacgtgcggacggggatcacagaggagatgcctgtggggaccgcgtgggaacatgtgcctgggctccaggcctgccagcttgctcttagtactcgcacggtctgggcacgctgtccaaacggggacctggcgagacggtatggcgtcacggacaaaaacccagccggggactattggaaaaagatacccggatccgtctcttgttttacagtgacagccagcgatgaactgtgggctgtcggcccccctgggtacctactacagcggctgactaagacctttagccactctcatgggacacaaaagagctcccaagccgctatgccccaccctgaagacctggaggatgagtgggaagtcatctag

SEQ ID NO: 182571 - DNA, 2202 bp, Artificial Sequence
  derived and/or modified sequence
atggccagcattagtgaacctgtgacattccgcgagttttgtccactttactacctactgaacgcgattcccacaaaaatccaaaaaggtttccggtcaattgtggtgtacttgacggccctcgataccaacggcgattacatcgctgtgggcagttcgattgggatgctatacctgtactgccgccatctcaatcaaatgaggaagtataactttgaaggtaagactgagagcatcaccgtagtgaaattactgagctgtttcgacgatctagtcgccgcaggtaccgcctcaggccgagtggccgtctttcagcttgtcagtagtctcccaggccgtaacaagcagttacgccgattcgacgtgaccggcattcacaaaaactccatcaccgcgctcgcatggtccccaaatggaatgaaactgttttctggagacgataaggggaaaatcgtatatagcagccttgacctcgatcaggggctctgcaacagccagttggtcctggaggaacccagcagtattgtgcaactggattattcccagaaggtgttattagtatcgacattgcagcgttcattacttttctacacggaggaaaagtctgtgaggcagattggtactcaaccccggaaatccactggaaaattcggcgcatgttttatcccaggtctttgcaaacagtctgatctgaccctctatgcgtccagacccggactgaggttgtggaaagccgatgttcatgggactgtccaagcaacttttatccttaaagatgcatttgcagggggggtgaaaccatttgagctgcaccctcggctagagtctcctaacagcgggtcatgtagcttacccgagcggcatctcggactggtgagttgcttctttcaagagggctgggtcttgtcgtggaacgaatatagtatctatctcttggacaccgttaatcaggccactgtggccgggctggagggttctggcgatatagtgtccgtcagctgtactgagaatgagatcttcttcctgaaaggcgataggaacattatcagaatctcttcaaggcctgagggccttacatccaccgtgcgagacggactggagatgagtgggtgctctgagcgcgttcatgtgcagcaggccgaaaagctgccgggggctaccgtgagcgagacgcgtttacgaggtagctctatggctagttctgtcgcatcagagccccgctctcgctcttcctctctgaattctaccgactccggcagcggtcttctcccgcctgggctccaggccacccccgaactggggaaaggctctcagcctctatcccagcgttttaatgcgataagctctgaggattttgaccaggaactggtagttaagcctattaaggtaaaacggaagaaaaaaaagaagaagactgaggggggtagccgatccacgtgccattcctcgttggagagcaccccatgctcagagtttcccggcgactctcctcagagcctgaacacagatctccttagcatgacatcctctgttctgggtagttctgtcgatcaactgtctgctgaatcccccgatcaggagagcagcttcaacggcgaggtcaacggagtcccacaggagaacacggatcccgaaactttcaatgttctggaggtgagcgggagcatgcccgactcccttgccgaagaagacgacatcaggaccgagatgccccactgtcaccatgcacatgggagggagctactgaacggagctcgcgaagatgtcggaggctcagatgtgaccggtctaggcgacgaaccctgtcctgccgacgacgggcccaatagcacacctcaacacaccacccacctgacctcccaccattctacgccacatcataccactcctcactgtacaattccacatcacatctctccccaccatagcacgcctcaccatactacacatcatactcctcaccgcacagcgccccataggacagcaccgtacttggccacgagtcaccacaccacccctcatcacacaagcctcccaacacacggcgcgggatgtccacctccaggggaacacacatcagctgaaacggtgaaaccagatggttgtaagtggaacctggatgtatgtacctgcgttcccggacgcgacggaactggcggatgtatgggcagagggggtgccgagcaggggtcgttaacatag

SEQ ID NO: 182572 - DNA, 4236 bp, Artificial Sequence
  derived and/or modified sequence
atggccagcatcagcgagcctgtgaccttccgggagttctgccccctgtactacctgctgaatgccatccccaccaagatccagaagggcttccgcagcatcgtggtgtacctgacagccctggacaccaacggggactacatcgctgtgggcagcagcatcggcatgctgtacctgtactgccgccacctgaaccagatgaggaagtacaactttgagggcaagacagagagcatcaccgtggtgaagctgctgagctgctttgatgacctggtggccgccggcacagccagcggccgggtggccgtgttccagctggtgagcagcctgcctggaagaaacaagcagctgcggagatttgatgtgacaggcatccacaagaacagcatcacagccctggcctggagccccaacggcatgaagctgttctctggagatgacaagggcaagatcgtgtacagcagcctggacctggaccagggcctgtgcaacagccagctggtgctggaggagcccagcagcatcgtgcagctggactacagccagaaggtgctgctggtgtccaccctgcagaggagcctgctcttctacacagaggagaagtctgtgcggcagatcggcacccagcccaggaagagcacaggcaagtttggagcctgcttcatccctggcctgtgcaagcagagcgacctgaccctgtatgccagccggcccggcctgcggctgtggaaggcagatgtgcacggcaccgtgcaggccaccttcatcctgaaggatgcctttgctgggggcgtgaagccctttgagctgcacccccggctggagagccccaacagcggcagctgcagcctgcctgagcggcacctgggcctggtgtcctgcttcttccaggagggctgggtgctgtcctggaatgagtacagcatctacctgctggacacagtgaaccaggccaccgtggccggcctggagggcagcggggacatcgtgtctgtgtcctgcacagaaaatgagatcttcttcctgaagggggacaggaacatcatccgcatcagcagcaggcctgagggcctgaccagcacagtgagagatggcctggagatgagcggctgcagcgagcgggtgcacgtgcagcaggccgagaagctgcccggggccaccgtgtctgagacccggctgcggggcagctccatggccagctctgtggccagcgagcccaggagccgcagcagcagcctgaacagcacagacagcggcagcggcctgctgcccccaggcctgcaggccaccccagagctgggcaagggcagccagcccctgagccagcgcttcaatgccatcagcagcgaggactttgaccaggagctggtggtgaagcccatcaaggtgaagaggaagaagaagaagaagaagacagagggcggcagccgcagcacctgccacagcagcctggagagcaccccctgcagcgagttccctggggacagcccccagagcctgaacacagacctgctgtccatgaccagctctgtgctgggcagctctgtggaccagctgtctgctgagagcccagaccaggagagcagcttcaatggagaggtgaatggagtgccccaggagaacacagatcctgagaccttcaacgtgctggaggtgtctggctccatgccagacagcctggccgaggaggatgacatcagaacagagatgccccactgccaccacgcccacggccgggagctgctgaatggagccagagaagatgtgggcggcagtgatgtgacaggcctgggagatgagccctgcccagcagatgatggccccaacagcacccagctgcccttccaggagcaggacagcagccctggggcccatgatggagaggacatccagcccatcggcccccagagcaccttctgtgaggtgcccctgctgaacagcctgactgtgcccagcagcctgtcctgggcccccagcgctgagcagtggctgcccggcaccagggcagatgagggcagccctgtggagcccagccaggagcaggacatcctgacctccatggaggccagcggccacctgagcaccaacctgtggcatgctgtgacagatgatgacaccggccagaaggagatccccatcagcgagcgggtgctgggctctgtgggcggccagctgacccctgtgtctgccctggccgccagcacccacaagccctggctggagcagcccccccgggaccagaccctgaccagcagtgatgaggaggacatctatgcccacggcctgcccagcagcagcagcgagacctctgtgacagagctgggccccagctgcagccagcaggacctgagccggctgggcgcagaagatgctggcctgctgaagccagaccagtttgctgagagctggatgggctacagcggccctggctacggcatcctgagcctggtggtgtctgagaagtacatctggtgcctggactacaagggcggcctcttctgcagcgccctgcccggggccggcctgcgctggcagaagtttgaagatgctgtgcagcaggtggccgtgagccccagcggggccctgctgtggaagattgagcagaagagcaacagagcctttgcctgtgggaaggtgaccatcaagggcaagaggcactggtatgaggccctgccccaggccgtgtttgtggccctgagtgatgacacagcctggatcatccgcaccagcggggacctgtacctgcagacaggcctgtctgtggaccggccctgtgcccgggctgtgaaggtggactgcccctaccccctgagccagatcacagccagaaataatgtggtgtgggccctgacagagcagagggccctgctgtaccgggagggcgtgagcagcttctgcccagagggggagcagtggaagtgtgacatcgtgtctgagcggcaggccctggagcctgtgtgcatcaccctgggggaccagcagaccctgtgggccctggacatccacggcaacctgtggttcagaacaggcatcatcagcaagaagccccagggagatgatgaccactggtggcaggtgtccatcacagattatgtggtgtttgaccagtgcagcctcttccagaccatcatccacgccacccacagcgtggccacagctgcccaggcccctgtggagaaggtggccgacaagctgaggatggccttctggagccagcagctgcagtgccagcccagcctgctgggcgtgaacaacagcggcgtgtggatcagcagcggcaagaatgagttccacgtggccaagggcagcctgattggcacctactggaaccacgtggtgccccggggcacagccagcgccaccaagtgggcctttgtgctggccagcgctgcccccaccaaggagggcagcttcctgtggctgtgccagagcagcaaggacctgtgcagcgtgtctgcccagagcgcccagagccggcccagcacagtgcagctgcccccagaggccgagatgagggcctatgctgcctgccaggatgccctgtgggccctggacagcctgggccaggtgttcatccgcaccctgagcaagagctgccccaccggcatgcactggacccggctggacctgagccagctgggcgctgtgaagctgaccagcctggcctgtggcaaccagcacatctgggcctgtgacagcagaggaggagtgtacttccgggtgggcacccagcccctgaaccccagcctgatgctgcctgcctggatcatgattgagccccctgtgcagcctgctggggtgtccctggtgtctgtgcacagcagccccaatgaccagatgctgtgggtgctggacagccgctggaatgtgcacgtgaggacaggcatcacagaggagatgcctgtgggcacagcctgggagcacgtgcccggcctgcaggcctgccagctggccctgagcaccaggacagtgtgggcccgctgccccaacggggacctggccaggagatatggagtgacagacaagaacccagctggggactactggaagaagatccctggctctgtgtcctgcttcaccgtgacagccagtgatgagctgtgggccgtgggccccccaggctacctgctgcagaggctgaccaagaccttcagccacagccacggcacccagaagagcagccaggccgccatgccccaccctgaggacctggaggatgagtgggaggtgatctag

SEQ ID NO: 182573 - DNA, 2202 bp, Artificial Sequence
  derived and/or modified sequence
atggccagcatcagcgagcctgtgaccttccgggagttctgccccctgtactacctgctgaatgccatccccaccaagatccagaagggcttccgcagcatcgtggtgtacctgacagccctggacaccaacggggactacatcgctgtgggcagcagcatcggcatgctgtacctgtactgccgccacctgaaccagatgaggaagtacaactttgagggcaagacagagagcatcaccgtggtgaagctgctgagctgctttgatgacctggtggccgccggcacagccagcggccgggtggccgtgttccagctggtgagcagcctgcctggaagaaacaagcagctgcggagatttgatgtgacaggcatccacaagaacagcatcacagccctggcctggagccccaacggcatgaagctgttctctggagatgacaagggcaagatcgtgtacagcagcctggacctggaccagggcctgtgcaacagccagctggtgctggaggagcccagcagcatcgtgcagctggactacagccagaaggtgctgctggtgtccaccctgcagaggagcctgctcttctacacagaggagaagtctgtgcggcagatcggcacccagcccaggaagagcacaggcaagtttggagcctgcttcatccctggcctgtgcaagcagagcgacctgaccctgtatgccagccggcccggcctgcggctgtggaaggcagatgtgcacggcaccgtgcaggccaccttcatcctgaaggatgcctttgctgggggcgtgaagccctttgagctgcacccccggctggagagccccaacagcggcagctgcagcctgcctgagcggcacctgggcctggtgtcctgcttcttccaggagggctgggtgctgtcctggaatgagtacagcatctacctgctggacacagtgaaccaggccaccgtggccggcctggagggcagcggggacatcgtgtctgtgtcctgcacagaaaatgagatcttcttcctgaagggggacaggaacatcatccgcatcagcagcaggcctgagggcctgaccagcacagtgagagatggcctggagatgagcggctgcagcgagcgggtgcacgtgcagcaggccgagaagctgcccggggccaccgtgtctgagacccggctgcggggcagctccatggccagctctgtggccagcgagcccaggagccgcagcagcagcctgaacagcacagacagcggcagcggcctgctgcccccaggcctgcaggccaccccagagctgggcaagggcagccagcccctgagccagcgcttcaatgccatcagcagcgaggactttgaccaggagctggtggtgaagcccatcaaggtgaagaggaagaagaagaagaagaagacagagggcggcagccgcagcacctgccacagcagcctggagagcaccccctgcagcgagttccctggggacagcccccagagcctgaacacagacctgctgtccatgaccagctctgtgctgggcagctctgtggaccagctgtctgctgagagcccagaccaggagagcagcttcaatggagaggtgaatggagtgccccaggagaacacagatcctgagaccttcaacgtgctggaggtgtctggctccatgccagacagcctggccgaggaggatgacatcagaacagagatgccccactgccaccacgcccacggccgggagctgctgaatggagccagagaagatgtgggcggcagtgatgtgacaggcctgggagatgagccctgcccagcagatgatggccccaacagcaccccccagcacaccacccacctgaccagccaccacagcaccccccaccacaccaccccccactgcaccatcccccaccacatcagcccccaccacagcaccccccaccacaccacccaccacaccccccacaggacagccccccacaggacagccccctacctggccaccagccaccacaccaccccccaccacaccagcctgcccacccatggagctggctgccccccacctggagagcacaccagcgctgagaccgtgaagccagatggctgcaagtggaacctggatgtgtgcacctgtgtgcccggcagagatggcaccggcggctgcatgggccggggcggcgctgagcagggcagcctgacctag

SEQ ID NO: 182574 - DNA, 4236 bp, Artificial Sequence
  derived and/or modified sequence
atggccagcatcagcgagcccgtgaccttccgggagttctgccccttgtactacttgctgaatgccattccaacgaaaatccagaaaggcttcagaagcattgtggtgtaccttaccgcgcttgacacaaatggcgactatatagccgtaggatcctcaatagggatgttgtacctgtattgtcgtcacttaaaccagatgagaaaatacaacttcgaggggaaaaccgaatccatcaccgttgttaaactgctttcatgctttgacgatctggtggccgcgggaacggccagcggccgtgtcgctgtgtttcaacttgtaagctctcttcccggtaggaacaaacagttaaggcgattcgatgtcacgggcatccataagaattctataactgcgctggcctggtcaccaaacggcatgaagctgttcagcggcgacgataaaggaaaaatcgtgtacagcagtttggacctggaccaggggctctgcaactctcaactggtgctcgaagagcccagctcaattgtgcaactcgattactcccagaaggtccttctagtgagcacacttcagaggtctctcctgttctataccgaggagaagagcgtgcggcaaattgggacccaacctcgaaagtctacaggcaagtttggtgcctgcttcattccaggcctgtgtaagcagagcgatctcaccctctacgcctctcgcccaggactgaggctgtggaaagcagatgtgcacggaaccgttcaggccaccttcatcctgaaggatgcattcgccggaggggttaagccattcgaacttcacccccggcttgaaagtcctaactccgggtcatgctccctcccggaacgccacctgggcctggtatcctgcttctttcaggaggggtgggtgctgagctggaatgagtatagcatctacctcttggacactgtcaaccaggctacagtagccggattagagggatcgggcgatattgtgagtgtgagctgcacggaaaatgaaatcttttttctgaaaggggatcgcaacatcattaggatcagcagcaggcccgaggggcttacctccaccgtgagggatggactggagatgtcagggtgcagcgaacgagtgcatgtgcaacaggcagagaaacttcctggagcaacagtgtcggaaacccgcctccgggggtccagcatggcctctagtgtggcttccgaacctcggtctcgctcaagttctcttaatagtacagactcaggcagtggcctgttaccccctggtctgcaagcaactcccgaactcgggaaggggtcccagcctctgtcccagagatttaacgctataagctccgaggactttgaccaggagctggtcgtgaagcccattaaagtgaagcgtaaaaagaagaaaaagaagactgagggcggctccagatcaacctgccacagtagcttagaatcaacaccctgttcagaattccccggagatagccctcagtctctgaacacagatctgctgtcaatgacctcaagcgtccttggtagctcagtggaccagctcagtgcagagagtccagaccaggagtcttcatttaatggggaagttaacggcgtgccgcaggaaaataccgacccagagaccttcaacgtgctcgaggtgtccggcagtatgcctgacagcctcgccgaagaggacgacatccggaccgaaatgccccactgtcatcacgctcatggacgggagctcctgaacggtgcacgcgaggacgtggggggatcagatgtgactggactcggagacgagccttgccccgcagacgacggcccaaactctacccaacttccatttcaggaacaggattccagtcctggggcacatgatggagaggacatacagccaatcggccctcagtcaaccttttgcgaagtgcccttattaaattctctgacggttcccagtagtctatcttgggccccttccgcagaacaatggctgccaggtacacgggccgatgagggcagtccggtcgagccttcgcaggaacaagacatccttacaagcatggaggcatctggacatctgagcaccaacttgtggcacgcagtgactgatgacgatacggggcagaaagagatccccatcagcgaacgcgtgctggggtccgtgggcggccaacttactcctgtgtctgctctggccgctagcacccacaagccgtggctggagcaaccacccagagaccagaccctgacgtcatccgatgaggaagacatttacgcacatgggctgcccagctcttcctccgagacctcagtgactgaactgggaccatcgtgtagccaacaggatctgtcccgtctgggggctgaggatgccggcctcctaaaacctgaccaatttgcagaatcctggatgggttattcagggcccggctatggaatactgtctctcgtcgtatccgagaagtatatatggtgtctcgactacaagggaggactattttgttccgctttacctggggccgggctcagatggcagaaatttgaagatgcagtacagcaagttgcagtcagtccgtccggcgctctgctctggaagattgaacagaaatcgaatcgggcatttgcttgtgggaaagtaacgattaagggaaagagacactggtacgaggccttgccccaggcggtgttcgtcgccttgagtgacgacactgcctggatcattagaactagcggcgacctatacctgcaaacagggctttctgtcgatcggccctgtgctcgggctgttaaagttgattgcccttacccattgagccagatcacagctagaaataatgtggtatgggccctgacagaacagagagccctgctataccgtgaaggggtctcttctttttgccccgagggcgagcagtggaagtgtgatatcgtctctgaaaggcaagctttggaaccagtctgcataaccttgggtgaccaacagactctgtgggccctggatatccatggaaatctgtggtttcggactggtattatttcgaaaaaaccacagggggatgacgatcattggtggcaggtttctattactgactacgtggttttcgatcagtgttccctatttcaaaccatcatccacgccacgcacagtgttgcgaccgccgcgcaagctccggtcgaaaaagtggcggacaagctcagaatggcattctggtctcagcagcttcagtgtcaaccaagccttcttggggtgaacaattctggggtgtggatctcctcagggaagaacgagttccacgtcgccaagggatccttgatcggcacttattggaatcacgtcgtacccagaggaacagcctccgctacaaaatgggcgttcgtgctcgcttcagcagcaccaactaaggagggcagcttcttgtggctgtgtcagtcttcaaaggatttatgcagcgtaagtgcgcagtctgcacagagccgaccatcaacagtgcaactcccccccgaggctgagatgcgcgcctacgcagcctgtcaggatgccctgtgggctttagactcactagggcaggtgtttattcgcaccctcagcaagagttgccctacaggaatgcactggactcgtctggatctgagtcaattgggagccgtcaaactgacatccctagcttgtggaaaccagcacatatgggcctgtgattcaagaggaggtgtgtactttagagtcggcacacagccactgaatccgtcgctaatgctacccgcctggatcatgattgagcccccagtccaacccgccggggtaagcttggtatcagtgcactcgtctcctaacgaccagatgctctgggtgcttgacagtcgatggaacgtgcatgttcggactggcattactgaagagatgccagtggggaccgcttgggaacacgtgccaggtttgcaagcctgccagctggctctgagcactaggacagtctgggccagatgccctaacggtgatctcgctagacgatacggggttacagataagaacccggccggggattactggaaaaaaatccccgggagtgtgtcctgctttaccgtgacagcatctgacgaactatgggccgtagggccgcccgggtatctcctgcagcgactgacaaaaactttctcccattctcacgggacacagaaatcatcccaagcagcgatgccccatcccgaagatctagaagacgagtgggaggtgatttag

SEQ ID NO: 182575 - DNA, 2202 bp, Artificial Sequence
  derived and/or modified sequence
atggccagcatcagcgagcccgtgaccttccgggagttctgccccctgtactacctgttgaatgccatccccaccaagatccagaaggggtttcgaagtatcgtggtgtatttgaccgctcttgatacaaacggagactatatagccgttggtagcagtatcggcatgctgtacctatattgtcgccacctgaatcagatgagaaagtataacttcgaagggaagaccgagagcatcacagtggtgaagctgctctcatgttttgacgatctcgtggcagctggtacggctagtggcagagtggcagtattccagctggtctcctccctgccaggtcggaacaagcaactccgaaggttcgatgtaaccggcatccataagaactctatcaccgctctggcctggtctccgaatggcatgaaactctttagcggggatgataagggcaagatagtttatagcagcctggacttggatcagggcctttgtaactcccagctcgtcctggaagaaccaagcagcattgttcaacttgactattcgcaaaaggttctgctcgtctctactctccagagaagtttgctgttttataccgaagagaagagcgtgagacagatcgggacgcaaccccgcaagtctaccggtaagttcggggcctgttttattccaggactgtgtaagcaaagtgatctcacactgtacgcttcaagacccggcttgcgtctgtggaaagccgatgtccacggaaccgtgcaggctactttcatcctaaaagacgcctttgccgggggtgtgaagccttttgaactgcatccccggctcgagtctcccaactccggctcatgttcactgccggagagacatctgggcttggttagttgctttttccaggaggggtgggtcctttcttggaacgagtactcaatctacttgttggatactgtgaaccaggctacagtggccggcctggaggggtcaggcgatatcgtctcagtgtcttgcactgagaatgagattttttttctgaagggcgatcgcaacatcattcgtattagcagccgccctgagggcttaactagtacggtgcgagacgggctggagatgtccggttgttccgaaagggtccacgtacaacaagcggagaagcttccaggggccaccgtgagtgaaacacggctcagaggatcaagcatggcctcctctgtggccagcgaacctcgatccaggagtagctctcttaattctacagactccggaagtggactccttccccccggtctacaggccactccagaactaggcaaaggttcacagccactgagccaacgcttcaatgcaatttcgagcgaagactttgatcaggaactggtggtaaaaccaataaaggtgaaacgaaagaaaaagaaaaaaaagacagaggggggcagccgctcaacttgccactcctccctggaatcaacaccctgctccgagttccctggagactcccctcagtctctcaatacagacctgctgtccatgacgtccagcgtactggggtcctccgtcgaccaactttcggccgaaagccctgaccaagaatctagcttcaacggagaggtgaacggcgtccctcaagagaacaccgaccccgagactttcaacgttctcgaggtaagtggatcaatgccggattctctggctgaggaggacgatattcgtactgaaatgccccattgccaccacgctcatggccgggagctgttgaacggcgctcgggaggatgttggaggctcggacgtgactggcctaggcgatgagccctgtccggctgatgatggcccaaattccaccccccaacatacaacacacctgacctcccatcattccaccccccaccataccacaccccactgcaccatccctcaccacataagccctcatcactctacaccacatcatactacccatcatacgcctcaccgcaccgccccacatcgtacagccccctatctagcaacatcccatcacacgactccccatcacacctcactccctactcacggggccggttgtcctccacctggggaacacactagcgccgaaactgtgaagcctgatgggtgtaaatggaatttggacgtgtgcacatgcgtcccaggccgtgatggtacgggaggttgtatggggagaggcggagccgaacagggcagcctcacatag

SEQ ID NO: 182576 - DNA, 4236 bp, Artificial Sequence
  derived and/or modified sequence
atggcgtccataagcgagcctgttaccttccgagagttttgtcccttatactaccttctaaacgccattccaacaaagatccaaaaggggtttcgctccatagtcgtctatttaaccgctctggacactaacggagactacatcgccgttgggtccagcattggcatgctatatttatattgtaggcatctcaaccagatgcgtaagtataactttgagggcaagactgagtctataacggtagttaaactcctgtcttgctttgatgatctggtggctgccggaactgcgtctgggcgtgtagctgtatttcagcttgtatcgtccctccccggtcgaaataaacagcttcggaggtttgatgtcacaggcatccacaagaacagcatcacagccctggcatggtctccaaacggtatgaaactgttttcaggggatgataaaggcaagatagtttacagtagtctcgacctggaccaaggcctctgcaatagccagctagttcttgaggaaccaagttccatcgttcagttagactacagtcagaaagtattgctcgtgtccacactgcagcggtccctcctgttctatactgaggagaaaagtgtccgccagatcggtactcaacctcgaaagtcaactgggaagttcggcgcttgctttattcctggcttatgcaagcaaagcgaccttacgttgtatgccagtagaccgggactgcggctgtggaaggcagatgtacacggtacagttcaggccactttcatcctgaaagacgctttcgccggtggtgtcaagccatttgagcttcacccaaggcttgagagccctaattctggaagctgtagcctccccgaacgccacctagggttagttagttgcttcttccaggaagggtgggtactcagctggaacgagtatagtatttatctgctggatacagtcaatcaggctaccgtagccggactggaaggttcaggggatattgtgtccgtttcatgcaccgagaatgagattttttttctgaaaggcgacagaaatattatacggattagcagtcgacctgaggggttaacctccacagtcagggacggactggaaatgtcaggctgttcggaacgcgtccatgtacaacaggccgaaaaattacccggagctaccgtgtccgaaactaggctcaggggaagttcaatggcctcctcagttgcttcagagcctcgctctcgcagcagcagcctgaactcaacagattcagggtcagggttactgcctcctgggctccaggccactcccgaattggggaaaggttcccagcccctttctcagcgatttaacgccataagctccgaagacttcgaccaggagctggtggttaaacctattaaagtgaaaagaaagaagaagaagaagaagacagagggtggctccaggtccacatgtcactccagtctggagtccaccccttgcagtgagtttccgggtgactctccacagtccttaaacacagatttactttcaatgacgagctcagtgctgggttcttctgtcgaccagctgagcgcggagtcccctgatcaagagtcatcatttaacggtgaggtaaacggtgtcccacaggaaaataccgatcccgaaactttcaacgtcctggaggtaagcggtagcatgccagactcccttgctgaagaggatgacattagaaccgagatgccccattgccaccatgcacacggcagggagctcctgaacggcgctcgggaagacgtgggcggatccgacgtcactggcctgggagacgaaccctgtcccgcagatgacggacctaacagcacccagctgccattccaggagcaagacagctcccctggcgctcacgacggcgaggatattcagccaattgggcctcagagtaccttttgtgaggtaccgttgctcaattctcttaccgtaccatcctccctcagctgggcaccgtctgctgagcaatggctcccgggaacccgggcagatgagggatcacctgttgagccctcacaagaacaggacatcctgacatccatggaggcaagcggacacctgtccacgaatctttggcacgccgttaccgatgacgataccggtcagaaagaaattcctattagtgagcgggtgttgggctcagtaggcggacagctcactccagtatctgccttagctgcctcaacacacaagccatggttagagcagccccctcgtgaccagaccttaacctcctccgatgaagaagatatatacgctcacggcctacctagctcttcatctgagaccagtgtcacagaactaggaccctcctgttctcagcaagatctcagcagactgggtgcagaagacgccggtctcctgaagccagaccagttcgcggagtcctggatgggatattcagggccaggctacgggattttgagcctggtcgtgagcgagaagtacatttggtgcctagattacaagggaggactgttctgttccgcattgcctggcgctgggttgcggtggcagaagtttgaagatgccgttcagcaagtggctgtttcccctagcggggctctgctgtggaagatcgagcagaagtccaaccgggctttcgcttgcggtaaggtgactatcaagggcaaaagacattggtacgaggctctgccccaagccgtgtttgtagccctgagcgatgacaccgcatggatcattagaacctccggcgacttgtacctgcagaccgggctctcagtggacagaccgtgcgcccgagctgttaaggtagactgcccgtatcctctgagtcagataaccgcccgaaataacgtggtatgggccctgacagagcaaagagcgctactctaccgagaaggggtcagctcattctgcccagagggagaacaatggaaatgcgatatcgtgtcggaacgacaggccttggagcctgtttgtataacattgggagaccagcaaactctgtgggccctggacatacacggaaatctctggttccggacagggatcattagtaagaagccccagggtgacgatgatcactggtggcaggtgtctatcaccgactacgttgtgtttgatcagtgttctctgtttcaaacaattattcatgcaactcactcagtggccacagccgctcaggccccagtggaaaaagttgcggataaactgcggatggctttttggtcccaacagcttcagtgtcagccaagtctgctgggcgtgaataacagtggagtatggatctcttccggcaagaacgaatttcacgtggccaaaggatcccttattggcacgtattggaaccatgtcgtccccagaggcaccgcaagcgcaaccaaatgggcattcgtgttggcctcggctgctccaaccaaggagggctccttcctgtggctctgtcagtcatccaaagacctttgctccgtcagcgcacagagcgcacagagccgtcctagcacagttcagctgccgcctgaggctgagatgagggcttacgcagcatgccaggacgccttatgggcactcgactctctggggcaagtcttcatcaggacactgtcgaaatcctgtcctactgggatgcactggacaaggctggacctaagtcagctcggggcagtgaaactcacttccctggcatgcggcaatcagcatatctgggcctgtgattccaggggtggcgtatatttcagggttggcacgcagccactgaacccttcactgatgctcccggcttggatcatgatcgaacctccggtgcaacctgccggagtgtcactggtgagcgtgcactcgagccctaacgatcagatgctgtgggtgttagactctcggtggaatgtccacgtaagaaccgggattacagaagaaatgcctgtcgggacagcttgggaacacgtgcctgggttgcaagcctgtcagctggccctgtccacacgaaccgtctgggcgagatgtcccaacggtgaccttgccaggaggtatggggttaccgataaaaaccccgcaggcgactattggaagaaaattcctgggtccgtcagctgcttcaccgtcaccgccagcgatgagctgtgggctgttggcccacctgggtatttgttacagaggctgactaaaactttctcgcactcccacggaacacagaaaagcagccaggccgcaatgccccacccagaggatctggaggatgaatgggaggtgatttag

SEQ ID NO: 182577 - DNA, 2202 bp, Artificial Sequence
  derived and/or modified sequence
atggccagtatctccgagccggtcaccttccgagagttctgcccactctactacctcctgaacgccattccgaccaagattcaaaagggatttaggagcattgtggtctatcttaccgcactggacactaacggggattacattgccgtgggcagctccattggcatgttatacttgtactgtcgccacttgaatcagatgcggaagtataacttcgagggcaaaactgagagcatcacagtggtaaaactgttatcatgcttcgacgacctggtggccgctgggaccgcctcaggcagagtggccgtctttcagctagtgtctagtttgcctggtagaaataagcagctgcgccgattcgacgttacaggcatccacaaaaactccattacagccctggcatggtcaccaaatggaatgaaactattctctggcgacgataagggtaaaattgtttacagcagcctcgatctagatcagggactatgtaactctcagttggtgctggaggagccgtccagtattgttcagctggattactcccagaaggttttgctggtgtcaacgctgcaacgcagtttgcttttttacactgaggagaagtcagttcggcaaatcggaacccagcctaggaaaagcactggtaagtttggcgcatgctttatccctgggctgtgtaaacagtcagatctgaccctgtacgcctctagacctggccttaggttgtggaaggccgatgtgcacggcaccgtgcaggctacattcatcctgaaggatgcttttgcaggaggggttaaaccctttgagctccaccccaggttagaatcccccaattccggaagctgcagtctgcccgagcgtcatctgggcctggtcagttgtttcttccaggaggggtgggtcctgagttggaatgaatacagtatataccttctcgatactgtcaaccaggccaccgtggcgggacttgagggatccggggacatcgtatcagttagctgcacagaaaatgagatcttcttcttgaaaggtgaccgcaacattattcggatctccagtcgacctgaaggcctcacctccaccgtcagggatggactcgagatgagcggttgtagcgaaagggtgcacgttcaacaagctgagaaactgcctggcgcaactgtgtccgagacccgactgagaggaagttccatggcttcaagtgttgcctcggagcccagatcacgctctagttcacttaactccacagactcaggatctggcctgttgccgcctggattgcaggccacccccgagcttggaaaaggctcacagcccttgtctcagaggttcaatgccatctcttcggaggatttcgatcaagagctggtcgtgaagcctatcaaggttaaacggaagaagaaaaaaaaaaagaccgaggggggtagccgctccacttgtcacagcagcctcgagtcaaccccgtgtagcgagttccccggtgattccccgcaaagccttaatacagacctgctctcaatgacgagtagtgtgctgggaagtagcgtcgatcagctgagcgcagagagcccggaccaggagtcatcttttaatggagaagttaacggtgtgccgcaggaaaacactgatcctgaaacctttaatgtgctcgaagttagcggctcaatgcctgacagcctcgctgaagaggatgatattcgcacagagatgccccattgccaccatgctcatgggagagagcttctgaacggcgcacgcgaggacgtggggggatcggacgtgaccggactcggcgacgagccttgcccagccgatgacggtcctaattccaccccccagcacaccactcatcttactagccaccactctaccccccaccatacaacccctcattgtacgataccacaccacataagtccacaccacagcacacctcatcacactactcaccacactccccatagaaccgctccacaccgtactgcaccctatctcgccaccagccatcacacaactccacatcatactagccttcccacacacggcgcaggttgtccacctcctggtgaacatacatccgccgaaactgtgaaacctgacgggtgtaagtggaacctagacgtgtgcacatgcgtacccggtagagatggtactggagggtgcatgggtcggggaggagctgagcaggggtccctcacttag

SEQ ID NO: 182578 - DNA, 8686 bp, Artificial Sequence
  derived and/or modified sequence
cccccggcggagccagctgctgctcttcggtgctggccccggtgccggccccgttgcccagggaacaggctcccggcagcccccgcggcccggagtccatcccgcctcctccggcccggcggggccgacgagtccggaggggctgccgcgggagcccccaggtttccctagatgacaaataaacattccttttcctgcgtgaagatagtctgtggaaaccttggccatggcatcgatatcagagcctgttacattcagagagttctgcccgttgtactatctcctcaatgccattccgacaaagatccagaagggtttccgctctatcgtggtctatctcacggccctcgacaccaacggggactacatcgcggtgggcagcagcatcggcatgctctatctgtactgccggcacctcaaccagatgaggaagtacaactttgaggggaagacggaatctatcactgtggtgaagctgctgagctgctttgatgacctggtggcagcaggcacagcctctggcagggttgcagtttttcaacttgtatcttcattgccagggagaaataaacagcttcggagatttgatgtcactggtattcacaaaaatagcattacagctctggcttggagccccaatggaatgaaattgttctctggagatgacaaaggcaaaattgtttattcttctctggatctagaccaggggctctgtaactcccagctggtgttggaggagccatcttccattgtgcagctggattatagccagaaagtgctgctggtctctactctgcaaagaagtctgctcttttacactgaagaaaagtctgtaaggcaaattggaacacaaccaaggaaaagtactgggaaatttggtgcttgttttataccaggactctgtaagcaaagtgatctaaccttgtatgcgtcacggcccgggctccggctatggaaggctgatgtccacgggactgttcaagccacgtttatcttaaaagatgcttttgccgggggagtcaagccttttgaactgcacccgcgtctggaatcccccaacagtggaagttgcagcttacctgagaggcacctggggcttgtttcatgtttctttcaagaaggctgggtgctgagttggaatgaatatagtatctatctcctagacacagtcaaccaggccacagttgctggtttggaaggatccggtgatattgtgtctgtttcgtgcacagaaaatgaaatatttttcttgaaaggagataggaacattataagaatttcaagcaggcctgaaggattaacatcaacagtgagagatggtctggagatgtctggatgctcagagcgtgtccacgtgcagcaagcggagaagctgccaggggccacagtttctgagacgaggctcagaggctcttccatggccagctccgtggccagcgagccaaggagcaggagcagctcgctcaactccaccgacagcggctccgggctcctgccccctgggctccaggccacccctgagctgggcaagggcagccagcccctgtcacagagattcaacgccatcagctcagaggactttgaccaggagcttgtcgtgaagcctatcaaagtgaaaaggaagaagaagaagaagaagacagaaggtggaagcaggagcacctgtcacagctccctggaatcgacaccctgctccgaatttcctggggacagtccccagtccttgaacacagacttgctgtcgatgacctcaagtgtcctgggcagtagcgtggatcagttaagtgcagagtctccagaccaggaaagcagcttcaatggtgaagtgaacggtgtcccacaggaaaatactgaccccgaaacgtttaatgtcctggaggtgtcaggatcaatgcctgattctctggctgaggaagatgacattagaactgaaatgccacactgtcaccatgcacatgggcgggagctgctcaatggagcgagggaagatgtgggaggcagtgatgtcacgggactcggagatgagccgtgtcctgcagatgatggaccaaatagcacacagttacccttccaagaacaggacagctctcctggggcgcatgatggggaagacatccaacccattggcccccaaagcactttttgtgaagtccccctcctgaactcactcactgtgccttccagcctcagctgggccccaagtgctgaacagtggctgcctgggaccagagctgatgaaggcagccccgtggagcccagccaagagcaggacatcctaaccagcatggaggcctctggccacctcagcacaaatctctggcatgctgtcactgatgatgacacaggtcagaaagaaatacccatttctgaacgtgtcttggggagtgtgggaggacagctgactccggtctctgccttggcagccagcactcacaagccctggcttgagcagcctccacgggatcagacattgacgtccagcgatgaggaggacatctatgcccacgggcttccttcttcatcctcagagacgagtgtgacagagctcggacctagttgctcccagcaggacctgagccggctgggtgcagaggacgccgggctgctcaagccagatcagtttgcagaaagctggatgggctactcgggtcccggctatggcatcctcagcttggtggtctccgagaagtatatctggtgcctggactacaaaggcggcctgttctgcagcgcgttgccgggcgccgggctgcgctggcagaagtttgaagatgctgtccagcaggtggcagtctcgccctcaggagcccttctctggaagattgaacagaaatctaaccgggcttttgcttgtgggaaagtcaccatcaaggggaagcggcactggtacgaagccctgccccaggcagtgtttgtggccctgagcgatgacacggcctggatcatcaggaccagtggggacctatacttgcagacaggtctgagcgtggatcgcccttgtgccagagccgtaaaggtggactgtccctacccgctgtcccagatcacagcccggaacaatgtggtgtgggcgctgacagagcagagggccctcctgtaccgggagggcgtgagcagcttctgtccggaaggcgagcagtggaagtgtgacattgtcagcgaaaggcaagctttagaacccgtctgcataacgctcggggatcagcagactctctgggccctggacatccatgggaacctgtggttcagaactggcattatttccaagaagccccaaggagatgacgaccattggtggcaagtgagcatcacggactatgtggtgtttgaccagtgcagcttatttcagacgataatccatgccactcactcggtggccacagcagcccaagcccccgtagaaaaggtggcagataagctgcgcatggcgttttggtcccagcagcttcagtgccagccaagccttctcggggtcaataacagcggtgtctggatctcctcgggcaagaatgaattccacgtcgctaagggaagtctcataggcacctactggaatcatgtggttccccgtgggacagcttctgctacaaaatgggcctttgtgttggcttctgcagctcccacgaaggaaggaagcttcctgtggctgtgccagagcagcaaggacctgtgcagcgtcagcgcccagagcgcacagtcgcggccctccacggtgcagctgcctcccgaagccgagatgcgcgcctatgccgcctgccaggatgcgctgtgggcgctggacagcctcggccaggtgttcatcaggacgctctccaagagctgccccacgggcatgcactggaccaggctggacctctcccagctaggagctgtaaaattgacaagcttggcatgtggaaatcagcacatctgggcctgtgattccaggggtggagtttacttccgtgtagggactcagcctctcaatcccagtctcatgcttccagcctggataatgattgagccacctgtccagcccgccggggtcagcttggtcagcgtccattccagccccaacgaccagatgctgtgggtgcttgacagcaggtggaacgtgcacgtgcggaccgggatcaccgaggagatgcctgtggggaccgcctgggagcatgtgccagggttgcaggcctgccagctggcgctgagcaccaggaccgtgtgggcccgctgtccaaacggagacctcgcccggcggtacggcgtcacagacaagaaccccgccggggactactggaagaaaattcccggcagcgtgtcgtgtttcacagtgactgcgtcagatgagctgtgggctgtgggcccgcccggctacctcctccaacggctgacaaagacgttcagccactcgcacggcacccagaagagcagccaggccgccatgccccaccctgaggacctggaggacgagtgggaggtcatctgaaggagccctggccgagtcacgcggaggggcccggcgtctgtggcgggcacaggggcttcagagtgactccctggtggacgcgctgcctcaacacttgtccagacacctctggccaggttggacccgcacacttactttcatctatgttggtttctgtctcgttccagaacccacagcctccacccgtggctggcgtgattgctgcagcagtggcgcctcctagctcaggacagtggcgactgcccggctgcatgcactccgattacccacgtgctgccgtcctggtctcatccacagatagctccagcttttgttggtgggagtggtctccggaggcctcccagaaccaagggtagccgggcagctggtttggcccagggcctccttccacattagtagccccagggccagatggagccaaaggtcagctctctgcagcgcgggatgtgctcggtgatggctttgtcccatcataggggggtgtccccccagagacaaagctgcagagcacattccatgccagacgctctggccaggaagctgaggccgggcttgagaggagagcgctggccatgccaggagagaacccacgcacatgcacaccacaacacacaacacacctcacctcacaccacagcacacctcaccacaccacaccgcactgcaccatacctcaccacatctcaccacaccacagcacacctcaccacacaacacaccacaccccacaccgcactgcaccgcaccgcaccgcaccgtacctcgccacatctcaccacaccacaccacaccacacctcactgcccacacacggcgcaggctgcccgcctcctggagagcacacttcagctgaaacagtaaagcctgatgggtgcaaatggaacctggatgtgtgcacgtgtgtcccaggtagggacggcacaggagggtgcatggggcgtgggggagctgagcaagggtcgctcacttagaaatgtctttggaatggtgtttaactaatgctgctggcggacatcctaaaaccagatgcatcctcagaggacgagtctactaattattgcctttgttgttgtattacaaatctgcataaaatacctcatttcaaatcaaatcttacaaatttagaagagagatatgttttccgaaaacagtggaagccctttgttccttcccgggtttgtcctgagcctgcactgtcctcgcctgcagcctcagaggggcaggcatccccgcacagacttgactggcagggcggtcacgggacctgcgggctggctccgagtggcagcccatgccttctgcggggtatgggttgacacttgacaggttgaaaccagtgcctctatggacggctgctgtggccccttcagacaatgggcagtgcccaccccgcccactggcatctgcgtgtgagggctaggccgccctgccacacatcccgccccctcccggaggcagcttcaggacaggacaccaggctggctgctttttttagcctgcccctggcccaggcccagtccttggtgtcagggagcccccaggccgcaggtggagggtgataaaatatgttctctgacaggacccagccagccacataggtggaggttttccatgtccaaatgaggtcaagatgccgaaatcccagatctgacttcacacttcccttttctagaaccttttgtaaaagttggtggcagcagaggcagccccaggccgggctgcatctctctgtgtctgttgtgccttgcccggcgcctcacggatggcaaagctctcctcacccatgggactgtagtgcaattaaacccgcgtctaggtgatgcttttaaagttgtagcttcgtgctttgtacagttttctttctggttttaatttttagttgtgctttgagtcagtgcaataaactagactttttccaaacctggccgagtgtggtgcctgagctgtgagaagtgtcctcagccgacactcacgagggcagtgcaagggagaacctgccagcccagccccaccacagggagagtgcgtcagcagacctgtcctggcctggctggtgttgaaatacacaccggtttgcccaagtggctgttatgggggaatggccgctccagagctggctgtaccccatggtagcctctgaggaggacgctgtggggtgaggtccagggctgcctcctcatggagctgtgtgtgagcaggcgttggaggggttcgagcccctggttctgtatcttcagccagcaaacgaaaccatatcgcaaaccagagctgctggaaaccagcacacgcaaaagatgacgcccagcacagcagcaggacacaccatgtgccaggaaatgacctcagcaagaaacctcaggccgtgtgaagagcagcaaagctttccagaaggcataaaaggaaacttgaataaaggaagatatgttccacattcctggatggaggactacacacattatggaaagacctcattctttccaaaggaatttataggtgtagcttgatttcagttcaaatccccactgggattgttttgttggggcaggcagggaggaataatgttagtacccacaaatgcccatgactgtgcccaatgtgcttctcaccagagccctgcaaggggaagtctcattagccccttgagactcagagaggttaggtaacttgctcaaggtcacacagcactgggactggaagccagctctgtagaactgcagacctgtgctgtttgatgcctcctcactgtcccgtcactcctgggaagaagaaacgggtgagaactgctaagtgatgacaggtggagccccagcaggggccactctattgaatggcatggcccagaccctcggagggccaggcaacaggctagcaaggcccacagggagggagcagaatggagagggcatctcagatgcgcttaaggagcggcgggggcggggcatggggggtgtcacaactaatgtggccactgcttcattctctgggcaaaataatattaaatggattaaagaatctaaaaccagtgggaaaactgtctgatttctggatggcaaaggctttctaaactcaaaagtgataggacaagctacagaggaaaataagtacatagatttgatttctccaaaatacagaaatgctgctgggcacagtgatgtgcagttatagtcccagctacttgggaggccaaggcaggaggattacttgagcccaggagtttgaggctgcaatgaactatgatcacaccactgcactccagcctcggcgacagagcaagaccttgtttctcaaaaataaataaatagaaggaaataaatgtaaaaatgctgcaaattaaaaacctcaaagaagggaaataattgcaacaaatgggaattgatgttgaatatttaccttaaaaacctatacaacaataagaggagtgcgcccttcagcagcatgtatacaaaaattgcaacgatacagagattagcatggcccctgcacaaggatgactcgcaaattcataaagctttccataaatatatttattaaaaaccaataggaggagcacttcgagtcgagtgtaagggcccttcacaaaagcagaaggaacactggcccaaacccccagcaccccggaagcagaggtgagatgggagcagcttgggagccccccattggcgccgccctactggggaagccggtccgtacgtaggccttgcatctcgccacctccacttctgtcctcaagaacaagtcctaggtcaagggaaacagcacagcctgtttataattaggaaacacttaaaacagcctggcatttgggaacagccatgttaacgtgagcaaattcctctcatgaaatagcctgcagctattaagaagcacgtgtgtgcaggaagcggaggcgcaggacctcaccgcgccagcgtgaagttcccgggcatggtcatgaaagcgtggttctgtaagaaatcagagggagaaagggagagaagggggagggagacaacccaaacgttggagggtatttgttgtaaacttcaaacttttggcaggtttgaaatttttcataactccggggaggagcaagaggggtgaaaagaaacaagttctctacttgtgatcagcagctggtcatagtggttgcctggagtatatgcctttttgtatcctttgaatttccagccatgtaaatgtattatttattccaaaaataaagcagatttacattttaaaaattca

SEQ ID NO: 182579 - DNA, 3858 bp, Artificial Sequence
  derived and/or modified sequence
gacgcctggccccgagcccctcctcggcctcccccgggccactcttcccttgcctcagccccgcagggtctccatgcccgtccgccccgtctccctcgcccgcggtctcgcccgcgcggagtggcggacactaaatgccacaacacacggagcgcctggctcgccgcccgcagaatccggcggtccgcagcggggaacaggggccgcccgcccctcctcaggcctccgctgcgcgtcccgcgccctcggcccccggccccaccctgcatcccggctgccggtctggccgcgggctctgctccttcgccttaagattgacgtcgtgttctgtcccccactcgcagcccgcgtcccttacatccgcccaccggcgcctggccccaggccttgacactcatccagttggtgttcagtgttcgatgagtggataagtgaatgactcctttcccaatcctatttgaaggcatgggaggcagaataggtagtaagtgttaaaggatggggtgtcctggagtcagagccgggcaggtcccagcggccccttcctagctctgtgctggggcaagtgccctacctcactccgctccagtttcatcaccagtggaatggagatgagaatagtttctacctctggcttgcccccaggtttccctagatgacaaataaacattccttttcctgcgtgaagatagtctgtggaaaccttggccatggcatcgatatcagagcctgttacattcagagagttctgcccgttgtactatctcctcaatgccattccgacaaagatccagaagggtttccgctctatcgtggtctatctcacggccctcgacaccaacggggactacatcgcggtgggcagcagcatcggcatgctctatctgtactgccggcacctcaaccagatgaggaagtacaactttgaggggaagacggaatctatcactgtggtgaagctgctgagctgctttgatgacctggtggcagcaggcacagcctctggcagggttgcagtttttcaacttgtatcttcattgccagggagaaataaacagcttcggagatttgatgtcactggtattcacaaaaatagcattacagctctggcttggagccccaatggaatgaaattgttctctggagatgacaaaggcaaaattgtttattcttctctggatctagaccaggggctctgtaactcccagctggtgttggaggagccatcttccattgtgcagctggattatagccagaaagtgctgctggtctctactctgcaaagaagtctgctcttttacactgaagaaaagtctgtaaggcaaattggaacacaaccaaggaaaagtactgggaaatttggtgcttgttttataccaggactctgtaagcaaagtgatctaaccttgtatgcgtcacggcccgggctccggctatggaaggctgatgtccacgggactgttcaagccacgtttatcttaaaagatgcttttgccgggggagtcaagccttttgaactgcacccgcgtctggaatcccccaacagtggaagttgcagcttacctgagaggcacctggggcttgtttcatgtttctttcaagaaggctgggtgctgagttggaatgaatatagtatctatctcctagacacagtcaaccaggccacagttgctggtttggaaggatccggtgatattgtgtctgtttcgtgcacagaaaatgaaatatttttcttgaaaggagataggaacattataagaatttcaagcaggcctgaaggattaacatcaacagtgagagatggtctggagatgtctggatgctcagagcgtgtccacgtgcagcaagcggagaagctgccaggggccacagtttctgagacgaggctcagaggctcttccatggccagctccgtggccagcgagccaaggagcaggagcagctcgctcaactccaccgacagcggctccgggctcctgccccctgggctccaggccacccctgagctgggcaagggcagccagcccctgtcacagagattcaacgccatcagctcagaggactttgaccaggagcttgtcgtgaagcctatcaaagtgaaaaggaagaagaagaagaagaagacagaaggtggaagcaggagcacctgtcacagctccctggaatcgacaccctgctccgaatttcctggggacagtccccagtccttgaacacagacttgctgtcgatgacctcaagtgtcctgggcagtagcgtggatcagttaagtgcagagtctccagaccaggaaagcagcttcaatggtgaagtgaacggtgtcccacaggaaaatactgaccccgaaacgtttaatgtcctggaggtgtcaggatcaatgcctgattctctggctgaggaagatgacattagaactgaaatgccacactgtcaccatgcacatgggcgggagctgctcaatggagcgagggaagatgtgggaggcagtgatgtcacgggactcggagatgagccgtgtcctgcagatgatggaccaaatagcacaccacaacacacaacacacctcacctcacaccacagcacacctcaccacaccacaccgcactgcaccatacctcaccacatctcaccacaccacagcacacctcaccacacaacacaccacaccccacaccgcactgcaccgcaccgcaccgcaccgtacctcgccacatctcaccacaccacaccacaccacacctcactgcccacacacggcgcaggctgcccgcctcctggagagcacacttcagctgaaacagtaaagcctgatgggtgcaaatggaacctggatgtgtgcacgtgtgtcccaggtagggacggcacaggagggtgcatggggcgtgggggagctgagcaagggtcgctcacttagaaatgtctttggaatggtgtttaactaatgctgctggcggacatcctaaaaccagatgcatcctcagaggacgagtctactaattattgcctttgttgttgtattacaaatctgcataaaatacctcatttcaaatcaaatcttacaaatttagaagagagatatgttttccgaaaacagtggaagccctttgttccttcccgggtttgtcctgagcctgcactgtcctcgcctgcagcctcagaggggcaggcatccccgcacagacttgactggcagggcggtcacgggacctgcgggctggctccgagtggcagcccatgccttctgcggggtatgggttgacacttgacaggttgaaaccagtgcctctatggacggctgctgtggccccttcagacaatgggcagtgcccaccccgcccactggcatctgcgtgtgagggctaggccgccctgccacacatcccgccccctcccggaggcagcttcaggacaggacaccaggctggctgctttttttagcctgcccctggcccaggcccagtccttggtgtcagggagcccccaggccgcaggtggagggtgataaaatatgttctctgacaggacccagccagccacataggtggaggttttccatgtccaaatgaggtcaagatgccgaaatcccagatctgacttcacacttcccttttctagaaccttttgtaaaagttggtggcagcagaggcagccccaggccgggctgcatctctctgtgtctgttgtgccttgcccggcgcctcacggatggcaaagctctcctcacccatgggactgtagtgcaattaaacccgcgtctaggtgatgcttttaaagttgtagcttcgtgctttgtacagttttctttctggttttaatttttagttgtgctttgagtcagtgcaataaactagactttttcc

SEQ ID NO: 182580 - protein, 907 aa, Artificial Sequence
  derived and/or modified sequence
MPTAAAPIISSVQKLVLYETRARYFLVGSNNAETKYRVLKIDRTEPKDLVIIDDRHVYTQQEVRELLGRLDLGNRTKMGQKGSSGLFRAVSAFGVVGFVRFLEGYYIVLITKRRKMADIGGHAIYKVEDTNMIYIPNDSVRVTHPDEARYLRIFQNVDLSSNFYFSYSYDLSHSLQYNLTVLRMPLEMLKSEMTQNRQESFDIFEDEGLITQGGSGVFGICSEPYMKYVWNGELLDIIKSTVHRDWLLYIIHGFCGQSKLLIYGRPVYVTLIARRSSKFAGTRFLKRGANCEGDVANEVETEQILCDASVMSFTAGSYSSYVQVRGSVPLYWSQDISTMMPKPPITLDQADPFAHVAALHFDQMFQRFGSPIIILNLVKEREKRKHERILSEELVAAVTYLNQFLPPEHTIVYIPWDMAKYTKSKLCNVLDRLNVIAESVVKKTGFFVNRPDSYCSILRPDEKWNELGGCVIPTGRLQTGILRTNCVDCLDRTNTAQFMVGKCALAYQLYSLGLIDKPNLQFDTDAVRLFEELYEDHGDTLSLQYGGSQLVHRVKTYRKIAPWTQHSKDIMQTLSRYYSNAFSDADRQDSINLFLGVFHPTEGKPHLWELPTDFYLHHKNTMRLLPTRRSYTYWWTPEVIKHLPLPYDEVICAVNLKKLIVKKFHKYEEEIDIHNEFFRPYELSSFDDTFCLAMTSSARDFMPKTVGIDPSPFTVRKPDETGKSVLGNKSNREEAVLQRKTAASAPPPPSEEAVSSSSEDDSGTDREEEGSVSQRSTPVKMTDAGDSAKVTENVVQPMKELYGINLSDGLSEEDFSIYSRFVQLGQSQHKQDKNSQQPCSRCSDGVIKLTPISAFSQDNIYEVQPPRVDRKSTEIFQAHIQASQGIMQPLGKEDSSMYREYIRNRYL

SEQ ID NO: 182581 - protein, 139 aa, Artificial Sequence
  derived and/or modified sequence
MGQKGSSGLFRAVSAFGVVGFVRFLEGYYIVLITKRRKMADIGGHAIYKVEDTNMIYIPNDSVRVTHPDEARYLRIFQNVDLSSNFYFSYSYDLSHSLQYNLTVLRMPLEMLKSEMTQNRQESFDIFEDEGLITQGGSG

SEQ ID NO: 182582 - protein, 136 aa, Artificial Sequence
  derived and/or modified sequence
  misc_feature (1)..(1): Xaa can be any naturally occurring amino acid
XLFEELYEDHGDTLSLQYGGSQLVHRVKTYRKIAPWTQHSKDIMQTLSRYYSNAFSDADRQDSINLFLGVFHPTEGKPHLWELPTDFYLHHKNTMRLLPTRRSYTYWWTPEVIKHLPLPYDEGFLARSPANLECSN

SEQ ID NO: 182583 - protein, 99 aa, Artificial Sequence
  derived and/or modified sequence
MTSSARDFMPKTVGIDPSPFTVRKPDETGKSVLGNKSNREEAVLQRKTAASAPPPPSEEAVSSSSEDDSGTDREEEGSVSQRSTPVKMTDAGDSAKVTE

SEQ ID NO: 182584 - protein, 601 aa, Artificial Sequence
  derived and/or modified sequence
MTGYLRIFQNVDLSSNFYFSYSYDLSHSLQYNLTVLRMPLEMLKSEMTQNRQESFDIFEDEGLITQGGSVDQADPFAHVAALHFDQMFQRFGSPIIILNLVKEREKRKHERILSEELVAAVTYLNQFLPPEHTIVYIPWDMAKYTKSKLCNVLDRLNVIAESVVKKTGFFVNRPDSYCSILRPDEKWNELGGCVIPTGRLQTGILRTNCVDCLDRTNTAQFMVGKCALAYQLYSLGLIDKPNLQFDTDAVRLFEELYEDHGDTLSLQYGGSQLVHRVKTYRKIAPWTQHSKDIMQTLSRYYSNAFSDADRQDSINLFLGVFHPTEGKPHLWELPTDFYLHHKNTMRLLPTRRSYTYWWTPEVIKHLPLPYDEVICAVNLKKLIVKKFHKYEEEIDIHNEFFRPYELSSFDDTFCLAMTSSARDFMPKTVGIDPSPFTVRKPDETGKSVLGNKSNREEAVLQRKTAASAPPPPSEEAVSSSSEDDSGTDREEEGSVSQRSTPVKMTDAGDSAKVTENVVQPMKELYGINLSDGLSEEDFSIYSRTPISAFSQDNIYEVQPPRVDRKSTEIFQAHIQASQGIMQPLGKEDSSMYREYIRNRYL

SEQ ID NO: 182585 - DNA, 3011 bp, Artificial Sequence
  derived and/or modified sequence
agtgcctaatgggtgttgttcctggctggacttgatgtccagggcctgaggggttttctcgccgagtctcctggggcggtccggaggctcgtgccctgttgtggggcccccatttgccgccgccatgcccacggccgccgcccccatcatcagctcggtccagaagctggttctgtatgagactagagctagatactttctagttgggagcaataatgcagaaacgaaatatcgtgtcttgaagattgatagaacagaaccaaaagatttggtcataattgatgacaggcatgtctatactcaacaagaagtaagggaacttcttggccgcttggatcttggaaatagaacaaagatgggacagaaaggatcctcgggcttatttcgagcggtttcagcttttggtgttgtgggttttgtcaggttcttagaaggctattatattgtgttaataactaaaaggaggaagatggcggatattggaggtcatgcaatctataaggtcgaagatacaaatatgatctatatacccaatgattctgtacgggttactcatcctgatgaagctaggtatctacgaatatttcaaaatgtggacctatctagcaatttttactttagttacagctatgatttgtcccactcacttcaatataatctcactgtcttgcgaatgcccctggagatgttaaagtcagaaatgacccagaatcgccaagagagctttgacatctttgaagatgaaggattaattacacaaggtggaagcggggtatttgggatctgtagtgagccttatatgaaatatgtatggaatggtgaacttctggatataattaaaagtactgtgcatcgtgactggcttttgtatattattcatgggttctgtgggcagtcaaagctgttgatctatggacgaccagtgtatgtcactctaatagctagaagatccagtaaatttgctggcacccgttttcttaaaagaggtgcaaactgtgagggtgatgttgcaaatgaagtggagactgaacaaatactctgcgatgcttctgtgatgtctttcactgcaggaagttattcttcatatgtacaagttagaggatctgtgcccttatactggtctcaggacatttcaactatgatgcctaaaccacctattacattggatcaggcagatccatttgcacatgtggctgcccttcactttgaccagatgttccagaggtttggctctcccatcatcatcttgaatttagtgaaggaacgagagaaaagaaagcatgaaagaattctgagtgaagaacttgttgctgctgtgacctatctcaaccaatttttgcctcctgagcacactattgtttatattccctgggacatggccaagtataccaaaagcaagctgtgtaatgttcttgatcgactaaatgtgattgcagaaagtgtggtgaagaaaacaggtttctttgtaaaccgccctgattcttactgtagcattttgcggccagatgaaaagtggaatgaactaggaggatgtgtgattcccactggtcgcctgcagactggcatccttcgaaccaactgtgtggactgtttagatcgcaccaacacagcacagtttatggtgggaaaatgtgctctggcctatcagctgtattcactgggactgattgacaaacctaatctacagtttgatacagatgcagttaggttatttgaggaactctatgaagatcatggtgataccctatcccttcagtatggtggttctcaacttgttcatcgtgtgaaaacctacagaaagatagcaccatggacccagcactccaaagacatcatgcaaaccctgtctagatattacagcaatgctttttcagatgccgatagacaagattccattaatctcttcctgggagttttccatcccactgaagggaaacctcatctctgggagctcccaacagatttttatttgcatcacaaaaataccatgagacttttgccaacaagaagaagttatacttactggtggacaccagaggtgataaagcatttaccattgccctatgatgaagttatctgtgctgtgaacttaaagaagttgatagtgaagaaattccacaaatatgaagaagagattgatatccacaatgagttctttcggccatatgagttgagcagctttgatgataccttttgcttggctatgacaagctcagcacgtgactttatgcctaagaccgttggaattgatccaagtccatttactgtgcgtaaaccagatgaaactggaaaatcagtattgggaaacaaaagcaatagagaagaagctgtattacagcggaaaacggcagccagcgccccgccgccccccagcgaggaggctgtgtccagcagctctgaggatgactctgggactgatcgggaagaagagggctctgtgtctcagcgctccactcccgtgaagatgactgatgcaggagacagtgccaaagtgaccgagaatgtggtccaacccatgaaggagctatatggaattaacctctcagatggcctctcagaagaagatttctccatttattcaagatttgttcagctggggcagagtcaacataaacaagacaagaatagccagcagccctgttctaggtgctcagatggagttataaaactaacacccatctcggctttctcgcaagataacatctatgaagttcagcccccaagagtagacagaaaatctacagagatcttccaagcccacatccaggccagccaaggtatcatgcagcccctaggaaaagaggactcctccatgtaccgagagtacatcaggaaccgctacctgtgaaaagagcgcaggtccacctggtggacacgtctgattagcttagaacctgtcttgtctcatcttcaaaaggtaacttattaaaagtcctttgcgtctgaagcctttctccttttctgtcacttgcaaattccaaattatagctaataaagatgactagataatt

SEQ ID NO: 182586 - DNA, 2724 bp, Artificial Sequence
  derived and/or modified sequence
atgccaactgcagctgcccctataattagtagcgtccagaagctcgtcctgtatgagacaagggctagatatttcctcgtcgggagtaataatgctgagactaagtatagagttctcaagattgacaggacagaacccaaggacctggtaattatcgatgaccggcacgtgtacacacaacaagaggtgcgggagctactgggccgtctggatctgggcaaccgaaccaaaatgggtcagaaagggtcctctgggctgtttcgcgctgtctccgcgttcggcgtcgtgggcttcgtccgcttcttagagggttattacattgttctcatcacaaagcgtcggaaaatggccgacattggtgggcatgccatctacaaggtggaggacactaatatgatctacatcccaaatgattctgtgagggtgacccacccagacgaggcccggtacttgaggattttccaaaatgtcgatctttctagcaacttttatttttcctattcatacgacctatcgcatagtctgcaatataaccttactgtcttaaggatgcctctggaaatgctaaagagcgagatgacccagaaccgccaggaaagtttcgacattttcgaagatgaaggcctgatcacacagggggggagcggggtatttgggatctgtagtgagccctacatgaagtatgtctggaatggcgagcttctggatatcatcaagagcactgtgcaccgtgactggctgctgtacataatccacgggttctgcggacagagtaagctcctcatttatgggcgccctgtgtatgtcaccttgatcgcccggcgatcaagcaagtttgcagggacacgcttcctgaagcggggtgctaattgcgaaggggatgtcgccaatgaagtcgaaaccgagcagatcctctgcgacgcaagcgtcatgtcattcacagccggctcctattcctcttatgtccaggtgcgcggctctgtgcccctctactggtcacaagatattagtacaatgatgcctaaacccccgataaccttagaccaggccgacccattcgcccacgtggcagctctccacttcgatcagatgtttcaacgctttggctctccaatcattatactgaacctggtgaaggagcgagagaagagaaaacatgaacggattttgtctgaagaactcgtggccgctgtgacctacctcaatcagttcctgcctcctgaacatacaatagtgtacataccatgggacatggctaaatatacaaagagcaaactctgcaacgtgctggacaggttgaatgtcattgccgaatccgttgtgaaaaagaccggattctttgtgaaccgccctgattcatactgttctatacttcgccctgatgagaagtggaacgaactgggaggatgcgtgattccaacaggtcggctgcagaccggtatactgcgcactaattgcgtggactgtctggatcgcactaacacagcccaatttatggtgggaaagtgcgctttggcgtaccagctgtacagtctggggctcatcgacaaacccaacctgcagtttgataccgacgccgtacggttgttcgaggaattgtacgaggaccatggagacacactgtctctgcaatacggtggctcacaactcgttcatagagtgaagacatacagaaagatcgcgccttggactcagcattctaaggacatcatgcaaaccctgagtagatactatagcaacgccttttctgacgcagaccgtcaggatagcatcaacttgtttctcggggtgtttcaccccaccgagggtaaaccacacctgtgggagctgcccaccgacttttatttgcatcacaaaaataccatgaggctcctgcccacccgccggtcgtatacatactggtggaccccagaagttattaagcatctccctctgccatatgacgaggttatctgtgcagtcaatctcaaaaaacttatcgtgaagaagttccacaagtacgaggaggaaatcgacattcacaatgagttcttccgcccctacgaattgtcgtcttttgatgataccttctgtcttgcgatgacctcatccgcccgagattttatgcccaagaccgtgggtatcgatccctccccatttaccgtccgcaagcctgacgaaaccggcaagagcgttttaggcaacaaatcgaatcgcgaggaagccgtgcttcagcggaaaaccgccgctagtgccccccctcccccctccgaggaggcggtgagctcctcctccgaagacgattccggcactgaccgggaggaagagggctccgtgagtcagaggtctacaccggtgaagatgaccgacgccggagattcagcaaaggtaacggaaaacgtggtgcagcccatgaaagaactgtatggtattaacctctctgacggcttgagtgaggaggacttttcaatctacagtcgtttcgtacagctcgggcaatcacaacacaagcaggacaagaatagtcagcagccatgttcccgttgttccgacggagtgatcaagctgacaccaattagcgcctttagtcaggataatatctatgaagtgcagcctccccgagttgaccggaagtcgactgagatttttcaggcccacattcaggcgagccaggggataatgcaaccactggggaaggaggactccagtatgtaccgggagtacatcaggaaccggtacctgtag

SEQ ID NO: 182587 - DNA, 2724 bp, Artificial Sequence
  derived and/or modified sequence
atgcccacagctgctgcccccatcatcagctctgtgcagaagctggtgctgtatgagacccgggcccgctacttcctggtgggcagcaacaatgctgagaccaagtacagagtgctgaagattgacagaacagagcccaaggacctggtgatcattgatgacagacatgtgtacacccagcaggaggtgcgggagctgctgggccgcctggacctgggcaacagaaccaagatgggccagaagggcagcagcggcctcttccgggctgtgtctgcctttggagtggtgggctttgtgcgcttcctggagggctactacatcgtgctgatcaccaagaggaggaagatggctgacattggaggccacgccatctacaaggtggaggacaccaacatgatctacatccccaatgattctgtgcgggtgacccacccagatgaggcccgctacctgcgcatcttccagaatgtggacctgagcagcaacttctacttctcctacagctatgacctgagccacagcctgcagtacaacctgactgtgctgaggatgcccctggagatgctgaagtctgagatgacccagaaccggcaggagagctttgacatctttgaagatgagggcctcatcacccagggcggcagcggcgtgtttggcatctgcagcgagccctacatgaagtatgtgtggaatggagagctgctggacatcatcaagagcacagtgcaccgggactggctgctgtacatcatccacggcttctgtggccagagcaagctgctgatctacggccggcctgtgtatgtgaccctcatcgcccggcgcagcagcaagtttgctggcacccgcttcctgaagagaggagccaactgtgaaggagatgtggccaatgaggtggagacagagcagatcctgtgtgatgcctctgtgatgtccttcaccgctggcagctacagcagctatgtgcaggtgcggggctctgtgcccctgtactggagccaggacatcagcaccatgatgcccaagccacccatcaccctggaccaggccgacccctttgcccacgtggccgccctgcactttgaccagatgttccagcgcttcggcagccccatcatcatcctgaacctggtgaaggagcgggagaagaggaagcatgagcgcatcctgtctgaggagctggtggccgctgtgacctacctgaaccagttcctgcccccagagcacaccatcgtgtacatcccctgggacatggccaagtacaccaagagcaagctgtgcaatgtgctggaccggctgaatgtgattgctgagagcgtggtgaagaagacaggcttctttgtgaacagaccagacagctactgcagcatcctgcggccagatgagaagtggaatgagctgggcggctgcgtcatccccaccggccgcctgcagacaggcatcctgcggaccaactgtgtggactgcctggacaggaccaacacagcccagttcatggtgggcaaatgtgccctggcctaccagctgtacagcctgggcctgattgacaagcccaacctgcagtttgacacagatgctgtgcggctgtttgaggagctgtatgaagatcatggagacaccctgagcctgcagtatggaggcagccagctggtgcaccgggtgaagacctacaggaagatcgccccctggacccagcacagcaaggacatcatgcagaccctgagccgctactacagcaatgccttcagtgatgctgaccggcaggacagcatcaacctcttcctgggcgtcttccaccccacagagggcaagccccacctgtgggagctgcccacagacttctacctgcaccacaagaacaccatgaggctgctgcccacccggcgcagctacacctactggtggaccccagaggtgatcaagcacctgcccctgccctatgatgaggtgatctgtgctgtgaacctgaagaagctgattgtgaagaagttccacaagtatgaggaggagattgacatccacaatgagttcttccggccctatgagctgagcagctttgatgacaccttctgcctggccatgaccagcagcgcccgggacttcatgcccaagacagtgggcatcgaccccagccccttcaccgtgaggaagccagatgaaacaggcaagtctgtgctgggcaacaagagcaaccgggaggaggccgtgctgcagaggaagacagctgccagcgcccctcctccacccagcgaggaggccgtgagcagcagcagtgaagatgacagcggcacagaccgggaggaggagggctctgtgtcccagaggagcacccctgtgaagatgacagatgctggggacagcgccaaggtgacagaaaatgtggtgcagcccatgaaggagctgtatggcatcaacctgagtgatggcctgtctgaggaggacttcagcatctacagcagatttgtgcagctgggccagagccagcacaagcaggacaagaacagccagcagccctgcagccgctgcagtgatggagtcatcaagctgacccccatcagcgccttcagccaggacaacatctatgaggtgcagcccccccgggtggacaggaagagcacagagatcttccaggcccacatccaggccagccagggcatcatgcagcccctgggcaaggaggacagctccatgtaccgggagtacatccggaaccgctacctgtag

SEQ ID NO: 182588 - DNA, 2724 bp, Artificial Sequence
  derived and/or modified sequence
atgcccaccgccgccgcccccatcatcagcagcgtgcagaagctggtgttgtatgagactagagccaggtactttctggtggggtccaataatgcagagacaaagtacagggtcttgaaaattgaccgaaccgagcctaaggatttagttattatcgatgacagacatgtgtatactcagcaggaagtacgcgaactactcgggcgccttgatttagggaaccgaacaaagatggggcagaaggggtcatcaggcctgtttagagccgtcagcgctttcggcgtggtgggtttcgtccggttcctggagggctactacatcgtactcatcactaaacgccggaagatggccgacattggcggacatgcgatctataaagttgaagacactaatatgatttacattccaaatgatagcgtaagagtcacccatccagacgaagcacgatacctgcgcatcttccagaacgtggacttgtcttcgaatttctatttcagctacagttatgacctctctcatagcttgcagtacaaccttacggttctgaggatgccgctcgagatgctgaagtctgagatgacacaaaatcgccaagagagctttgatatcttcgaggatgaaggcctgatcactcaggggggctctggtgtcttcggaatttgctccgaaccgtacatgaagtacgtatggaatggagagctcctggacataattaaaagcacagtacatagagactggctattgtacatcatccacggcttctgtggtcagagcaagctgcttatctacggccggcccgtgtacgtcacgttgattgcacggaggtcctccaagtttgctggcacaagattcctgaagagaggtgccaactgcgagggcgacgttgcaaatgaggtggaaacggaacaaattctctgcgatgcaagcgttatgtcttttacagccggcagttattcgtcatacgtccaggtgcggggttctgtccccctgtactggtctcaggatatctctaccatgatgcccaaaccaccaatcacgttggatcaggccgacccctttgcccatgttgctgcgctgcattttgaccagatgtttcagagatttgggagcccgattatcattcttaacctggtgaaagaaagggaaaagagaaagcatgagcggatcctatctgaagagctggtcgctgcagtcacttatctaaaccagttcctgccacctgaacacacaatcgtctacatcccctgggatatggcaaagtatacaaagtccaaactttgcaatgtcctggatagactcaatgtcatcgctgaatcagtagtgaagaaaacgggcttctttgtgaacaggcccgactcttactgttccatcctgaggcctgacgagaagtggaatgaattgggaggctgcgtcattcccactggcagactccagacagggatcctgcgtaccaactgtgttgattgccttgacagaacaaataccgcgcagtttatggttggcaagtgtgcactcgcgtatcagctgtactcacttggactgatcgataaacctaacctgcagtttgatacagatgctgtaagactgtttgaggagctttatgaggaccacggggacacactgagcctgcaatacggaggcagccagcttgtgcatagggtcaagacatacagaaaaatagccccctggacccagcattccaaggatataatgcagactctgtctcggtactatagcaacgcattcagtgacgcagatagacaagattcaattaatttattcctaggggttttccatccaacggaaggcaagccccacctgtgggagctgcccaccgatttttacctccaccataaaaatacaatgcgcctgctccccactcgaaggtcctacacctactggtggacccctgaggtgattaaacatttaccactaccctacgatgaggtgatatgtgccgtcaatcttaagaaattaattgtgaagaagtttcacaagtatgaggaagaaatagacatccacaatgaattttttaggccttacgaactgagttcgtttgacgacactttttgcttagccatgacctcctcagcacgcgattttatgcctaagactgtggggattgatccctccccgtttaccgtgcgaaagccagacgagactgggaagtcggtgttgggcaacaaatccaaccgcgaggaggccgtgctccagagaaagaccgctgctagcgcccccccccctcccagcgaggaggcggtgagctcttcctctgaggatgatagtggaacagaccgtgaggaggaagggtccgtgagtcagcggtcaacccccgtcaaaatgactgacgctggggactcggcaaaagttactgaaaatgtggtccaacccatgaaagagctttatggcataaatctctctgacggactgtccgaggaagacttctccatctactcacgttttgtccaattagggcagtcacagcacaagcaagataaaaactcccaacagccctgcagccggtgctcagacggcgtcatcaagctgaccccaatttccgctttctctcaggacaacatatacgaggtccagccacctcgtgttgatcggaaaagtaccgagatttttcaggcgcatattcaggcatcccaggggataatgcagcccctgggtaaagaagactccagcatgtatcgggagtacattcgaaaccgttatctgtag

SEQ ID NO: 182589 - DNA, 2724 bp, Artificial Sequence
  derived and/or modified sequence
atgccaaccgcggcagccccaataatctcaagcgtgcagaaactggtactttacgagactcgcgctcgatactttttggtaggaagcaacaatgctgaaacaaagtacagagtgctgaagatcgacaggacagagcccaaagatctggtgataattgatgaccgccacgtgtacacccagcaggaagtgagggagctcctgggccgactggacctgggaaatagaacaaaaatgggacagaaaggcagttccggtctttttagagccgtctcagccttcggggtggttgggttcgtgagattcctggagggatactatatagtgttgatcaccaaaagacgcaagatggcggacatcggcggacacgccatctacaaagtggaggacacgaatatgatctacattccgaatgacagcgtcagggttacccatccagacgaagccaggtatctgcggatatttcagaatgtggatctctcatcaaacttttacttctcttattcatacgatctctcacacagcctgcagtataacctgacagtgcttaggatgcccttggaaatgctgaagtcagaaatgacacaaaaccgacaagagagctttgacattttcgaagacgagggactgatcacacaaggcggtagtggcgttttcggcatttgttcagaaccatacatgaaatacgtgtggaatggggagctgctggatatcataaagagtaccgtgcatcgagactggcttctttacattatacacgggttctgcgggcagtccaaacttctgatatacggcaggcccgtgtacgtcaccttaatcgccaggcggtcctccaaatttgctgggactcgctttctgaaaagaggagccaattgtgagggggacgtggctaacgaagtggaaacagaacagatcctgtgcgatgcctctgtgatgagctttacagcaggaagctatagttcttacgtccaagttcgtggttccgtccccctgtattggagtcaggacatctcgaccatgatgcccaaaccaccaattaccctcgaccaggctgacccctttgcgcacgtggctgctttacatttcgaccagatgtttcagaggttcgggtctcccattattatcctgaatctggtgaaggagcgggagaagaggaagcacgagagaatactttcggaagagctagtggccgcagtgacctatttaaatcaattcctccctcctgaacacaccatcgtgtatattccctgggacatggctaagtacacaaagagtaagctctgcaacgtcctcgatagacttaatgttatcgctgagtctgtggtgaaaaagacgggattctttgtgaacaggcccgacagttattgctccattttacgtccggatgagaaatggaatgaattggggggatgcgttattccaaccggtcgcctgcaaactggcatactccgcaccaattgcgtcgactgtttggacaggactaacactgctcagtttatggttggaaagtgtgcacttgcctatcagctgtattcactgggtcttatcgataaacctaatttgcaattcgacaccgacgccgttcgactgtttgaggaactctacgaggatcacggtgacaccctgtcgctgcagtatgggggaagtcagctggtccaccgggtgaagacctaccggaagatagcaccctggacgcagcactctaaagacattatgcaaactctgagcaggtattattccaacgcgttcagtgatgcggataggcaagatagcatcaacctctttctgggcgtgtttcaccctactgaaggcaaaccccacctgtgggagctgcctaccgatttctacctgcaccacaagaacactatgcggcttcttcccacacgacgctcctacacttactggtggactcccgaagtcattaaacacctgcctctgccatacgacgaagtgatttgcgccgtaaacctgaaaaagctcatagtcaagaaatttcataagtatgaagaggagatcgacatccataacgagttcttcaggccttacgaacttagtagctttgacgataccttttgcttggcaatgaccagcagtgcccgtgacttcatgccaaaaacagttggcatcgaccctagtccgttcaccgtgcgcaaaccagacgagacaggcaaatcggtgttgggaaacaagagtaaccgcgaggaggctgtactccagcgaaaaaccgcggcatccgcgccaccccctccttcagaagaagcggtgagctcatcaagcgaggatgattccggcacagatcgtgaggaggagggtagcgtgtcccaacggtcgacaccagttaagatgacagacgctggggattctgcaaaggtaaccgaaaacgttgttcagcctatgaaggagctgtatggaataaatctgagcgatggtctatccgaggaagatttcagcatttactctcggtttgtccagttgggacagtcccagcataaacaagataagaacagccagcagccttgttccaggtgctcagacggtgtgatcaagctgacacccatctctgcattttcccaagacaacatatatgaggtccagccgcctcgggtggatcgaaagtccactgaaattttccaggcccacatccaggcatcccaaggcatcatgcagccactgggcaaggaggatagctctatgtaccgagagtatatccgtaacagatatctttag

SEQ ID NO: 182590 - DNA, 2724 bp, Artificial Sequence
  derived and/or modified sequence
atgcccaccgccgccgcccccatcatcagcagcgtgcagaagctggtgctgtacgagaccagagccagatacttcctggtgggcagcaacaacgccgagaccaagtacagagtgctgaagatcgacagaaccgagcccaaggacctggtgatcatcgacgacagacacgtgtacacccagcaggaggtgagagagctgctgggcagactggacctgggcaacagaaccaagatgggccagaagggcagcagcggcctgttcagagccgtgagcgccttcggcgtggtgggcttcgtgagattcctggagggctactacatcgtgctgatcaccaagagaagaaagatggccgacatcggcggccacgccatctacaaggtggaggacaccaacatgatctacatccccaacgacagcgtgagagtgacccaccccgacgaggccagatacctgagaatcttccagaacgtggacctgagcagcaacttctacttcagctacagctacgacctgagccacagcctgcagtacaacctgaccgtgctgagaatgcccctggagatgctgaagagcgagatgacccagaacagacaggagagcttcgacatcttcgaggacgagggcctgatcacccagggcggcagcggcgtgttcggcatctgcagcgagccctacatgaagtacgtgtggaacggcgagctgctggacatcatcaagagcaccgtgcacagagactggctgctgtacatcatccacggcttctgcggccagagcaagctgctgatctacggcagacccgtgtacgtgaccctgatcgccagaagaagcagcaagttcgccggcaccagattcctgaagagaggcgccaactgcgagggcgacgtggccaacgaggtggagaccgagcagatcctgtgcgacgccagcgtgatgagcttcaccgccggcagctacagcagctacgtgcaggtgagaggcagcgtgcccctgtactggagccaggacatcagcaccatgatgcccaagccccccatcaccctggaccaggccgaccccttcgcccacgtggccgccctgcacttcgaccagatgttccagagattcggcagccccatcatcatcctgaacctggtgaaggagagagagaagagaaagcacgagagaatcctgagcgaggagctggtggccgccgtgacctacctgaaccagttcctgccccccgagcacaccatcgtgtacatcccctgggacatggccaagtacaccaagagcaagctgtgcaacgtgctggacagactgaacgtgatcgccgagagcgtggtgaagaagaccggcttcttcgtgaacagacccgacagctactgcagcatcctgagacccgacgagaagtggaacgagctgggcggctgcgtgatccccaccggcagactgcagaccggcatcctgagaaccaactgcgtggactgcctggacagaaccaacaccgcccagttcatggtgggcaagtgcgccctggcctaccagctgtacagcctgggcctgatcgacaagcccaacctgcagttcgacaccgacgccgtgagactgttcgaggagctgtacgaggaccacggcgacaccctgagcctgcagtacggcggcagccagctggtgcacagagtgaagacctacagaaagatcgccccctggacccagcacagcaaggacatcatgcagaccctgagcagatactacagcaacgccttcagcgacgccgacagacaggacagcatcaacctgttcctgggcgtgttccaccccaccgagggcaagccccacctgtgggagctgcccaccgacttctacctgcaccacaagaacaccatgagactgctgcccaccagaagaagctacacctactggtggacccccgaggtgatcaagcacctgcccctgccctacgacgaggtgatctgcgccgtgaacctgaagaagctgatcgtgaagaagttccacaagtacgaggaggagatcgacatccacaacgagttcttcagaccctacgagctgagcagcttcgacgacaccttctgcctggccatgaccagcagcgccagagacttcatgcccaagaccgtgggcatcgaccccagccccttcaccgtgagaaagcccgacgagaccggcaagagcgtgctgggcaacaagagcaacagagaggaggccgtgctgcagagaaagaccgccgccagcgccccccccccccccagcgaggaggccgtgagcagcagcagcgaggacgacagcggcaccgacagagaggaggagggcagcgtgagccagagaagcacccccgtgaagatgaccgacgccggcgacagcgccaaggtgaccgagaacgtggtgcagcccatgaaggagctgtacggcatcaacctgagcgacggcctgagcgaggaggacttcagcatctacagcagattcgtgcagctgggccagagccagcacaagcaggacaagaacagccagcagccctgcagcagatgcagcgacggcgtgatcaagctgacccccatcagcgccttcagccaggacaacatctacgaggtgcagccccccagagtggacagaaagagcaccgagatcttccaggcccacatccaggccagccagggcatcatgcagcccctgggcaaggaggacagcagcatgtacagagagtacatcagaaacagatacctgtag

SEQ ID NO: 182591 - protein, 1159 aa, Artificial Sequence
  derived and/or modified sequence
MLDFLAENNLCGQAILRIVSCGNAIIAELLRLSEFIPAVFRLKDRADQQKYGDIIFDFSYFKGPELWESKLDAKPELQDLDEEFRENNIEIVTRFYLAFQSVHKYIVDLNRYLDDLNEGVYIQQTLETVLLNEDGKQLLCEALYLYGVMLLVIDQKIEGEVRERMLVSYYRYSAARSSADSNMDDICKLLRSTGYSSQPGAKRPSNYPESYFQRVPINESFISMVIGRLRSDDIYNQVSAYPLPEHRSTALANQAAMLYVILYFEPSILHTHQAKMREIVDKYFPDNWVISIYMGITVNLVDAWEPYKAAKTALNNTLDLSNVREQASRYATVSERVHAQVQQFLKEGYLREEMVLDNIPKLLNCLRDCNVAIRWLMLHTADSACDPNNKRLRQIKDQILTDSRYNPRILFQLLLDTAQFEFILKEMFKQMLSEKQTKWEHYKKEGSERMTELADVFSGVKPLTRVEKNENLQAWFREISKQILSLNYDDSTAAGRKTVQLIQALEEVQEFHQLESNLQVCQFLADTRKFLHQMIRTINIKEEVLITMQIVGDLSFAWQLIDSFTSIMQESIRVNPSMVTKLRATFLKLASALDLPLLRINQANSPDLLSVSQYYSGELVSYVRKVLQIIPESMFTSLLKIIKLQTHDIIEVPTRLDKDKLRDYAQLGPRYEVAKLTHAISIFTEGILMMKTTLVGIIKVDPKQLLEDGIRKELVKRVAFALHRGLIFNPRAKPSELMPKLKELGATMDGFHRSFEYIQDYVNIYGLKIWQEEVSRIINYNVEQECNNFLRTKIQDWQSMYQSTHIPIPKFTPVDESVTFIGRLCREILRITDPKMTCHIDQLNTWYDMKTHQEVTSSRLFSEIQTTLGTFGLNGLDRLLCFMIVKELQNFLSMFQKIILRDRTVQDTLKTLMNAVSPLKSIVANSNKIYFSAIAKTQKIWTAYLEAIMKVGQMQILRQQIANELNYSCRFDSKHLAAALENLNKALLADIEAHYQDPSLPYPKEDNTLLYEITAYLEAAGIHNPLNKIYITTKRLPYFPIVNFLFLIAQLPKLQYNKNLGMVCRKPTDPVDWPPLVLGLLTLLKQFHSRYTEQFLALIGQFICSTVEQCTSQKIPEIPADVVGALLFLEDYVRYTKLPRRVAEAHVPNFIFDEFRTVL

SEQ ID NO: 182592 - DNA, 3480 bp, Artificial Sequence
  derived and/or modified sequence
atgctcgacttcttagccgaaaacaatctgtgcggacaggctattcttcggatcgtaagttgcggtaacgccattatagcggagttgttgaggctgtcagagtttattcctgccgtgttcagactaaaggatagggcggaccagcagaagtacggcgatatcatttttgatttctcttatttcaagggccctgagctgtgggagtcaaagttggacgcgaagccagagcttcaagacctcgacgaagagtttagagaaaacaacattgaaatcgtaaccagattttaccttgccttccagtctgtgcacaagtatattgtggatctgaatcgctaccttgacgacctgaatgagggggtgtacatccaacaaacattagaaaccgtgttattgaatgaggacggaaagcagcttctatgtgaggctctctatctgtatggagtcatgctcctggtcatagatcagaaaatagaaggagaggttcgagaacgtatgcttgtctcttactacagatacagcgcagcccggtcttcagctgatagtaacatggatgatatttgtaaactccttcgttccactggatatagttcacagcccggcgctaagagacccagcaactaccctgaatcctactttcagagggtgcccataaatgagagctttatatcaatggtgatcggtcggctgcgttccgatgacatctataaccaagtgagcgcctaccctcttcccgagcacagatccaccgccctggcaaaccaggcagccatgctgtatgtgatcttgtattttgagccaagcatcttgcacacccaccaagctaagatgcgggaaatcgtggataagtatttccccgacaactgggtaatatccatatatatgggtatcaccgtcaatctcgtggatgcttgggaaccttacaaagcggctaaaacagctttgaacaacacactggatctgagtaatgtccgcgaacaggccagcaggtacgccacggtcagtgaacgcgtacacgcccaggtccaacaatttctgaaggagggttatttgcgggaggagatggtgcttgacaacattcctaagctattaaactgtctgcgcgattgcaacgtagccatccgatggctcatgcttcacacagccgatagcgcatgtgatccaaacaacaagcggctacggcagattaaagaccagattctcacagattctcgctacaatccacgtatcctgttccaattgttgttggacacagcccaatttgaattcatcctgaaagagatgttcaaacagatgttgtctgaaaagcagacgaaatgggaacactataaaaaggaaggatccgaacgcatgactgaattggctgatgtgttctctggtgtaaagccgctgacccgcgtcgaaaaaaatgaaaatctgcaggcgtggtttcgggaaatctcaaaacagatcctcagtctgaactatgatgattccaccgcagccgggaggaaaaccgtccagctgatccaggctctggaagaggtgcaggagttccaccagctggagtctaatctacaagtctgccagttccttgccgatacccggaagtttctacatcaaatgatccgcacgattaacatcaaggaagaggtcctgattaccatgcagatagtgggcgacctgtcatttgcatggcagcttattgactccttcacttcgattatgcaggagtctatccgagtgaatcctagtatggtcaccaaactccgcgccactttcctcaagctggcctcggccctggatctcccactgctgcggatcaaccaagccaactctccagatctcctgtctgtgtcacagtactattcgggagagctggtgtcctatgtccggaaggtcctgcagattattccagaaagcatgttcactagccttctaaagattattaaactgcagacacatgatatcattgaggtgcccacgcggcttgataaagataaactccgcgattatgcgcagctcggacctcgctatgaagtggcgaagctgacccacgccatctcaattttcaccgaggggattctaatgatgaaaacgaccctggtagggatcataaaagtcgaccccaaacagctgctcgaggacggaattaggaaggaactcgtcaagagggttgccttcgccttgcacagggggctgatctttaaccctagagccaagcccagtgagctgatgccgaaactgaaggagctcggcgccactatggacggcttccataggtctttcgagtacatacaagactacgtaaatatctatggcttgaagatttggcaggaggaggtgagcagaatcatcaactacaacgtcgagcaggagtgtaataatttccttcgtactaagatacaggattggcagtccatgtaccagtccacccacatacctatcccaaagtttaccccagtagacgaatcagtgactttcatcgggcgcctgtgcagagaaatattgcgcatcaccgatcctaaaatgacttgtcacatcgatcagcttaacacctggtatgatatgaaaacacaccaagaggtgacctcctctaggctattttctgagattcagacaaccctcggcacatttggcctaaacggattagaccgtttattgtgcttcatgatcgtcaaagaactccagaacttccttagcatgtttcagaagatcattcttcgcgatagaacagtgcaggacacactgaaaaccctgatgaacgccgtcagcccccttaagtctattgtggccaacagcaataagatttacttcagcgcaatcgcgaaaactcaaaaaatctggactgcctatctcgaggccatcatgaaggtggggcagatgcagatacttcggcagcagatagccaacgaactgaactattcctgcagattcgatagcaagcatctcgcggccgccctggagaacttgaataaagcgcttctcgctgacatcgaggcacactaccaggatcccagcctgccctatccgaaagaggacaataccctgctgtatgaaatcaccgcatatcttgaagcagcaggcatccataatccactaaataaaatctacatcaccacaaaacgtctgccctacttccccattgtgaatttcctgttcctgatcgcccagctgcctaaattgcagtacaacaagaatcttgggatggtctgccgaaaaccaactgatcccgtggactggcctcctctggtgttgggcctgttaacattgctgaaacagttccacagtagatacactgagcaatttttagccttgatcggccagttcatctgctccactgtggaacaatgtactagccaaaagattccggaaatcccagccgacgtagtaggcgcattactgtttctggaagactacgttagatacacgaagctcccacgcagagtggccgaagcacacgtgccgaatttcatttttgacgagttcagaaccgtcttgtag

SEQ ID NO: 182593 - DNA, 3480 bp, Artificial Sequence
  derived and/or modified sequence
atgctggacttcctggccgagaacaacctgtgtggccaggccatcctgcgcatcgtgtcctgtggaaatgccatcatcgccgagctgctgcggctgtctgagttcatcccagctgtgttccggctgaaggacagagctgaccagcagaagtatggagacatcatctttgacttctcctacttcaagggccctgagctgtgggagagcaagctggatgccaagccagagctgcaggacctggatgaggagttccgggagaacaacattgaaattgtgacccgcttctacctggccttccagagcgtgcacaagtacatcgtggacctgaaccgctacctggatgacctgaatgaaggagtgtacatccagcagaccctggagaccgtgctgctgaatgaagatggcaagcagctgctgtgtgaggccctgtacctgtatggagtgatgctgctggtgattgaccagaagattgaaggagaggtgcgggagaggatgctggtgtcctactaccgctacagcgctgcccggagcagcgctgacagcaacatggatgacatctgcaagctgctgcggagcacaggctacagcagccagcccggggccaagaggcccagcaactacccagagagctacttccagagggtgcccatcaatgaaagcttcatctccatggtgattggccgcctgcggagtgatgacatctacaaccaggtgtctgcctaccccctgcctgagcacaggagcacagccctggccaaccaggccgccatgctgtatgtgatcctgtactttgagcccagcatcctgcacacccaccaggccaagatgagagaaattgtggacaagtacttcccagacaactgggtgatcagcatctacatgggcatcaccgtgaacctggtggatgcctgggagccctacaaggccgccaagacagccctgaacaacaccctggacctgagcaatgtgcgggagcaggccagccgctatgccaccgtgtctgagcgggtgcacgcccaggtgcagcagttcctgaaggagggctacctgcgggaggagatggtgctggacaacatccccaagctgctgaactgcctgcgggactgcaatgtggccatccgctggctgatgctgcacacagctgacagcgcctgtgaccccaacaacaagaggctgcggcagatcaaggaccagatcctgacagacagccgctacaacccccgcatcctcttccagctgctgctggacacagcccagtttgagttcatcctgaaggagatgttcaagcagatgctgtctgagaagcagaccaagtgggagcactacaagaaggagggcagcgagaggatgacagagctggctgatgtgttcagcggcgtgaagcccctgaccagggtggagaagaatgaaaacctgcaggcctggttccgggagatcagcaagcagatcctgagcctgaactatgatgacagcacagctgctggcaggaagacagtgcagctgatccaggccctggaggaggtgcaggagttccaccagctggagagcaacctgcaggtgtgccagttcctggccgacaccaggaagttcctgcaccagatgatccgcaccatcaacatcaaggaggaggtgctgatcaccatgcagatcgtgggggacctgagctttgcctggcagctgattgacagcttcaccagcatcatgcaggagagcatccgggtgaaccccagcatggtgaccaagctgcgggccaccttcctgaagctggccagcgccctggacctgcccctgctgcgcatcaaccaggccaacagcccagacctgctgtctgtgtcccagtactacagcggggagctggtgtcctatgtgaggaaggtgctgcagatcatccctgagagcatgttcaccagcctgctgaagatcatcaagctgcagacccatgacatcatcgaggtgcccacccggctggacaaggacaagctgcgggactatgcccagctgggccccaggtatgaggtggccaagctgacccacgccatcagcatcttcacagagggcatcctgatgatgaagaccaccctggtgggcatcatcaaggtggaccccaagcagctgctggaggatggcatcaggaaggagctggtgaagagggtggcctttgccctgcaccggggcctcatcttcaacccccgggccaagcccagcgagctgatgcccaagctgaaggagctgggcgccaccatggatggcttccacaggagctttgagtacatccaggactatgtgaacatctacggcctgaagatctggcaggaggaggtgagccgcatcatcaactacaacgtggagcaggagtgcaacaacttcctgcggaccaagatccaggactggcagagcatgtaccagagcacccacatccccatccccaagttcacccctgtggatgaatctgtgaccttcatcggccgcctgtgccgggagatcctgcgcatcacagaccccaagatgacctgccacatcgaccagctgaacacctggtatgacatgaagacccaccaggaggtgaccagcagccgcctcttcagcgagatccagaccaccctgggcaccttcggcctgaatggcctggaccggctgctgtgcttcatgattgtgaaggagctgcagaacttcctgtccatgttccagaagatcatcctgcgggacagaacagtgcaggacaccctgaagaccctgatgaatgctgtgagccccctgaagagcatcgtggccaacagcaacaagatctacttcagcgccatcgccaagacccagaagatctggacagcctacctggaggccatcatgaaggtgggccagatgcagatcctgcggcagcagatcgccaatgagctgaactacagctgccgctttgacagcaagcacctggccgccgccctggagaacctgaacaaggccctgctggccgacatcgaggcccactaccaggaccccagcctgccctaccccaaggaggacaacaccctgctgtatgagatcacagcctacctggaggccgccggcatccacaaccccctgaacaagatctacatcaccaccaagaggctgccctacttccccatcgtgaacttcctgttcctgattgcccagctgcccaagctgcagtacaacaagaacctgggcatggtgtgcaggaagcccacagatcctgtggactggccacccctggtgctgggcctgctgaccctgctgaagcagttccacagccgctacacagagcagttcctggccctgattggccagttcatctgcagcacagtggagcagtgcaccagccagaagatccctgagatcccagcagatgtggtgggcgccctgctcttcctggaggactatgtgcgctacaccaagctgccccggcgggtggccgaggcccacgtgcccaacttcatctttgatgagttcagaacagtgctgtag

SEQ ID NO: 182594 - DNA, 3480 bp, Artificial Sequence
  derived and/or modified sequence
atgctggacttcctggccgagaacaacctgtgcggccaggccatcctccggatcgtcagctgcggcaatgctattattgccgagctcctgagactgagcgagttcattccagccgttttcagactgaaggatagagcagaccaacagaagtacggggatattatctttgacttttcttatttcaaggggccagaactctgggaaagcaagctagatgctaaaccagagctgcaagatcttgatgaggaattccgagagaataacatcgagattgtgacacggttctatctggcttttcagtccgtgcataaatatattgtcgacctcaatcgttaccttgatgacttaaacgagggtgtctacatccaacagactctcgagaccgtcctcctaaacgaggacggaaaacagctgctctgtgaagctctgtacctgtacggggttatgttactcgtgattgaccagaaaatagaaggtgaagtgcgggaacggatgctggtctcctactataggtacagcgctgcaaggtcttcggctgactctaacatggatgacatttgtaaactgctgagaagcaccggatacagttcgcagcctggagcgaaaaggccatcaaattaccctgagagttattttcagcgcgtacctattaatgagtcgtttatttctatggtaattggccggttaaggtcagacgacatctataatcaggtgagtgcgtatcccttgcccgagcatcgatccactgcactggccaaccaggcagctatgctctacgtaatcctgtattttgagccctcaattctgcatactcaccaggctaaaatgcgagaaattgttgacaagtactttccagacaactgggtgatcagcatttacatgggaattacagtgaatctcgttgatgcttgggaaccctataaagcggccaaaacggctctgaataacaccctcgacttgagcaacgtgcgggagcaggcttccagatacgcaacggtctccgaaagagtacacgctcaggtgcagcagtttttgaaggagggttatctacgcgaggaaatggtgctggacaacatccctaagctactgaattgtctgcgggactgtaatgtagcgatacgctggcttatgctccataccgctgactcagcctgcgacccaaataataagcggctgcggcagatcaaggatcaaatcctgaccgattcacgctacaaccctcgcatcctgtttcagctcctgcttgacaccgctcagttcgagtttatcctgaaagagatgtttaaacagatgctgtctgaaaaacagaccaagtgggagcattataaaaaggagggctctgaacgcatgacagagctggctgacgtgttctccggggtgaagccgcttacccgggtggagaaaaacgagaacctgcaggcatggttccgcgagatctccaaacagattctgagcctgaactacgacgactctaccgccgcaggtagaaagaccgtccagttgatccaagctttggaggaggtgcaggaatttcaccagttagagtctaatctgcaggtgtgtcaatttttggctgacactcggaaattcctgcatcagatgattagaacaatcaacattaaggaggaagttctcattactatgcaaattgttggcgacctttcctttgcctggcaactcattgactcttttaccagcattatgcaggaatcgattagagtgaatccttccatggtaacgaaattgcgagccacctttctcaaattagcgtcagccttagacttgcctctcttgcggatcaaccaggcaaattcccccgacctcctctctgtctctcaatactactccggcgagctggtttcttatgttcgtaaggtgctccagatcattcctgagtcgatgtttacatctcttctgaaaataatcaagttacaaacgcacgatattatcgaggtgcctactcgcttagataaggataagctgagagattacgcccagctcggcccccggtatgaggtggctaagctgactcacgccatatccatatttactgaaggtatactgatgatgaaaacaactctcgtggggatcatcaaggtggatcccaaacaactcttagaagatggcatccggaaagagctggtgaagagagttgccttcgcattgcaccgtggactgatttttaatccacgggccaaacctagtgaactgatgccaaagctgaaggagctgggtgccacaatggacggctttcacaggagtttcgagtacatccaggattatgttaatatttatggcctgaaaatttggcaggaagaagtgtctaggataattaactataacgtggagcaggagtgtaataatttcctgcgcacgaagattcaggactggcaatctatgtatcaatccacacacatccctatccctaagttcacccctgtcgatgagtcggtgactttcataggcagactatgtcgcgagatccttcggatcactgatccaaaaatgacctgtcacatcgaccagttgaatacttggtatgacatgaaaactcatcaggaagtgacctcgagtcgactcttcagtgagatccagacaaccctgggcacctttggtctaaatggcctcgatcggctcctatgtttcatgatcgtgaaggaattgcagaatttcctgtcaatgtttcagaagattatcctaagggatagaaccgtgcaagacaccctcaagacccttatgaacgcagtctctccccttaaaagtatcgtggcgaattccaataagatttacttcagcgcaatcgccaaaacccagaagatttggaccgcttatctcgaagccattatgaaagtcgggcagatgcagatcttacgccagcaaatcgctaatgaactgaactacagttgccggttcgacagcaaacaccttgcagctgccctcgaaaatttaaacaaggctctgctcgctgatatcgaagcacactatcaagatcctagcctcccctatccaaaggaagataacaccctcctatacgagatcaccgcctaccttgaagctgctggcattcataacccacttaacaagatttatattaccactaaaaggctcccttattttccaatcgttaactttttattcttaattgctcaactccctaagcttcagtataacaagaatctgggtatggtatgcagaaaacccaccgatcctgtggactggccccccctggtgctgggcctgctgaccttgctgaaacagttccactcacgctacaccgaacagtttctcgcactgatcggccagtttatttgctcgacggtggagcagtgcacatcccagaaaatccccgagatccctgccgacgtggtcggagccttacttttcctggaagactatgttcgatacacaaagctcccacgtcgggtagcggaagcacacgtgccgaatttcatattcgacgaatttcgtacggtcctttag

SEQ ID NO: 182595 - DNA, 3480 bp, Artificial Sequence
  derived and/or modified sequence
atgttggattttctggccgagaacaacttgtgtggacaagccatcctcagaatcgtttcttgtggtaatgctataattgcagagctcctccgactgtctgaatttatccccgctgtgtttcgattgaaggatcgggctgaccagcagaagtacggcgacattatatttgacttcagctatttcaaaggacctgagctctgggagagtaaactggacgctaagccagaacttcaagatctggatgaggagttccgcgagaacaacattgaaatcgtgacaagattttacttggctttccaatctgttcacaaatacatcgttgatctgaacagatatctggacgatctgaacgagggagtgtatattcagcaaacccttgagactgttctgttgaacgaagacggtaagcagttactctgtgaggcactgtacctgtacggtgtgatgcttttagtgatcgatcaaaagatcgaaggtgaagtgagagaaagaatgttagtgtcttactacaggtactcggccgctagatcgtcagctgactcgaatatggacgatatttgtaagctcctgcgctctactggttactccagccaaccaggggctaagcgcccttccaactaccccgaaagctattttcagcgcgttccaattaacgagtcattcataagtatggtaatcggacgtctcaggtctgatgacatatataaccaagtctccgcataccctttaccggagcacaggtcaacagcacttgctaatcaggccgctatgttgtatgtgattttatacttcgagcctagcattctacacacccatcaggccaagatgagggaaattgtcgacaaatacttccccgataattgggtgatctccatttacatgggaattacagtcaatctggttgatgcttgggagccctacaaggctgccaaaacagcattaaacaacacactggacctatccaatgttcgcgagcaagcatctaggtacgcaactgtaagtgaaagagttcatgcccaggtgcagcaatttctcaaagagggatacctcagagaagaaatggtgctggataacatccccaagctgttaaattgtctcagggattgcaatgtggctatccgctggctgatgttacatacagctgattctgcctgtgatcctaataacaagaggctacgccagataaaagatcagatcctgaccgatagcaggtacaatcctcgcatcttgttccagctcctgcttgacacagcgcaatttgaattcattttgaaagaaatgttcaagcagatgttgtcagaaaaacagacaaagtgggagcattacaagaaagagggatccgaacgcatgaccgagctggccgatgtgtttagtggtgtcaaaccgctgacacgtgtagagaagaatgagaatctccaagcctggttccgcgagatatctaagcagatcttaagtttaaattatgacgattcaacagctgcaggacgcaagaccgtgcagttgatccaggctctggaggaggttcaggagttccatcagctggagtcaaaccttcaggtgtgccagttcctcgccgacacaaggaagtttctccatcagatgatcagaactatcaatatcaaggaagaggtgttgattaccatgcagatcgttggagacctttctttcgcgtggcagctgatagacagctttacttccataatgcaggaatcaattcgagtgaatccaagtatggtcacaaaacttcgcgctacattcttaaaactagccagtgcattggacctcccactacttcggattaatcaggcaaactctcccgacctcctgagcgtcagccaatattattctggagagctcgtgagctacgtgaggaaggtgctgcagattattccggagtccatgtttacttccctccttaagatcattaagttgcagacacatgacatcattgaggtgcctaccaggctggacaaagataagctgcgtgactacgcccagctcggccctaggtacgaggtggctaaactgacacacgccatcagcatctttactgaggggatcctgatgatgaaaaccactttggttgggattattaaagtggatccgaagcagctgctcgaagatgggatcagaaaagagctggtgaaacgggtggcctttgctttgcacagaggactcatcttcaaccctcgcgctaaaccaagcgaactcatgcccaaactgaaggagctgggcgcaactatggacgggtttcatcggtcatttgagtatatccaggactacgtgaacatatacggtttgaagatttggcaggaagaggtttcccgtattataaattacaacgtagaacaggaatgcaataattttctgcgcaccaaaatccaagattggcagtcgatgtaccagtctacgcatataccgattccgaaattcacccctgtggatgagtctgtcacttttatcggccgtctttgtagagaaattctgcggatcaccgacccaaagatgacatgtcacattgaccagctcaacacatggtacgatatgaagacacaccaggaagtcacttcatcacggctcttttcggaaattcagaccaccctgggaacgttcggcctcaatggtctggaccgcctactgtgcttcatgatcgtaaaggaattacagaatttcctatcaatgttccaaaaaataattctcagagatcgcaccgtgcaggacactctgaaaacgttgatgaacgcggtgtcgccattgaaaagtattgtggctaatagtaacaaaatctacttctctgccatcgcaaagacacagaagatttggacagcttacctggaggctattatgaaagtgggacagatgcagatcctgcggcaacagatcgccaacgagttgaattactcttgtcgatttgactccaagcatctcgccgctgccttagaaaatttgaataaagctttgcttgcagatatcgaggctcattaccaggacccatctctgccctaccccaaggaagacaacaccctcctgtatgaaattacagcgtatctcgaagcggctgggatccacaacccactaaacaagatctatattacgacgaaaagactgccctatttccctattgtaaatttcctgttcttaatcgcccagctcccaaaactccagtacaataaaaatttgggtatggtctgccgtaagcccaccgaccccgtggactggcctcctctggtattaggacttctcaccttactgaagcagtttcactcaagatatactgaacaatttctggctctgataggccagtttatctgcagtacggttgagcagtgcacctcacaaaaaataccagagattcctgccgatgtcgttggcgcactgctctttttggaagactacgtccggtataccaagctgcccaggcgagtcgcggaagcacatgttccaaactttatttttgacgagttccggacggtactctag

SEQ ID NO: 182596 - DNA, 4187 bp, Artificial Sequence
  derived and/or modified sequence
agccgtcgccggcgagtggtcacatgatgcccctccctgctcccagccgcttcggtcatgtgaccgcctggggagtcaggggcggaagtcggggtctgacccgctccaggtccgggactgcggatagaagaggaccgccgccttgagggaggggtggaaactgggtgccggctccgcgcgcgacctccggccctgcgcgtgcgccgtggcgcggcccggctgacaggttctttaatggaggagccaatctctctgcacacctggtttcatctaataatatacagacaccagctctgaggccagttaatcatccccagtgtccaggcacagagtagtcggtccgcctcacaatgttggactttctagccgagaacaacctctgtggccaagcaatcctaaggattgtttcctgtggtaatgccatcattgctgaacttttgagactctctgagtttattcctgctgtgttcaggttaaaagacagagctgatcaacagaaatatggagatatcatatttgatttcagctattttaagggtccagaattatgggaaagcaaactggatgctaagccagagctacaggatttagatgaagaatttcgtgaaaacaacatagaaattgtgaccagattttatttagcatttcaaagtgtacataaatatattgtagacttaaacagatatctagatgatctcaatgaaggggtttatattcagcaaaccttagaaactgtgcttctcaatgaagatggaaaacaacttctatgtgaagcactgtacttatatggagttatgctactggtcattgaccaaaagattgaaggagaagtcagagagaggatgctggtttcttactaccgatacagtgctgctcgatcttctgctgattcaaatatggacgatatttgtaagctgcttcgaagtacaggttattctagccaaccaggtgccaaaagaccatccaactatcccgagagctatttccagagagtgcctatcaacgaatccttcatcagtatggtcattggtcgactgagatctgatgatatttacaaccaggtctcagcgtatcctttgccggagcatcgcagcacagccctggcaaaccaagctgccatgctgtacgtgattctctactttgagccttccatccttcacacccatcaagcaaaaatgagagagatagtggataaatactttccagataattgggtaattagtatttacatggggatcacagttaatctagtagatgcttgggaaccttacaaagctgcaaaaactgctttaaataataccctggacctttcaaatgtcagagaacaggcaagcagatatgctactgtcagtgaaagagtgcatgctcaagtgcagcaatttctaaaagaaggttatttaagggaggagatggttctggacaatatcccaaagcttctgaactgcctgagagactgcaatgttgccatccgatggctgatgcttcatacagcagactcagcctgtgacccaaacaacaaacgccttcgtcaaatcaaggaccagattctaacagactctcggtacaatcccaggatcctcttccagctgctgttagatactgcacaatttgagtttatactcaaagagatgttcaagcaaatgctttcagaaaagcaaaccaaatgggagcattacaagaaagagggttcggagcggatgactgagcttgctgatgtcttttcaggagtgaaacccctaaccagagtggagaaaaatgaaaaccttcaagcttggttcagagagatctcaaaacaaatattgtctttaaattatgatgattctactgctgcgggcagaaaaactgtacaactgatacaagctttggaagaggttcaagaattccaccagttggaatccaatctgcaagtatgtcagtttcttgccgatactcgaaagtttcttcatcaaatgatcagaaccattaacattaaagaggaggttctgatcacaatgcagatcgttggggacctttctttcgcttggcagttgattgacagtttcacatccatcatgcaagaaagcataagggtaaatccatccatggttactaaactcagagctaccttcctaaagcttgcctctgccctcgatctgccccttcttcgtattaatcaggcaaatagccccgacctgctcagcgtgtcacagtactattctggagagttggtatcctatgtgagaaaagttttgcagatcatcccagaaagcatgtttacatctcttctaaagatcataaagcttcagacccacgacattattgaagtgcctacccgcctggacaaagacaagctgagggactatgctcagctaggcccacgatacgaggttgccaagcttactcatgctatttccatttttactgaaggcatcttaatgatgaaaacgactttggttggcatcatcaaggtggatccaaagcagttgctggaagatggaataaggaaagagcttgtgaagcgcgttgcctttgccctgcataggggactgatattcaaccctcgagccaagccaagtgaattgatgcccaagctgaaagagttgggagcgaccatggatggattccatcgttcttttgaatacatacaggactatgtcaacatttatggtctgaagatttggcaggaagaagtatctcgtatcataaattacaacgtggagcaagagtgtaataactttctaagaacgaagattcaagattggcaaagcatgtaccagtccactcatattccaatacccaagtttacccctgtggatgagtctgtaacgtttattggtcgactctgcagagaaatcctgcggatcacagacccaaaaatgacatgtcacatagaccagctgaacacttggtatgatatgaaaactcatcaggaagtgaccagcagccgcctcttctcagaaatccagaccaccttgggaacctttggtctaaatggcttagacaggcttctgtgctttatgattgtaaaagagttacagaatttcctcagtatgtttcagaaaattatcctgagagacagaactgttcaggacactttaaaaaccctcatgaatgctgtcagtcccctaaaaagtattgtcgcaaattcaaataaaatttatttttccgccattgccaaaacacagaagatttggactgcgtatctcgaggctataatgaaggttgggcagatgcagattctgagacaacagattgccaatgaattaaattattcttgtcggtttgattctaaacatctggcagctgctctggagaatctcaataaggctctcctagcagacattgaagcccactatcaggacccttcacttccttaccccaaagaagataacacacttttatatgaaatcacagcctatctggaggcagctggcattcacaacccactgaataagatatacataacaacaaagcgcttaccctattttccaattgtaaactttctatttttgatcgctcagttgccaaaacttcaatacaacaaaaatctgggaatggtctgccgaaaaccgaccgacccggttgattggccaccacttgtcctgggactgctcactctgctgaagcagttccattcccggtacaccgagcagttcctggcgctgattggccagtttatctgctccacggtggagcagtgtacaagccagaagatacctgaaattcctgcagatgttgtgggtgcccttctgttcctggaggattatgttcggtacacaaagctacccaggagggttgctgaagcacatgtgcctaatttcatttttgatgagttcagaacagtgctgtaactgtttttcctacttcttcaatggaaggattgtccttagatcttcccaccatcacaaatgaatttgaagatgaaaagaaactcagttgctcatacaactgcattttttctgtctattatgggaaacatcagacgttctgagtaagatatatctcatggcattagttaatataactgatattgtttaaatcatggtattacatgcaatttatatcagataaaagcagaacacatttttgtactgcctctcttaaatgctgaatgtaactgttatgtataaatccatttagttttatgttctaaagaactatttgtgcaactccagattttcagtaaaatagtattactagtacccaaa

SEQ ID NO: 182597 - DNA, 3480 bp, Artificial Sequence
  derived and/or modified sequence
atgctggacttcctggccgagaacaacctgtgcggccaggccatcctgagaatcgtgagctgcggcaacgccatcatcgccgagctgctgagactgagcgagttcatccccgccgtgttcagactgaaggacagagccgaccagcagaagtacggcgacatcatcttcgacttcagctacttcaagggccccgagctgtgggagagcaagctggacgccaagcccgagctgcaggacctggacgaggagttcagagagaacaacatcgagatcgtgaccagattctacctggccttccagagcgtgcacaagtacatcgtggacctgaacagatacctggacgacctgaacgagggcgtgtacatccagcagaccctggagaccgtgctgctgaacgaggacggcaagcagctgctgtgcgaggccctgtacctgtacggcgtgatgctgctggtgatcgaccagaagatcgagggcgaggtgagagagagaatgctggtgagctactacagatacagcgccgccagaagcagcgccgacagcaacatggacgacatctgcaagctgctgagaagcaccggctacagcagccagcccggcgccaagagacccagcaactaccccgagagctacttccagagagtgcccatcaacgagagcttcatcagcatggtgatcggcagactgagaagcgacgacatctacaaccaggtgagcgcctaccccctgcccgagcacagaagcaccgccctggccaaccaggccgccatgctgtacgtgatcctgtacttcgagcccagcatcctgcacacccaccaggccaagatgagagagatcgtggacaagtacttccccgacaactgggtgatcagcatctacatgggcatcaccgtgaacctggtggacgcctgggagccctacaaggccgccaagaccgccctgaacaacaccctggacctgagcaacgtgagagagcaggccagcagatacgccaccgtgagcgagagagtgcacgcccaggtgcagcagttcctgaaggagggctacctgagagaggagatggtgctggacaacatccccaagctgctgaactgcctgagagactgcaacgtggccatcagatggctgatgctgcacaccgccgacagcgcctgcgaccccaacaacaagagactgagacagatcaaggaccagatcctgaccgacagcagatacaaccccagaatcctgttccagctgctgctggacaccgcccagttcgagttcatcctgaaggagatgttcaagcagatgctgagcgagaagcagaccaagtgggagcactacaagaaggagggcagcgagagaatgaccgagctggccgacgtgttcagcggcgtgaagcccctgaccagagtggagaagaacgagaacctgcaggcctggttcagagagatcagcaagcagatcctgagcctgaactacgacgacagcaccgccgccggcagaaagaccgtgcagctgatccaggccctggaggaggtgcaggagttccaccagctggagagcaacctgcaggtgtgccagttcctggccgacaccagaaagttcctgcaccagatgatcagaaccatcaacatcaaggaggaggtgctgatcaccatgcagatcgtgggcgacctgagcttcgcctggcagctgatcgacagcttcaccagcatcatgcaggagagcatcagagtgaaccccagcatggtgaccaagctgagagccaccttcctgaagctggccagcgccctggacctgcccctgctgagaatcaaccaggccaacagccccgacctgctgagcgtgagccagtactacagcggcgagctggtgagctacgtgagaaaggtgctgcagatcatccccgagagcatgttcaccagcctgctgaagatcatcaagctgcagacccacgacatcatcgaggtgcccaccagactggacaaggacaagctgagagactacgcccagctgggccccagatacgaggtggccaagctgacccacgccatcagcatcttcaccgagggcatcctgatgatgaagaccaccctggtgggcatcatcaaggtggaccccaagcagctgctggaggacggcatcagaaaggagctggtgaagagagtggccttcgccctgcacagaggcctgatcttcaaccccagagccaagcccagcgagctgatgcccaagctgaaggagctgggcgccaccatggacggcttccacagaagcttcgagtacatccaggactacgtgaacatctacggcctgaagatctggcaggaggaggtgagcagaatcatcaactacaacgtggagcaggagtgcaacaacttcctgagaaccaagatccaggactggcagagcatgtaccagagcacccacatccccatccccaagttcacccccgtggacgagagcgtgaccttcatcggcagactgtgcagagagatcctgagaatcaccgaccccaagatgacctgccacatcgaccagctgaacacctggtacgacatgaagacccaccaggaggtgaccagcagcagactgttcagcgagatccagaccaccctgggcaccttcggcctgaacggcctggacagactgctgtgcttcatgatcgtgaaggagctgcagaacttcctgagcatgttccagaagatcatcctgagagacagaaccgtgcaggacaccctgaagaccctgatgaacgccgtgagccccctgaagagcatcgtggccaacagcaacaagatctacttcagcgccatcgccaagacccagaagatctggaccgcctacctggaggccatcatgaaggtgggccagatgcagatcctgagacagcagatcgccaacgagctgaactacagctgcagattcgacagcaagcacctggccgccgccctggagaacctgaacaaggccctgctggccgacatcgaggcccactaccaggaccccagcctgccctaccccaaggaggacaacaccctgctgtacgagatcaccgcctacctggaggccgccggcatccacaaccccctgaacaagatctacatcaccaccaagagactgccctacttccccatcgtgaacttcctgttcctgatcgcccagctgcccaagctgcagtacaacaagaacctgggcatggtgtgcagaaagcccaccgaccccgtggactggccccccctggtgctgggcctgctgaccctgctgaagcagttccacagcagatacaccgagcagttcctggccctgatcggccagttcatctgcagcaccgtggagcagtgcaccagccagaagatccccgagatccccgccgacgtggtgggcgccctgctgttcctggaggactacgtgagatacaccaagctgcccagaagagtggccgaggcccacgtgcccaacttcatcttcgacgagttcagaaccgtgctgtag

SEQ ID NO: 182598 - protein, 683 aa, Artificial Sequence
  derived and/or modified sequence
MDDYKYQDNYGGYAPSDGYYRGNESNPEEDAQSDVTEGHDEEDEIYEGEYQGIPHPDDVKAKQAKMAPSRMDSLRGQTDLMAERLEDEEQLAHQYETIMDECGHGRFQWILFFVLGLALMADGVEVFVVSFALPSAEKDMCLSSSKKGMLGMIVYLGMMAGAFILGGLADKLGRKRVLSMSLAVNASFASLSSFVQGYGAFLFCRLISGIGIGGALPIVFAYFSEFLSREKRGEHLSWLGIFWMTGGLYASAMAWSIIPHYGWGFSMGTNYHFHSWRVFVIVCALPCTVSMVALKFMPESPRFLLEMGKHDEAWMILKQVHDTNMRAKGTPEKVFTVSNIKTPKQMDEFIEIQSSTGTWYQRWLVRFKTIFKQVWDNALYCVMGPYRMNTLILAVVWFAMAFSYYGLTVWFPDMIRYFQDEEYKSKMKVFFGEHVYGATINFTMENQIHQHGKLVNDKFTRMYFKHVLFEDTFFDECYFEDVTSTDTYFKNCTIESTIFYNTDLYEHKFINCRFINSTFLEQKEGCHMDLEQDNDFLIYLVSFLGSLSVLPGNIISALLMDRIGRLKMIGGSMLISAVCCFFLFFGNSESAMIGWQCLFCGTSIAAWNALDVITVELYPTNQRATAFGILNGLCKFGAILGNTIFASFVGITKVVPILLAAASLVGGGLIALRLPETREQVLM

SEQ ID NO: 182599 - protein, 532 aa, Artificial Sequence
  derived and/or modified sequence
MIVYLGMMAGAFILGGLADKLGRKRVLSMSLAVNASFASLSSFVQGYGAFLFCRLISGIGIGGALPIVFAYFSEFLSREKRGEHLSWLGIFWMTGGLYASAMAWSIIPHYGWGFSMGTNYHFHSWRVFVIVCALPCTVSMVALKFMPESPRFLLEMGKHDEAWMILKQVHDTNMRAKGTPEKVFTVSNIKTPKQMDEFIEIQSSTGTWYQRWLVRFKTIFKQVWDNALYCVMGPYRMNTLILAVVWFAMAFSYYGLTVWFPDMIRYFQDEEYKSKMKVFFGEHVYGATINFTMENQIHQHGKLVNDKFTRMYFKHVLFEDTFFDECYFEDVTSTDTYFKNCTIESTIFYNTDLYEHKFINCRFINSTFLEQKEGCHMDLEQDNDFLIYLVSFLGSLSVLPGNIISALLMDRIGRLKMIGGSMLISAVCCFFLFFGNSESAMIGWQCLFCGTSIAAWNALDVITVELYPTNQRATAFGILNGLCKFGAILGNTIFASFVGITKVVPILLAAASLVGGGLIALRLPETREQVLM

SEQ ID NO: 182600 - DNA, 2052 bp, Artificial Sequence
  derived and/or modified sequence
atggacgactacaagtaccaggacaactacggcggctacgcccccagcgacggctactacagaggcaacgagagcaaccccgaggaggacgcccagagcgacgtgaccgagggccacgacgaggaggacgagatctacgagggcgagtaccagggcatcccccaccccgacgacgtgaaggccaagcaggccaagatggcccccagcagaatggacagcctgagaggccagaccgacctgatggccgagagactggaggacgaggagcagctggcccaccagtacgagaccatcatggacgagtgcggccacggcagattccagtggatcctgttcttcgtgctgggcctggccctgatggccgacggcgtggaggtgttcgtggtgagcttcgccctgcccagcgccgagaaggacatgtgcctgagcagcagcaagaagggcatgctgggcatgatcgtgtacctgggcatgatggccggcgccttcatcctgggcggcctggccgacaagctgggcagaaagagagtgctgagcatgagcctggccgtgaacgccagcttcgccagcctgagcagcttcgtgcagggctacggcgccttcctgttctgcagactgatcagcggcatcggcatcggcggcgccctgcccatcgtgttcgcctacttcagcgagttcctgagcagagagaagagaggcgagcacctgagctggctgggcatcttctggatgaccggcggcctgtacgccagcgccatggcctggagcatcatcccccactacggctggggcttcagcatgggcaccaactaccacttccacagctggagagtgttcgtgatcgtgtgcgccctgccctgcaccgtgagcatggtggccctgaagttcatgcccgagagccccagattcctgctggagatgggcaagcacgacgaggcctggatgatcctgaagcaggtgcacgacaccaacatgagagccaagggcacccccgagaaggtgttcaccgtgagcaacatcaagacccccaagcagatggacgagttcatcgagatccagagcagcaccggcacctggtaccagagatggctggtgagattcaagaccatcttcaagcaggtgtgggacaacgccctgtactgcgtgatgggcccctacagaatgaacaccctgatcctggccgtggtgtggttcgccatggccttcagctactacggcctgaccgtgtggttccccgacatgatcagatacttccaggacgaggagtacaagagcaagatgaaggtgttcttcggcgagcacgtgtacggcgccaccatcaacttcaccatggagaaccagatccaccagcacggcaagctggtgaacgacaagttcaccagaatgtacttcaagcacgtgctgttcgaggacaccttcttcgacgagtgctacttcgaggacgtgaccagcaccgacacctacttcaagaactgcaccatcgagagcaccatcttctacaacaccgacctgtacgagcacaagttcatcaactgcagattcatcaacagcaccttcctggagcagaaggagggctgccacatggacctggagcaggacaacgacttcctgatctacctggtgagcttcctgggcagcctgagcgtgctgcccggcaacatcatcagcgccctgctgatggacagaatcggcagactgaagatgatcggcggcagcatgctgatcagcgccgtgtgctgcttcttcctgttcttcggcaacagcgagagcgccatgatcggctggcagtgcctgttctgcggcaccagcatcgccgcctggaacgccctggacgtgatcaccgtggagctgtaccccaccaaccagagagccaccgccttcggcatcctgaacggcctgtgcaagttcggcgccatcctgggcaacaccatcttcgccagcttcgtgggcatcaccaaggtggtgcccatcctgctggccgccgccagcctggtgggcggcggcctgatcgccctgagactgcccgagaccagagagcaggtgctgatgtag

SEQ ID NO: 182601 - DNA, 1599 bp, Artificial Sequence
  derived and/or modified sequence
atgatcgtgtacctgggcatgatggccggcgccttcatcctgggcggcctggccgacaagctgggcagaaagagagtgctgagcatgagcctggccgtgaacgccagcttcgccagcctgagcagcttcgtgcagggctacggcgccttcctgttctgcagactgatcagcggcatcggcatcggcggcgccctgcccatcgtgttcgcctacttcagcgagttcctgagcagagagaagagaggcgagcacctgagctggctgggcatcttctggatgaccggcggcctgtacgccagcgccatggcctggagcatcatcccccactacggctggggcttcagcatgggcaccaactaccacttccacagctggagagtgttcgtgatcgtgtgcgccctgccctgcaccgtgagcatggtggccctgaagttcatgcccgagagccccagattcctgctggagatgggcaagcacgacgaggcctggatgatcctgaagcaggtgcacgacaccaacatgagagccaagggcacccccgagaaggtgttcaccgtgagcaacatcaagacccccaagcagatggacgagttcatcgagatccagagcagcaccggcacctggtaccagagatggctggtgagattcaagaccatcttcaagcaggtgtgggacaacgccctgtactgcgtgatgggcccctacagaatgaacaccctgatcctggccgtggtgtggttcgccatggccttcagctactacggcctgaccgtgtggttccccgacatgatcagatacttccaggacgaggagtacaagagcaagatgaaggtgttcttcggcgagcacgtgtacggcgccaccatcaacttcaccatggagaaccagatccaccagcacggcaagctggtgaacgacaagttcaccagaatgtacttcaagcacgtgctgttcgaggacaccttcttcgacgagtgctacttcgaggacgtgaccagcaccgacacctacttcaagaactgcaccatcgagagcaccatcttctacaacaccgacctgtacgagcacaagttcatcaactgcagattcatcaacagcaccttcctggagcagaaggagggctgccacatggacctggagcaggacaacgacttcctgatctacctggtgagcttcctgggcagcctgagcgtgctgcccggcaacatcatcagcgccctgctgatggacagaatcggcagactgaagatgatcggcggcagcatgctgatcagcgccgtgtgctgcttcttcctgttcttcggcaacagcgagagcgccatgatcggctggcagtgcctgttctgcggcaccagcatcgccgcctggaacgccctggacgtgatcaccgtggagctgtaccccaccaaccagagagccaccgccttcggcatcctgaacggcctgtgcaagttcggcgccatcctgggcaacaccatcttcgccagcttcgtgggcatcaccaaggtggtgcccatcctgctggccgccgccagcctggtgggcggcggcctgatcgccctgagactgcccgagaccagagagcaggtgctgatgtag

SEQ ID NO: 182602 - DNA, 2052 bp, Artificial Sequence
  derived and/or modified sequence
atggacgattataaatatcaggataactacggagggtatgcccctagcgatggttattataggggcaatgaatccaatccagaggaagacgcgcaatcggatgtgacagaaggccacgatgaggaggatgagatctatgagggagaatatcagggaattccccaccctgatgatgttaaggccaaacaggccaaaatggccccttcccgcatggatagcttgcgtggacagacagatctgatggcagaaagactggaggacgaggagcagctggcccatcagtacgagaccattatggacgagtgtggccacgggagattccagtggattctgtttttcgtcctgggactggctctaatggccgacggggtggaggtttttgtggttagctttgcactcccttccgctgagaaggatatgtgtttgtcgtcatctaaaaaaggaatgctagggatgatcgtgtatcttggcatgatggccggcgctttcattttggggggcctggcagataaactggggcgcaagcgagtcttgtccatgtccctggccgtgaacgcatcttttgcgagtctgagtagctttgtgcaaggatacggggcattccttttctgtcgcctgattagtggaatcggaataggtggcgctctgcctatcgttttcgcatactttagcgagttcctttcccgggagaagcggggcgagcatttgtcctggttgggcatcttttggatgacgggggggctttacgctagtgccatggcatggagtatcattcctcattacggttggggattctccatgggtacaaactaccacttccactcctggagagtcttcgtgatcgtgtgcgctctcccgtgcacagtatctatggtggctctgaaattcatgcccgaaagcccacgatttctcctggagatgggcaagcacgacgaggcatggatgatacttaaacaggtgcatgacaccaatatgcgggccaaaggcactccggagaaggtcttcaccgtctcaaatattaagacccctaaacagatggatgaattcattgagatccaatcatcaacagggacctggtatcaacggtggctagtccggttcaaaactattttcaagcaggtctgggacaatgcactgtactgcgtgatgggaccataccggatgaataccctcatccttgccgtggtgtggttcgccatggccttttcttactacggactgaccgtgtggttccccgatatgattagatacttccaggatgaggagtacaaatcaaagatgaaggtattctttggcgagcacgtgtacggcgccactatcaattttacaatggaaaatcagatccaccaacatggcaaactagtcaacgacaaattcactagaatgtacttcaagcatgttttatttgaagatacattctttgacgaatgttatttcgaagacgtgacttctaccgatacgtatttcaaaaattgtacaatcgagagcacaatcttctataatactgatctctatgaacataaatttatcaactgtcgcttcattaatagcactttcctggagcagaaggagggctgccatatggacttagagcaggataacgacttccttatctatttagtgagcttcctgggcagcctctctgtgctgccagggaacattattagcgctctcctgatggaccgtatcggtcgcttaaagatgatcggcggatctatgctcatcagcgcagtgtgctgtttttttctgtttttcgggaacagtgaatccgcaatgatcgggtggcagtgcctgttttgtgggaccagcatcgcagcatggaacgccctggatgtcataacggtggaactctacccaaccaaccaacgtgccaccgccttcggcatactgaacgggctgtgcaagttcggcgcaattctaggaaacactattttcgcaagtttcgtgggcattactaaagtggtgcccatcctgcttgcggccgcatccctggtaggtggcgggctgattgcattacggctgccggagactcgtgaacaggtgctgatgtag

SEQ ID NO: 182603 - DNA, 2052 bp, Artificial Sequence
  derived and/or modified sequence
atggacgattacaagtaccaggacaactacggtggttacgctccatctgatggctattaccgtggcaatgagtccaatcccgaggaggacgcccagagcgatgttacagaggggcacgatgaagaggacgaaatatatgagggcgagtatcaggggattcctcatcccgacgatgtgaaagctaaacaagccaagatggcaccttcgaggatggatagtctacggggccaaaccgatctcatggccgaaaggctggaggacgaggagcagctggctcatcaatacgagacaatcatggatgagtgtggtcacggaagatttcagtggattcttttcttcgtgttgggtctcgcactgatggccgatggcgtggaagtgttcgtcgtcagtttcgcacttccgtcggccgagaaagatatgtgtctgagctctagcaagaagggtatgcttggaatgatcgtgtatttgggcatgatggcaggcgccttcatcttaggagggctcgcagataaactgggccgaaaacgagtcttgtcaatgtccttggcggtcaatgctagctttgcctctctgtctagcttcgtgcagggatacggtgcattccttttttgccgtctgatttctggtatcggcattgggggtgcactacccattgtgttcgcttacttttccgagtttctaagtcgtgagaagcggggagagcacctctcctggctgggaattttctggatgaccggaggcctgtacgcatctgccatggcatggtctatcatcccccattatgggtggggctttagcatgggtactaactatcactttcattcatggcgtgtctttgttatcgtctgtgccctcccctgcacagtgagcatggtggctctcaagtttatgccagagtcacctcgtttcctgctggagatggggaaacatgatgaagcatggatgatcttgaaacaggtccacgacacaaacatgagggctaaaggcacccccgaaaaagtgttcaccgtctccaacataaagactccgaaacaaatggatgagtttatagagatccagtcgtctaccggtacttggtatcaaaggtggttagtgagattcaaaactatttttaaacaggtctgggacaacgccctgtattgcgtgatgggcccatacaggatgaatacactgatcctggccgtcgtgtggttcgccatggcgttttcctattacggtcttacagtctggttcccggatatgatacgctacttccaggatgaagaatataaaagtaagatgaaagtttttttcggggaacacgtgtacggagctactattaactttacaatggagaatcagatccatcaacatgggaagcttgtcaacgacaagtttactcgcatgtattttaaacatgttctttttgaagacaccttttttgacgaatgctactttgaagacgttacctccacggacacatatttcaaaaattgtaccatcgagagtactatcttctacaatacggacttgtacgaacacaagttcatcaattgccgcttcattaactctacatttcttgagcagaaggaagggtgtcacatggatttggagcaggacaacgacttcctgatttacttggtgtcttttttgggctccttgtccgtgctacccggcaatattatctccgccctgctgatggataggatcggaaggttaaaaatgattggaggctctatgttgattagcgccgtgtgttgtttttttctgttttttggcaattcagaatcagctatgatcggatggcagtgtctcttctgtggaacaagtatcgccgcctggaacgcgctggacgtgattactgttgagctctatccgaccaaccagcgggcgactgccttcggaatcctgaatggcctttgcaaattcggggcaatactgggcaataccatttttgcctcttttgtcggcattaccaaagtggtgccaattctcttagccgccgcttcactcgtgggtggcggactgatcgccctccgcctcccggagaccagagaacaggtgctgatgtag

SEQ ID NO: 182604 - DNA, 1599 bp, Artificial Sequence
  derived and/or modified sequence
atgatagtttatctgggaatgatggccggtgccttcattctaggcggcctcgcagataaacttggacggaaaagagtgctgtctatgtccctggcagtgaatgctagcttcgcgagtctgtcatcatttgtgcagggctatggtgctttccttttctgcagactgataagcgggatcggtatcgggggagctctgcctatcgtctttgcctacttctccgaatttctcagtagggagaaacggggcgaacacctctcctggcttgggatcttctggatgactggcggcctgtacgcttcagcaatggcttggtccatcattccccattatggctggggcttctcgatgggcactaattaccactttcactcctggagggtcttcgtcattgtatgtgcattgccctgtactgtttccatggttgccctgaaatttatgccagaatctccaaggtttctgctggaaatggggaaacacgatgaagcctggatgatactgaagcaggtccacgacacgaatatgagagccaagggcaccccagagaaggtatttacagtgtctaatatcaagactccaaagcagatggacgaatttatagaaatacagtcctcgacaggtacttggtaccagagatggctcgtgcggttcaaaaccattttcaagcaggtatgggacaacgcactgtactgcgtaatggggccttacagaatgaataccttgatcctggccgtggtatggttcgccatggctttttcctattacgggctaaccgtgtggtttcccgacatgattcgatattttcaagatgaggaatacaaatctaagatgaaggtattttttggagaacatgtttacggggcaaccataaacttcactatggagaatcagattcatcaacacgggaagctggtgaatgacaagtttactcggatgtatttcaagcatgttctgtttgaagatactttttttgacgaatgctacttcgaggatgtgacttcaacagatacgtattttaagaactgtacgatcgaatccactattttctataatacagatctgtacgagcataagtttattaattgtagatttattaacagcactttcctggagcagaaggaggggtgtcacatggacttggaacaggacaatgactttctaatatatctcgtgtctttcttgggaagtctgagcgtcctgccgggcaacatcattagcgcccttctgatggatcggatcgggcgacttaaaatgatcggcgggtctatgctgatctccgccgtatgctgctttttcctcttcttcggcaacagcgaatccgctatgattggctggcagtgtctcttctgtggaactagcattgctgcttggaacgcgcttgacgtcatcaccgtggagctctaccccactaaccaacgggccacagcattcggtatcttgaacggactgtgcaagttcggggctatcctggggaataccatctttgcctccttcgtgggcattaccaaggttgtccccatccttctcgcagctgcaagcctggtgggcggcggtttaattgctctgagactgccggaaacacgtgagcaagtgctcatgtag

SEQ ID NO: 182605 - DNA, 2052 bp, Artificial Sequence
  derived and/or modified sequence
atggatgattacaagtatcaagataactatgggggatacgctcctagtgacggatattatcggggaaatgagtccaacccagaagaggacgcacagtccgacgttacagaggggcacgatgaagaggacgaaatttacgagggggaatatcaggggattccccacccggacgatgtcaaggccaagcaggctaagatggcaccaagcagaatggactcccttcgaggtcaaaccgatctgatggcagaacgactggaagacgaagagcagctggcccaccagtatgagaccatcatggacgaatgcgggcatggacgtttccagtggatactgttcttcgtgctggggctcgctctgatggccgatggggtggaagtctttgtggtgtcgtttgcactgcctagcgccgaaaaagacatgtgcctgtcttccagcaagaaggggatgctgggtatgattgtgtacctgggaatgatggcaggcgccttcattctgggtggtctcgcagataaactgggccgcaagagggtgctgagcatgagccttgccgtgaatgcatcatttgcatccctgtcctcgttcgtgcaaggctacggggcctttttgttctgccgcctgatctccggaatcggaattgggggtgctctgcctatcgtgtttgcttactttagtgaattcctttcccgggagaagcggggagagcacctgagttggctcggcattttctggatgacgggtggactctacgcttctgctatggcctggagcataatccctcattatggctggggcttctccatggggaccaactaccattttcacagttggagggtgtttgtgatcgtttgcgcgttaccctgcacggtcagtatggtcgcactaaagtttatgcctgagtctccccggttcctgctcgaaatgggaaagcatgacgaggcgtggatgatcctaaagcaggtacacgacactaatatgagggccaaaggcacacccgaaaaggtcttcacagtttcgaatatcaagactcctaagcagatggacgaattcatcgaaattcagtctagcacaggaacatggtaccaacgctggttagtgagatttaaaaccatctttaaacaagtgtgggataacgctctctattgtgtaatgggcccttatcgaatgaacacactgatactggctgtggtgtggttcgctatggccttctcttattacggtctcaccgtgtggttcccagatatgatccggtactttcaggatgaggagtataaatccaagatgaaggtgttcttcggagaacacgtgtacggcgccacaatcaacttcacaatggaaaaccagatccaccagcacggaaaactggtgaacgacaaatttacccgcatgtattttaaacatgtcctttttgaggacaccttctttgacgagtgctacttcgaggatgtgacctctaccgatacttatttcaagaattgcacaattgaatccactatattttataacaccgatttatacgaacacaaattcattaactgtcggttcatcaatagcacctttctggaacagaaagagggctgtcatatggatctggaacaggacaatgacttcctaatttaccttgtgtctttcctcgggtctctgtccgtcctccccgggaacataattagcgccctgctcatggaccggataggtagactcaagatgattgggggttccatgctcatctcggctgtctgctgcttcttccttttctttggaaattccgaaagcgctatgattggctggcaatgcttgttctgtggtacttcaatcgcagcttggaacgcactggacgtaatcactgtggagttgtacccaacaaatcagcgcgctacagctttcgggatccttaatggactgtgcaaattcggcgctatcctcgggaacactatatttgcgagctttgtcggcatcaccaaggtcgtaccaatcctgctcgcagcggccagtttagtgggtggaggcctgatcgcactgagattgcccgagactcgcgagcaggtgcttatgtag

SEQ ID NO: 182606 - DNA, 2052 bp, Artificial Sequence
  derived and/or modified sequence
atggatgactacaagtaccaggacaactacggcggctacgcccccagtgatggctactacagaggaaatgaaagcaacccagaagaagatgcccagagtgatgtgacagagggccatgatgaggaggatgagatctatgaaggagagtaccagggcatcccccacccagatgatgtgaaggccaagcaggccaagatggcccccagcaggatggacagcctgcggggccagacagacctgatggccgagcggctggaggatgaggagcagctggcccaccagtatgagaccatcatggatgaatgtggccacggccgcttccagtggatcctcttctttgtgctgggcctggccctgatggctgatggagtggaggtgtttgtggtgtcctttgccctgcccagcgctgagaaggacatgtgcctgagcagcagcaagaagggcatgctgggcatgattgtgtacctgggcatgatggccggggccttcatcctgggcggcctggccgacaagctgggcaggaagagggtgctgtccatgagcctggccgtgaatgccagctttgccagcctgagcagctttgtgcagggctacggggccttcctgttctgccgcctcatcagcggcatcggcatcggcggggccctgcccatcgtgtttgcctacttcagcgagttcctgagccgggagaagagaggagagcacctgtcctggctgggcatcttctggatgactggaggcctgtatgccagcgccatggcctggagcatcatcccccactacggctggggcttctccatgggcaccaactaccacttccacagctggagggtgtttgtgattgtgtgtgccctgccctgcaccgtgtccatggtggccctgaagttcatgcctgagagcccccgcttcctgctggagatgggcaagcatgatgaggcctggatgatcctgaagcaggtgcatgacaccaacatgagggccaagggcaccccagagaaggtgttcaccgtgagcaacatcaagacccccaagcagatggatgagttcatcgagatccagagcagcacaggcacctggtaccagcgctggctggtgcgcttcaagaccatcttcaagcaggtgtgggacaatgccctgtactgtgtgatgggcccctacaggatgaacaccctcatcctggccgtggtgtggtttgccatggccttctcctactacggcctgactgtgtggttcccagacatgatccgctacttccaggatgaggagtacaagagcaagatgaaggtgttctttggagagcacgtgtatggagccaccatcaacttcaccatggagaaccagatccaccagcacggcaagctggtgaatgacaagttcaccaggatgtacttcaagcacgtgctgtttgaggacaccttctttgatgagtgctactttgaagatgtgaccagcacagacacctacttcaagaactgcaccatcgagagcaccatcttctacaacacagacctgtatgagcacaagttcatcaactgccgcttcatcaacagcaccttcctggagcagaaggagggctgccacatggacctggagcaggacaatgacttcctgatctacctggtgtccttcctgggcagcctgtctgtgctgcccggcaacatcatcagcgccctgctgatggacagaattggccgcctgaagatgattggaggctccatgctgatctctgctgtgtgctgcttcttcctgttctttggaaacagcgagagcgccatgattggctggcagtgcctcttctgtggcaccagcattgctgcctggaatgccctggatgtgatcaccgtggagctgtaccccaccaaccagagggccacagccttcggcatcctgaatggcctgtgcaagtttggagccatcctgggcaacaccatctttgccagctttgtgggcatcaccaaggtggtgcccatcctgctggccgccgccagcctggtgggcggcggcctcatcgccctgcggctgcctgagacccgggagcaggtgctgatgtag

SEQ ID NO: 182607 - DNA, 1599 bp, Artificial Sequence
  derived and/or modified sequence
atgattgtgtacctgggcatgatggccggggccttcatcctgggcggcctggccgacaagctgggcaggaagagggtgctgtccatgagcctggccgtgaatgccagctttgccagcctgagcagctttgtgcagggctatggagccttcctgttctgccgcctcatctctggaattggaattggaggagccctgcccatcgtgtttgcctacttcagcgagttcctgagccgggagaagagaggagagcacctgtcctggctgggcatcttctggatgactggaggcctgtatgccagcgccatggcctggagcatcatcccccactacggctggggcttctccatgggcaccaactaccacttccacagctggagggtgtttgtgattgtgtgtgccctgccctgcaccgtgtccatggtggccctgaagttcatgcctgagagcccccgcttcctgctggagatgggcaagcatgatgaggcctggatgatcctgaagcaggtgcatgacaccaacatgagggccaagggcaccccagagaaggtgttcaccgtgagcaacatcaagacccccaagcagatggatgagttcatcgagatccagagcagcacaggcacctggtaccagcgctggctggtgcgcttcaagaccatcttcaagcaggtgtgggacaatgccctgtactgtgtgatgggcccctacaggatgaacaccctcatcctggccgtggtgtggtttgccatggccttctcctactacggcctgactgtgtggttcccagacatgatccgctacttccaggatgaggagtacaagagcaagatgaaggtgttcttcggggagcacgtgtatggagccaccatcaacttcaccatggagaaccagatccaccagcacggcaagctggtgaatgacaagttcaccaggatgtacttcaagcacgtgctgtttgaggacaccttctttgatgagtgctactttgaagatgtgaccagcacagacacctacttcaagaactgcaccatcgagagcaccatcttctacaacacagacctgtatgagcacaagttcatcaactgccgcttcatcaacagcaccttcctggagcagaaggagggctgccacatggacctggagcaggacaatgacttcctgatctacctggtgtccttcctgggcagcctgtctgtgctgcccggcaacatcatcagcgccctgctgatggaccgcatcggccgcctgaagatgattggaggctccatgctgatctctgctgtgtgctgcttcttcctgttcttcggcaacagcgagagcgccatgattggctggcagtgcctcttctgtggcaccagcattgctgcctggaatgccctggatgtgatcaccgtggagctgtaccccaccaaccagagggccacagccttcggcatcctgaatggcctgtgcaagtttggagccatcctgggcaacaccatctttgccagctttgtgggcatcaccaaggtggtgcccatcctgctggccgccgccagcctggtgggcggcggcctgattgccctgcggctgcctgagacccgggagcaggtgctgatgtag

SEQ ID NO: 182608 - DNA, 2052 bp, Artificial Sequence
  derived and/or modified sequence
atggacgactacaagtaccaggacaactacggcggctacgccccctctgacggatactatcgcggcaatgaaagcaaccccgaagaagatgcacaatccgacgtcacagaaggacatgacgaagaagatgagatctacgagggggaatatcagggaataccgcaccctgacgatgtaaaggcaaaacaggccaaaatggcgcctagccgcatggattcactcaggggccagaccgatttaatggcggaaaggctcgaggacgaagaacagctggcccatcagtatgagacaattatggatgagtgtggccatggccgctttcagtggatcctgtttttcgttcttgggttggccctgatggcggacggagttgaggtcttcgtcgtgtcgttcgcactgccttccgctgagaaagatatgtgcctctcaagtagtaaaaagggcatgttagggatgatagtgtatcttggtatgatggcgggcgccttcattctgggaggactcgccgacaaacttggccggaagagggtactctcgatgtccctagctgtgaatgcttctttcgcttcactgtcaagttttgtacagggctacggggctttcctattttgtcgccttatctccggaatagggatagggggagcgcttcctattgtgtttgcatatttttcagagtttttgtctcgagaaaagcggggcgagcatctgagctggcttggcatattttggatgaccggcgggttatacgccagtgcgatggcatggagtattatccctcactacgggtggggtttttccatggggacaaattatcactttcattcgtggagggtgtttgtcatagtgtgtgccctcccttgtaccgtgtcaatggtcgcccttaaattcatgcccgagtcccctaggtttctgttggaaatgggcaagcatgacgaggcctggatgatactgaagcaggtgcatgacaccaatatgagggcgaaaggaaccccggagaaagtatttactgtgtctaacatcaagacgcctaagcagatggacgagtttatcgaaattcagagctctaccggtacttggtaccagaggtggctcgtgaggtttaaaaccatatttaaacaggtttgggataatgccctttactgcgttatgggaccctacagaatgaataccctaattctggctgtagtgtggtttgcaatggcctttagttattatggactgacagtttggttccccgatatgattaggtatttccaagatgaggagtacaagagtaagatgaaagtattttttggcgaacacgtctacggcgctaccatcaacttcacaatggagaaccagatccatcagcacggtaaactggtgaacgataagtttacaagaatgtacttcaaacacgtccttttcgaggatacatttttcgatgagtgttacttcgaagacgttacaagtacggatacatatttcaagaattgcacaatcgaatctaccatcttttacaacaccgatctatatgaacataaatttatcaactgcaggttcattaactcaaccttcctggaacagaaagaggggtgccacatggacttagagcaggacaacgattttctgatttatcttgtgtcgttcttagggagtctaagtgtgctgcctgggaatataatcagtgcactcctcatggacagaattggacggctgaaaatgatcggcggatccatgctgatctcagccgtgtgttgttttttcttgtttttcgggaattcagaaagtgccatgattggctggcaatgtctgttttgtggaaccagcatagcagcctggaacgcactggacgtgattaccgtagaactctaccctacgaaccagcgtgcaaccgcttttggcatcctgaatggattgtgcaaatttggtgccattctcggaaatacaatcttcgccagcttcgtcggtattactaaggtcgtgccgatcctattagccgccgctagtctggtaggaggcggcctgatagcattgcgactaccagaaacccgggaacaggtgcttatgtag

SEQ ID NO: 182609 - DNA, 2052 bp, Artificial Sequence
  derived and/or modified sequence
atggacgactacaagtaccaggacaactacggcggctacgcccccagcgatggctactatagggggaatgagtcaaaccctgaagaagacgcccagagtgatgtgaccgaaggacatgacgaggaagacgagatctatgagggggaataccaaggcatcccccaccccgatgatgtgaaggccaagcaggccaagatggcgccttcccgcatggattcactgcggggccagactgaccttatggctgagaggctagaggacgaggagcagctggcgcatcaatacgaaacgatcatggacgaatgcgggcacgggagatttcagtggatcttgtttttcgttctcggcctcgcactgatggcagatggcgtggaagtctttgtagtgagcttcgccctgccttctgcagagaaggacatgtgcctgagctcctcgaagaagggaatgttggggatgattgtctatcttggaatgatggcaggcgcgtttatcctgggtggattggcggataagctcggcagaaagcgcgtgctttctatgtccttggctgtaaatgcttcttttgcttcactgagctctttcgtccagggctacggggccttcctcttttgccggcttatctcaggcatcggtatcggtggggcgctacccattgtgttcgcttacttttcagagttcctgtcaagagaaaagcggggcgaacatttatcttggctcggtatcttctggatgaccggcggattatacgcatctgctatggcatggtccatcataccacactacggctggggattttccatgggcactaattaccattttcatagttggcgggtcttcgtgattgtgtgcgccctgccatgcactgttagcatggtcgccttaaagttcatgcccgaaagcccgaggtttctgctggagatgggtaagcacgacgaggcctggatgattctgaagcaggtgcacgacactaatatgcgcgcaaaagggactccagaaaaagtcttcaccgttagcaacatcaaaacccccaaacagatggacgaattcatcgaaatccagtcttccacaggcacctggtatcagaggtggttagtgagattcaagactatcttcaagcaggtatgggacaacgccttatactgtgtaatgggcccttataggatgaatacactgatcctggccgtagtgtggttcgccatggctttctcatactacgggctcaccgtttggtttccagatatgattcgctactttcaagacgaggagtacaagagcaagatgaaagtgttttttggcgagcatgtctatggagccactatcaactttactatggagaaccagattcaccaacacggaaaactggtcaacgacaagttcacccggatgtacttcaaacatgtgctattcgaagatacatttttcgacgaatgttacttcgaagacgtcacatccactgatacttattttaaaaactgcacaatcgagagcacaatcttttataacacagatctgtacgagcataagttcatcaactgccgcttcatcaacagcaccttcctggaacaaaaggaggggtgtcacatggacctggaacaggacaacgatttcttaatctacctggtttcgttcctgggatcattatctgtgcttccaggcaacatcatctctgctctgttgatggatcgcataggtagactgaagatgatcggtggaagcatgctgatttctgccgtgtgctgcttcttcttgtttttcggcaattccgaatctgcaatgattggctggcaatgtctgttttgcggaacatctatagccgcatggaatgcgctggatgttattactgtagagctgtatccgacgaatcagcgcgctacagctttcggcattttgaacggcctctgcaaatttggcgcaatcctgggcaacacaatttttgcctcctttgtaggcattaccaaggtggtgcctatcctgttggccgccgcaagtctggtggggggcggactgatagcactgaggctaccagagactcgcgaacaggtactgatgtag

SEQ ID NO: 182610 - DNA, 1599 bp, Artificial Sequence
  derived and/or modified sequence
atgatcgtgtacctgggcatgatggccggcgccttcatcctgggcggcctggcagataaactgggaagaaaacgcgtcctgagtatgagcctggccgtgaatgcctcgttcgcctccttaagcagcttcgtgcaggggtatggcgccttcctgttctgccggctgatttccgggatcggtattggcggtgcactgcccattgtgtttgcctacttctcggaatttctctctagagagaaacgcggtgaacatttgtcttggcttggtattttttggatgacgggcgggctgtacgcctccgctatggcgtggtctattataccacactacggatgggggttctccatggggaccaactaccactttcactcctggcgagtgtttgttatcgtgtgcgcactgccttgtaccgtctccatggtggcccttaagttcatgcctgagagccctcgcttcctgctggagatggggaaacacgacgaagcatggatgattctgaagcaggtccatgacactaatatgagggccaaaggcacccctgagaaagtgtttacagtctctaatattaagactccgaaacagatggacgaattcattgaaattcagtccagcacaggaacctggtatcagcggtggctggtgcgcttcaaaacgattttcaagcaggtttgggacaacgccttatattgtgtgatgggcccataccggatgaatacactgattctcgccgtcgtgtggttcgcaatggcctttagctattatggtctgaccgtttggtttccagatatgatccggtatttccaggatgaggaatataagagtaagatgaaagtgtttttcggagaacacgtatacggggctactatcaactttaccatggaaaatcagatccatcagcacggaaaactcgttaacgacaagtttacccgcatgtatttcaagcacgtactgttcgaagacaccttttttgacgagtgctatttcgaggacgtgacctccacggatacatatttcaaaaattgtacgattgagtccacaatcttctataacacagacctgtacgagcacaagttcatcaattgcagatttataaacagcacctttctggagcagaaagagggatgtcatatggatcttgaacaagataatgattttctgatctaccttgtgtccttcctaggcagcctttccgtgctgcccggtaacattatttcagcgctcctgatggatagaattggaaggctcaaaatgattggcggcagcatgctcatatcagccgtgtgttgtttctttctgttcttcgggaatagtgaatctgctatgatcggttggcagtgtctcttctgcgggacgtcaatagccgcctggaacgcactggacgtaatcaccgtcgagctgtacccgacaaatcaacgggctacagctttcggtatcctgaatgggctctgtaagttcggcgctattctaggcaacacgatctttgctagctttgtcggaattactaaggtggtgccaattttgttggcagccgcgtcactcgttggcggggggttgatagctctgaggctccccgagaccagggagcaggtcctcatgtag

SEQ ID NO: 182611 - DNA, 2052 bp, Artificial Sequence
  derived and/or modified sequence
atggacgactacaagtaccaggacaactacggcggctacgccccctccgatggttactatagagggaacgagagcaatccagaggaggacgcccagagtgatgttacagagggacatgacgaagaagacgaaatctacgagggagaatatcaagggataccccatcctgatgatgtcaaggctaagcaggccaagatggctccctctaggatggactcactcagaggccagacagacttaatggccgaacgactggaagatgaagagcagctggcccaccagtacgaaaccattatggatgaatgtggccacggacgtttccagtggattttatttttcgtgctgggcctcgccctgatggccgacggcgttgaagttttcgtggtatcgttcgctcttccttcagccgaaaaggatatgtgcctgagcagctccaaaaaaggcatgcttgggatgatcgtctatctaggaatgatggccggagcgttcattctcggaggactagccgacaagttaggccggaagcgcgttctgtctatgtccctcgcagtgaacgcaagttttgcttccttatcttcattcgtccagggctacggcgcctttttgttctgcaggctcataagtgggattggcattggaggagccctccccatcgtattcgcatacttcagcgagttccttagtcgggagaaaaggggtgaacacctgtcatggctggggattttctggatgactggcgggctgtatgctagcgccatggcttggtccattattcctcattacggatggggcttcagcatgggaaccaattatcactttcacagctggagggtgttcgttatcgtctgcgctcttccctgtaccgtctcaatggtagctctgaaattcatgcccgaatcacctcggtttttgttagagatgggaaaacatgacgaggcctggatgattctaaagcaggtgcatgataccaacatgcgcgccaaaggcacccccgagaaggtattcactgtgtccaatatcaaaaccccgaaacagatggacgagtttatcgaaatacagtcgagcacaggcacatggtatcagcgatggttggtgcggtttaagacgatctttaaacaggtctgggataatgctctgtactgcgtgatggggccctaccggatgaatactctcatactcgccgtggtttggtttgctatggctttttcctactacgggctgacagtctggtttcctgacatgatcagatacttccaagatgaggaatataaatctaaaatgaaggtgttttttggagagcatgtctacggcgctaccataaattttaccatggaaaaccaaattcaccaacatggaaagctggtcaatgacaagtttacccgcatgtatttcaagcacgtcctgttcgaggacaccttctttgatgagtgctactttgaggacgtgacatctacagacacctactttaagaattgcaccattgagagcacaatcttctataacacagatctgtacgaacacaagtttatcaattgtagatttataaattctacattcttggaacagaaagagggctgtcacatggacctggagcaggataatgatttcctaatttacctggtgagtttcctgggaagtctaagcgtgctcccaggaaacatcatatctgcactgttgatggaccgcattggcagacttaagatgattggtggttctatgctgattagtgccgtgtgttgttttttcctgttcttcggtaactcagagtccgcaatgattggttggcagtgtctgttttgcggaacctccattgcagcgtggaatgccctggacgtcattaccgtagagctctaccctactaatcaaagagcaaccgccttcggcattctgaatggactgtgtaagtttggagccattctgggtaacactatcttcgcctcctttgtgggtattacaaaggtggttccaattctcttggccgcagcgagccttgtggggggaggactcatcgctttgcgtctgcctgagacccgcgaacaggttctgatgtag

SEQ ID NO: 182612 - DNA, 2052 bp, Artificial Sequence
  derived and/or modified sequence
atggacgactacaagtaccaagataattacggtgggtatgccccatcagatggatactaccgtggcaatgaaagtaaccccgaagaggatgcacagtccgacgtgactgagggtcacgacgaagaagatgagatttacgagggcgagtatcaagggattcctcaccctgacgacgtgaaggccaaacaggctaagatggcaccatcaaggatggatagtctccggggacaaaccgacctgatggctgaaaggctggaggacgaggaacagttggcccaccagtatgagacgatcatggacgaatgcggtcacggcagattccagtggatcttgttcttcgttctgggactcgccctgatggctgacggcgtggaggtttttgttgtgtcattcgctctgccatcagctgagaaggacatgtgcctgtccagctcgaagaaaggcatgctcggaatgatagtttacctggggatgatggctggcgcattcattctgggcggactggccgacaagctgggaagaaaacgagtcttgagcatgagcttagcagtcaacgcctccttcgccagtctgtcatcattcgtgcagggatacggtgctttcctcttttgtaggctgatctctggaatcggtatcggaggagcacttcctatcgtcttcgcttatttttctgaattcctctcacgggagaagagaggcgagcacctgtcttggttgggcatcttttggatgacaggtggtctctacgcctccgccatggcgtggagcatcattccacactacggctggggctttagcatgggtactaactatcattttcattcctggcgcgtattcgtgattgtatgcgccctgccttgtacagtgtccatggtggccctaaaattcatgccagaaagccctaggtttttactggaaatgggcaaacacgatgaagcgtggatgattctaaaacaggtgcatgacacgaacatgagagccaaaggaacccccgagaaggttttcacggtgtccaacattaaaactccaaagcagatggatgaattcattgagatccagagttccacagggacatggtatcaacgctggttggtcagatttaaaacaatttttaaacaagtgtgggataatgctttgtactgcgttatggggccttatagaatgaacaccttaatcttggcagtagtgtggttcgccatggctttttcatactatggcctcaccgtttggttccccgacatgattcgctacttccaggatgaagaatataagagtaagatgaaggtattctttggagagcacgtttatggtgctaccatcaatttcaccatggagaaccagattcaccaacacggaaaactggtaaacgataaatttactcggatgtattttaagcatgtactgttcgaagatactttctttgacgagtgttacttcgaggacgtcacaagtacggatacttactttaaaaattgcacaattgagagtaccatcttttataatacagacctgtacgagcacaagttcatcaattgtcgatttattaactcaacattcttggagcagaaggaaggctgccatatggacttggagcaggataacgacttccttatctatctggttagttttctcggatccctctccgtgttgcctggaaatattatcagcgctttgctgatggaccggatagggagactcaagatgataggcggatccatgttaatctctgccgtttgctgtttcttcctcttttttgggaattcggagagtgcaatgatcggctggcagtgtttgttctgtgggacttccattgctgcatggaatgccttagacgtgattacagtggaactgtaccccacaaaccaaagagccaccgcattcggtatcctcaacggattatgcaagttcggtgccatcctgggcaacacaatcttcgcctcctttgtcggtattaccaaggtcgtgccaattcttctggccgctgcctcgctcgtagggggaggtctgatagccctcaggctacccgagacccgcgaacaggtcctcatgtag

SEQ ID NO: 182613 - DNA, 2052 bp, Artificial Sequence
  derived and/or modified sequence
atggatgattacaaatatcaggataattacgggggatacgcaccttccgacgggtattatcgtgggaacgagagcaacccagaggaagacgcgcagtccgatgtgaccgagggccacgacgaggaggacgagatctacgagggagagtatcagggtataccccaccccgacgacgtgaaggctaagcaagcgaagatggctccctcccgtatggacagcctgcgcggtcaaacagatctgatggcagaacggctggaggacgaagagcaacttgcccaccagtatgaaactatcatggacgaatgtggacatggacgttttcaatggattctgttcttcgtactggggctcgccctgatggctgacggtgtggaggtgtttgttgtgagctttgctttgccctccgccgaaaaagacatgtgtttgagctcctccaaaaaaggaatgttgggaatgattgtgtatcttggcatgatggcaggagcatttatattgggcggattagctgataagctgggaaggaagagggtcctctccatgtctcttgctgtgaatgccagttttgcctcattatcaagttttgttcagggatatggcgcttttctgttctgtagactcatctctggcatcggcatcgggggagccctcccaatcgtgttcgcatatttcagcgagtttctgtcaagggagaaaaggggcgagcacctttcgtggctaggtatcttctggatgaccgggggactgtacgccagtgccatggcttggagtattatccctcattatgggtggggattctcaatggggacgaactaccattttcactcctggagggtgttcgtgattgtgtgtgcgctaccttgtaccgtctctatggtggctcttaaatttatgccagaatctcccaggtttctgctggaaatgggcaaacatgacgaggcttggatgatcctgaagcaggtgcacgacaccaacatgcgagccaagggcacgccagaaaaggtctttactgtctctaacattaagactcctaagcagatggacgaatttatagagatccaatcatctactgggacgtggtatcaaaggtggttggtgcgttttaagactatattcaaacaggtgtgggataatgccttgtactgcgtaatgggcccatatcggatgaataccctgattctggctgtagtctggtttgcaatggccttttcctactacggtctgaccgtttggtttcccgacatgatcaggtactttcaggatgaagagtataagtcaaagatgaaagttttttttggcgagcatgtttatggcgcaactatcaatttcacaatggagaaccaaattcaccagcacggtaaattggttaacgataaattcaccagaatgtacttcaaacacgtgctgtttgaagacaccttcttcgatgaatgctatttcgaggatgttacctccacggacacttattttaagaactgcactattgaatctaccatcttctataatactgatctgtatgaacataagttcataaattgtagattcataaatagtactttcctggagcagaaagaggggtgtcacatggatctagagcaggacaatgatttcctgatctatctggtttcatttctgggatctctctcagtgcttccgggaaatattatatccgcattgctgatggacagaattgggaggctgaaaatgattggcggaagcatgcttatcagcgcagtctgctgctttttcctgttttttggaaatagtgagagcgccatgatagggtggcagtgcctgttttgtggtacttccatcgccgcttggaacgcactcgatgtgattacagtagagctgtatcccaccaatcagcgcgcaactgccttcggcatcttaaacggtttgtgtaagtttggcgctatcttgggcaacacaatctttgcttcttttgtgggaatcaccaaagtggtacccatactcctggctgccgcaagccttgtgggcggtggcctgattgcattgcgtttgccggagactcgcgaacaggtgctgatgtag

SEQ ID NO: 182614 - DNA, 1599 bp, Artificial Sequence
  derived and/or modified sequence
atgattgtgtaccttggtatgatggccggagcatttatccttgggggattagccgacaaactcggtaggaaacgcgttttatctatgagccttgccgttaacgcctcattcgcttccctttcttcatttgtgcagggttacggcgctttccttttctgcaggctaatatccggcattggtatcgggggtgccttgccaattgtctttgcttactttagtgagtttctaagccgcgagaagcgcggtgagcatttaagttggctgggaatattctggatgaccggagggttgtacgcctctgctatggcctggtctatcattccccactacggctgggggttcagcatggggacaaattatcacttccattcatggagggtgtttgtgattgtgtgtgcactgccttgcacagtcagtatggttgctcttaaattcatgcctgagagtccaaggtttttactagagatggggaagcatgatgaggcctggatgatacttaagcaggtgcatgacaccaacatgcgggctaaggggactcctgaaaaagttttcacggtgagtaacatcaaaacgccgaaacaaatggatgagttcatcgagattcaatcttccacgggcacgtggtatcaacgatggctcgttagattcaaaaccatcttcaaacaagtatgggacaacgctctgtactgcgtgatgggaccttatagaatgaatacactgatcctggcggttgtgtggttcgctatggcattctcttactacggtttgaccgtgtggtttccggacatgatcaggtacttccaagacgaagagtacaagtctaagatgaaagtgttttttggcgaacacgtgtacggcgctactatcaacttcacaatggagaaccaaattcaccagcacgggaagctggttaatgacaagttcacacgaatgtacttcaagcacgtactgttcgaagacacctttttcgatgaatgctactttgaagatgttacaagtacagatacctacttcaaaaattgcacaatcgagtctaccattttctacaacacagacttgtacgagcacaaattcatcaattgcagatttattaacagtacgtttctggagcagaaggagggctgccatatggacctggagcaagacaatgacttcctcatctatctcgtgtccttcctggggagcctgagcgtactacccggaaatattattagtgctttgctgatggatcgaattggccgtcttaagatgattggtggatccatgctcataagtgccgtctgttgtttttttctatttttcggaaattcagagtcagccatgattggttggcagtgtcttttttgtgggactagcatcgccgcatggaacgcccttgatgtcatcactgtggaactgtatcctacaaaccagagggccaccgcatttggcatccttaacggactgtgtaaatttggcgctatcctggggaacaccattttcgctagctttgtcgggattaccaaggttgtccctattctgctcgcagccgcttcactggttgggggaggactcattgccctccgactcccagaaaccagggaacaggttctcatgtag

SEQ ID NO: 182615 - DNA, 2052 bp, Artificial Sequence
  derived and/or modified sequence
atggatgactacaaatatcaagacaactacggcggttatgccccaagcgacggatattatcgcggaaatgagtccaatcccgaagaggatgcccagtctgatgtgactgagggccacgatgaggaggatgaaatttacgaaggcgagtatcaggggatcccccatcccgacgatgtcaaggctaagcaggccaaaatggcccctagcagaatggatagtctccgcggacaaacagacctgatggcagagcgactagaggatgaagagcagcttgcccatcaatacgagaccattatggacgagtgcggacacgggagattccagtggatcctgttctttgtcctcggcctggccttgatggctgatggggtggaggtgttcgtcgtctcgttcgcactgccctcggccgaaaaggatatgtgcctgtcttcttcaaagaaaggcatgttgggaatgatcgtatacttaggcatgatggccggagccttcattcttggcggtcttgccgacaaattggggaggaaacgtgttttgagtatgtcgctggctgtgaatgctagttttgcaagtctgagcagtttcgtacagggatatggagcattccttttctgtcgcctcatctcgggcataggtattggaggggctctgccgattgtgttcgcctattttagtgaattcctgtcccgagagaagcggggagagcacctgagttggctaggcatattttggatgacaggcggtctgtacgctagcgcaatggcatggagcattatccctcactatggatggggattcagtatgggcacaaattatcatttccattcctggcgggtttttgtgatcgtttgcgcactaccttgtacagtcagtatggtggcactgaaattcatgcccgaaagtcccaggttcctgttagagatggggaaacacgatgaggcatggatgatcctcaaacaggtccacgatacgaatatgagagccaagggaacaccagaaaaggtattcactgtctccaacattaaaacacccaaacagatggacgagtttatcgaaatccagtcttccactggcacatggtaccagcgatggctcgtgagattcaagactatctttaaacaggtgtgggataatgctctctattgcgttatggggccttacagaatgaacactcttatacttgcggtggtctggttcgccatggccttttcctattacggcctgaccgtttggttccctgatatgatcaggtacttccaagatgaggaatacaaaagcaagatgaaagttttctttggtgagcatgtctatggcgcaacaattaattttaccatggagaatcagatccatcagcatggaaagctcgttaatgataagttcactaggatgtactttaagcatgtgctgtttgaagatacattttttgacgagtgctatttcgaggacgttacctccacagatacatactttaaaaattgcaccatcgaaagtacaatcttttacaacactgacctctatgaacacaaattcatcaattgtagatttatcaacagcactttccttgagcagaaagagggctgccacatggacctggaacaagacaatgattttctcatatacctcgtctccttcctcggctccctctccgtcttaccaggaaacatcatctctgctctgctcatggaccgcataggaaggctgaagatgattggcggatctatgctcatctctgcagtgtgctgcttttttctgttcttcggcaattccgagtccgccatgattgggtggcaatgtctgttttgcggtactagtatcgcggcatggaatgctctggatgttataacggttgagctttaccctaccaaccagagggctaccgccttcggcattctcaatggtctgtgtaagtttggagccatactcgggaatacaatatttgcatcgttcgtggggataacaaaggttgtgcccatcctcctcgcagccgcttctttggtcggtggcggactgatcgctctgcgattgccagagacacgcgaacaggtcttgatgtag

SEQ ID NO: 182616 - DNA, 11202 bp, Artificial Sequence
  derived and/or modified sequence
cagagcataaccttcggtggcaggacaaatcaggccagcacgcagtctgccaagtcctgctcgctccctgtcaagaaaaacagctggatccatttctaatcaacacttcccaacgcaacacttctgagtctctgaaggagaccagagcttgaaactttccagacttccaacagacatcgagtgcaaaaggatatttaggttgtctttgcacaaatctggttgatttgagagataaagggggggggaaccagtgtgactttcacctaagaagtcacatgaacatatttcacatttgaactacataatgaatgatggttattgaaatagcccaaacctctaccacagagcgagggatatagctcaaggggcaaccaggcagtcgcagaaccaaggaatggatgactacaagtatcaggacaattatgggggctatgctcccagtgatggctattaccgcggcaatgagtccaacccagaagaagatgcacagagtgatgtcaccgaaggccatgatgaggaagacgagatctatgagggcgagtaccagggtatccctcacccagatgatgtcaaggccaagcaggccaagatggcgccctccagaatggacagccttcggggccagacagacctgatggctgagaggctggaagatgaggagcagttggcccaccagtacgagaccatcatggatgagtgtggccatggccgcttccagtggatcctctttttcgtcttgggtttggccctgatggccgatggggtggaagtgttcgtggtgagttttgccctgcccagtgcagagaaggacatgtgtctgtccagttccaaaaaaggaatgctagggatgatagtctacttgggaatgatggcgggcgccttcatcctgggaggcctggctgataagctgggaaggaagcgagtcctcagcatgtctctggccgtcaatgcctccttcgcctccctctcttccttcgtgcagggatatggagccttcctcttctgccgactcatctcaggcatcggtattgggggtgctctaccgattgtttttgcctatttttctgaattcttgtctcgggagaagcgaggagaacacctcagttggctgggcatcttctggatgactgggggcctgtacgcatctgccatggcctggagcatcatcccacactatggctggggcttcagcatggggaccaattaccacttccatagctggagagtgtttgtcatcgtctgtgctctgccctgcaccgtgtccatggtggccctgaagttcatgccagagagcccaaggtttctgctagagatgggcaaacatgatgaagcctggatgattctcaagcaagtccatgacaccaacatgagagctaaggggaccccagagaaagtgttcacggtttccaacatcaaaactcccaagcaaatggatgaattcattgagatccaaagttcaacaggaacctggtaccagcgctggctggtcagattcaagaccattttcaagcaggtctgggataatgccctgtactgtgtgatggggccctacagaatgaatacactgattctggccgtggtttggtttgccatggcattcagttactatggactgacagtttggtttcctgatatgatccgctattttcaagatgaagaatacaagtctaaaatgaaggtgttttttggtgagcatgtgtacggcgccacaatcaacttcacgatggaaaatcagatccaccaacatgggaaacttgtgaatgataagttcacaagaatgtactttaaacatgtactctttgaggacacattctttgacgagtgctattttgaagacgtaacatcaacagatacctacttcaaaaattgtaccattgaatcaaccatcttttacaacacagacctctacgagcacaagttcatcaactgtcggtttatcaactccaccttcctggagcagaaggagggctgccacatggacttggagcaagataatgacttcctgatttacctcgtcagcttcctgggcagcctgtctgtcttacccgggaacatcatttctgccctgctcatggatagaattggaaggctcaagatgattggtggctccatgctaatctctgcagtctgctgcttcttcctgttttttggcaacagtgagtctgcaatgatcggctggcagtgcctgttctgtgggacaagcattgcagcctggaatgctctggatgtgatcacagtggagctgtatcccaccaaccagagagcaacagccttcggcattctcaatggattatgcaaatttggcgccatcctgggaaacaccatctttgcttcttttgttgggataaccaaagtggtccccatccttctggctgctgcttctctggttgggggtggcctgattgcccttcgactgccagagactcgagaacaggtcctgatgtgaacaacctatgggaaaaggaaaggtcgagagaatcttgtccaggacactgaaatgcatccacacttcctgcctatcacggtccggaggacaccttggatagcacgggaggagaagttgactttgtgacccctagtttaggacccacttcagctgtcaatatgtttgtaactcaggtgactgatttgggggtgccctgagccacccttagaatcacagagctgcgtgtttaacttcaagtcttcccagtccaaggcagggagaggattctccagtgagtgcacacactatgcgaggagcaagcatttctctaagtcaagtgcaaggacttaacttgcgtttgaaaaggaattagagggtcagaaacacccaggttcctccagaaagctccttggagcccaacaacttaacaaatcaacttggctggaagttagagtcattatatgaagattgggcttgaagtatatatttttgcatttaaaagtatcacctatcatattttccactcgaaaattgacatagtagcattgaggatactctgatctagaaagccaagtatttgagcaacatctatagagatctacttttctcctatgtctcctaggctttccatgataattaggtaatacatttaagaaggatatttatttctgttttgctctattcaaagaaacggaatgggatagttattctgtaaactaagtttgtatataactttatttgggtttaatttccacaactggtatctgcaaatattgccagcattttagccatattttgggagaacttggtgtttgaggtcccaggaaatgaggtctgatcaaatgaaatgcaagcacaatttcttacagccatttaactttctgttgggaggatgaattaacaaactcacattgtgcagtctgcttaatccaggcacttttctttgtgcaggtgtagtgagtagttacttctctcccttacacagatgacttgtgaaactcaagctcaccatcttcagtgctggcattttactttgccactacccaaaaacaatgtgagatgtgttcagtggcctctggtactctttgcaggcaagaatcaaacaacatggggactgagggaaggatggggaagtgtagccacagttcttccaaatgtaaatactttttgtttgttctagtggtaaaatgcaaatgcaatccatatttgttaggatggtcaggtctcatgagaaatctatgctatgtgtccagagcttttgaaacagagtccattggagtgggagttagggagtgtagtggatgccaaatatgtttttcttcagtgcttaagagaactgtttcctgaagtccagctttgaacataaacaggggtgtgggttgggggaggagcttaggacaaacctctctgatgaaggtcagcaatagactgaagtcttgactgcatggaagaggaaaaacatcagaactgtctgacaatggaggggacagtgagctacgcacaactgccagcggaggtgaacttgcacctgcccaggccggatgaacatcagcctgcaagaactagttgtttgagttgatttgcagtgctctcaatgggcaagtgccacattttccctggcagagatctccaaaaatttaaaacagaataataatggctatatcgagtgttttctcagtattggagaaatgcttaggtcctatgatagcttcgggacatctttctgtaattttcctcaattaacgggttggtaggggtaaatcttatgacacctttccaccgtcgatttgagatcagttttaatggttaaaatgtttactctccttctgtcaaccctcacctttttatttacacccctccctttttttctgtacagggagagaagacatattgactctgactggacaccctgattcctccaaatatatataccactgtgtattaatctttctctcagtgttttataggagtactaacatttattgctctgtcaataatgaaaggctcgatgtaatatagctgtaatttactttccatatgaatacagtggctaggttcataaaagagaattgtgtgagtctgggattaccacatctaaaacattattctttaatgggataatacaattcattgagcagctaccacttaaaaaacttgcaggacagttagagcctgcatttctagttaagatggatcttgtaaatttaaaattggattaacattggagtgctggggtggctgcaataatttgggggctaactccatttggtttccaagatctcacttctgcattatctttatggctctttaaaccagccacctagccaatcaagggcaattcccatctcatccatcactcaggtctttgtaaagggtgcagccaagctctgcagacttttgcaggattgtctagcctgagtaccgggctacttcttaaatgccgtcactcctgctgagataaatgcgtctttaaaaatagtctctgtggcaggtcactgggggacaatgtacagcattctggccatccacttctttttcacttcatgttctaccccaagagactcccgatgtcggctgtggagggttaaagggatgaggctttcctttgtttagcaaatctgttcacagttcttgatgatgtattttatgatgcccagcttggaaatagttgctttccatagtctcaactgtattgtgtcatctcctgatgctgatttttgatcttttgttttattaaaaataattagtgaaagaggtgtgcctatctgtgaagtttgtagtacatcatcctgaggtcatgtaacaagtaaaccccaacccagcgttccctcctacgttgtgttagttcattaaaactaaataataaaaataactgtaagaaaaccttaaggactggggttagagattattttcaggcactaaggtctcttctgtattccaaaattgattgaatcagctgggagaaacattgagaatcgcttccttcaacttttattttgcaacatggggaccttgagaggttaaacgatgtggcccagattacatgtaatgtgaggagtgggcgagaaggcctaaggtgatgctctcatgacagttctggggaagcctgcagtttggggaatgggacaatgtgacaaatactcgccattccctgagaccattcattgactattcccttgatggctttactataatgagaggaagcatcagtttaaacataaaaagattagtatttatccatccatttattcattcagcaaatccttattgagccctgaccatgggccagtctctctgccaagccctggggacacagtgatgaaaaaactggccacagtttctgcttcctgcctcattccacttgcagtgagcggatattaaattggccataaacaccgagtacgatgaccttacaatccgcaaactgcacctttcatgtgtaaaaggattgctactactttacttgtcagctgtggatttccaaatgtggtggctccctcttatttttttttctttgaggagtgtaccaattttttatctttataaaccaggtaagggaaatgatgcccttgcccattttctacagacctaatcgatttttacctaatcagttttacagaaagggttacatggaagaagagataggggccaggaatgcaagagggacattggtgagtggggtaagaatccccgtagccctgggaaaggtgtctccacttccacatctggcttttctagggggcatctgtgctaactgacctgggattatgttggatggcatatgactgcaaattcaaagaaaccaatttataataagtttatagtaagttaaaggtttgttttactctcatgtgaagggaatctggaggaaggaaagccagggctggagtggctgcctttgatcatgggagcacactccttctgcccgatcattgggagcacactccttctgcctgatcgttgggagcacactcctgcctgatcatgggcgcacgttccttctgcctgatcgttgggagcacactccttctgcctgatcatgggagcacactccttctgcctgatcattgggagcacgctccttctgcctgatcgttgggagcacactctttctgcctgatcgttgggagcacaccccttctgcctgatcattgggagcacactccttctgcctgatcatgggcacacgctccttctgcccgatcatgggcacacgctccttctgcccgatcgttgggagcacactccttctgcccaatcattgggctcacgctccttctgcccgatcgctgggctcacgctccttctgcccgatcttgggcgcacgctccttctgcccgatcgttgggcgcacgctccttctgcccgatcgttgggcgcatgctccttctgcccgatcgttgggagcacgctcattctgcccgattgttgggagcacgctccttctgcccgatcgttgggcgcacgctccttctgcccgatcgttgggcgcacgcttcttctgcctgatcgttgggcgcacgctccttctgcctgatcgttgggcgcacgctccttctgcctgatcgttgggagcacgctccttctgcctgattgttggaagcacgctccttctgccttcagactccttgatttttagtgcagtttccatcactgaggctgcctcatgggctgagatggctgttgaagcactgaacctcacatccacaattcaggcaggaagcagaaggaagggcaatgggcaaaggggctgtgccttgcagccgatccagcctccctttgctgcagaggaggcagggaaatgcggtatttactgggaacattgctgcccctcctccaaattgagggtcttggctcgaaggacaaaagccagaaaggataggtggattagtgcttcttaaacttttgcgtgcatcagaatcacccagaaagatgttaaaactcactcttcaaggccccatccccagagattcggattctggggatttggaatctggggtggggtctgaagaatctgcattttttaacaaactcccaggtgacatagatggcatcaattctcaagccatattttgagtagcactgacactcttccaataggtggtactttgacttgtcagggaagttctattgctctgataacttaaaaccaacccaaccagaagctcacaaaaactagcagcctgtgaaaaatgatcaccattttcctagagctccgagacaactagtggtagtgcaacagtaacccaaaaatgtcaatgaaaatatttccttccccagaaactgcttggtttcactcaggtcctgtccttatgggcctgtgtctggttgcagggcttgaagtatttcggaagctcagcagaggttgaaccctttcccctgggggttggtgatctttgttttggccatttccacctggtgaagattttcatagacaaatatgcttgtggcatcctgtaattcattgtgccttatgatggacctctgattctataagcttccccctagctagggatgcacgggggtgatcaagacatgactagatgtgaacctgacctgcagacagtccacctgaacgtgcctggaaatgtctcccgaaaaggatgaaaagcctcctcctttagacaaggaagacagagtggagcaaatttctctacatagatctcattcgaaaacaaatttacagaatgcagaatggctactgtgtgtcttgtgctatgctaggtctctctctctctaagtggactctgaccctgtccaaaacattgtgcttttgcatgtagctgtgtcgcatttaggcccagctctaagaaccgtttggaaataaatcacatagagcctttgattgtgaggcaggcttaaagtacattttgtttgatttgcagaggcatggtgaggaatttatatgcatggctgttgtggcagcagcgagatttccaaaaagatgaatgatgaaatgaaacagactgaagctatctcacaaatgttaaatggagaaataaaagttgttatagtcattgctaattacagaatgagcaagagatttatttagcaggaccatactatgccccctggaaggttcagtttatgagctggagcacaaggatttactgtcatttcacctgaaaacacacatttagctgtccatttacctttaatcctacaggcttaaaatactttaaaatttcagagaccattaatatgtattcctttagaaagcaaaggtctttcagaagctgtcctctaccaaagttaatgtggtcaccacatttgatgattttgctaggtagggaggtttatttaatcacagctactgtcactcaggaggatgagccatttaaaaatggtggccctgtcctccacttcttacctaccatatataatctcagtaattcagatttctctaaatcagcattagtgatcatttcaatagggtatgaacaaaaggcctataaaaatagctttccaattcgccaccaaaaatgcaaaaatgacaagtaagtgaggtaacgcatgagctaaatagcttgatttagtcactctaaaatgtgggtgtgtatatatacatacatatatatacacacacacattatgttatacaccataaatatatagaagttttacttgtcaattaaaactataaataaagtggctttccagaaaaattagatattggactctatcacaaaggaattgcataaaaatacttacaaacataactataagcaattgatgagcaaattacaaatgactgttttttattaaaacattcctccaaaagaacggcaaagcaaatcccatagacacccaaaatactaaaagtgacaaaacaatacttctttaaaaatgtattttatgatctatttattgatattctaatggttttaagaaggataattttccaaaacctaaatgctacacattttacagtggcaatatcaaccttatcatgagctaaagatttgcaatcagaacattggtagagtgcattgctgagttataacaagtgtctcaggacgaggatatttggtaggtatccttaaatatatagatgcttaccagtaggtttaatagaagatttctgaaaggtagcgcaagtttttatttcattatttttatttttatttttttgagacagagtctcactctgtcatctaggctggagtgcagtggtgcaatcttggcttgctgcaatctccacctcccaggttcaagcgattctcccacctcagcctcccgagtagctgggattacaggcatgcgccaccatgcctggctaatttttgtatttttagtagagacggggtttcgccatgttggccaggctcgtctcgaactcctggcctcaagtgatctgcccgcctcagcctcccaaagtgctgggattacaaatgtgagctactatgcctggtcccaacttcttaaaattaaattttggggaagttcatggagatatttttgacatgtaaaagtagaaaacaaaccatccatagtgtgtgcatatatacacacaaggtttggtttaatatacttgctgtgcactagtcagttttgattcaggttacataagggataaaatatagaaagacattttaaagtttgaaatatgtgctaagtagttagagatttggcagttttgccacatttcaaatgggccaaacattaaaataacttatccatgaatttcaggtttcaaggaaggaggaatatctgactatttttttttgtgtgtgagatttggtctcagctttttggtccatctgaatcctggaagtccccaactctaccagaccaaaagggtgtctctattttttgttgttacttctctgttcttgatgtaatgagttaagtagatgaaagagattaaggtgcagggaagggctcttaaaagtttaatgtttcagctttccatagtcattcatacttgtgaatcttcttcctcttctacttcaaagtagccaaaacttggaaagttcaaattaatctttgggctccaaagagcaattctgaaggattaacaggtttcattctctccagtgggaggtggcctagacaggtgccggttttggggagaggtgagagtacccagatgtgggtgactatttcctgttcttccctgaaagtcaggccagtggtctcgaatcattcccacagcaactgctacaaaagtgactatcttaatcctttggctagatgggatacctcttctaccttttcagaggtgagctgttgagtagtaatgtccgctacaacaccacgctcccggaatggtggttcctaagagcaaagtcagttaatacaatttctccaggtatccagctatctccaggtgtgcggtcctgtgaagcactctaagaactgtaaaaaatatttcataggtatagaaggcatttgtaatactgttggttcaaatgtgctgacatgtagccagtggaggaagatgtttctttggaagcctgccatctttctgtaacgcaccttcaacctgagataattaagagtcattacgtttcccagtcccatgtcacattgaccagtcctgtggtcctatggctaagcggaggacacggccacaagctgtgagtcatgaaaaggagggtgcaggtgataggcaaagggacccattagccagtttacaatgactggcaactgaccagatagagcttaccgtatgtccatgtagagttgctcatattagtctgtaaataattctatgcatagtgaatgcagcttctgaattattaaactgatgctataaatgtgaactgacaaaaccc

SEQ ID NO: 182617 - DNA, 11279 bp, Artificial Sequence
  derived and/or modified sequence
ggagctgcacgcggggctgccggggcggacgctgctctgcctgcatccggaggcggccgccagcggatttgccacccagagcataaccttcggtggcaggacaaatcaggccagcacgcagtctgccaagtcctgctcgctccctgtcaagaaaaacagctggatccatttctaatcaacacttcccaacgcaacacttctgagtctctgaaggagaccagagcttgaaactttccagacttccaacagacatcgagtgcaaaaggatatttaggttgtctttgcacaaatctggttgatttgagagataaagggggggggaaccagtgtgactttcacctaagaagtcacatgaacatatttcacatttgaactacataatgaatgatggttattgaaatagcccaaacctctaccacagagcgagggatatagctcaaggggcaaccaggcagtcgcagaaccaaggaatggatgactacaagtatcaggacaattatgggggctatgctcccagtgatggctattaccgcggcaatgagtccaacccagaagaagatgcacagagtgatgtcaccgaaggccatgatgaggaagacgagatctatgagggcgagtaccagggtatccctcacccagatgatgtcaaggccaagcaggccaagatggcgccctccagaatggacagccttcggggccagacagacctgatggctgagaggctggaagatgaggagcagttggcccaccagtacgagaccatcatggatgagtgtggccatggccgcttccagtggatcctctttttcgtcttgggtttggccctgatggccgatggggtggaagtgttcgtggtgagttttgccctgcccagtgcagagaaggacatgtgtctgtccagttccaaaaaaggaatgctagggatgatagtctacttgggaatgatggcgggcgccttcatcctgggaggcctggctgataagctgggaaggaagcgagtcctcagcatgtctctggccgtcaatgcctccttcgcctccctctcttccttcgtgcagggatatggagccttcctcttctgccgactcatctcaggcatcggtattgggggtgctctaccgattgtttttgcctatttttctgaattcttgtctcgggagaagcgaggagaacacctcagttggctgggcatcttctggatgactgggggcctgtacgcatctgccatggcctggagcatcatcccacactatggctggggcttcagcatggggaccaattaccacttccatagctggagagtgtttgtcatcgtctgtgctctgccctgcaccgtgtccatggtggccctgaagttcatgccagagagcccaaggtttctgctagagatgggcaaacatgatgaagcctggatgattctcaagcaagtccatgacaccaacatgagagctaaggggaccccagagaaagtgttcacggtttccaacatcaaaactcccaagcaaatggatgaattcattgagatccaaagttcaacaggaacctggtaccagcgctggctggtcagattcaagaccattttcaagcaggtctgggataatgccctgtactgtgtgatggggccctacagaatgaatacactgattctggccgtggtttggtttgccatggcattcagttactatggactgacagtttggtttcctgatatgatccgctattttcaagatgaagaatacaagtctaaaatgaaggtgttttttggtgagcatgtgtacggcgccacaatcaacttcacgatggaaaatcagatccaccaacatgggaaacttgtgaatgataagttcacaagaatgtactttaaacatgtactctttgaggacacattctttgacgagtgctattttgaagacgtaacatcaacagatacctacttcaaaaattgtaccattgaatcaaccatcttttacaacacagacctctacgagcacaagttcatcaactgtcggtttatcaactccaccttcctggagcagaaggagggctgccacatggacttggagcaagataatgacttcctgatttacctcgtcagcttcctgggcagcctgtctgtcttacccgggaacatcatttctgccctgctcatggatagaattggaaggctcaagatgattggtggctccatgctaatctctgcagtctgctgcttcttcctgttttttggcaacagtgagtctgcaatgatcggctggcagtgcctgttctgtgggacaagcattgcagcctggaatgctctggatgtgatcacagtggagctgtatcccaccaaccagagagcaacagccttcggcattctcaatggattatgcaaatttggcgccatcctgggaaacaccatctttgcttcttttgttgggataaccaaagtggtccccatccttctggctgctgcttctctggttgggggtggcctgattgcccttcgactgccagagactcgagaacaggtcctgatgtgaacaacctatgggaaaaggaaaggtcgagagaatcttgtccaggacactgaaatgcatccacacttcctgcctatcacggtccggaggacaccttggatagcacgggaggagaagttgactttgtgacccctagtttaggacccacttcagctgtcaatatgtttgtaactcaggtgactgatttgggggtgccctgagccacccttagaatcacagagctgcgtgtttaacttcaagtcttcccagtccaaggcagggagaggattctccagtgagtgcacacactatgcgaggagcaagcatttctctaagtcaagtgcaaggacttaacttgcgtttgaaaaggaattagagggtcagaaacacccaggttcctccagaaagctccttggagcccaacaacttaacaaatcaacttggctggaagttagagtcattatatgaagattgggcttgaagtatatatttttgcatttaaaagtatcacctatcatattttccactcgaaaattgacatagtagcattgaggatactctgatctagaaagccaagtatttgagcaacatctatagagatctacttttctcctatgtctcctaggctttccatgataattaggtaatacatttaagaaggatatttatttctgttttgctctattcaaagaaacggaatgggatagttattctgtaaactaagtttgtatataactttatttgggtttaatttccacaactggtatctgcaaatattgccagcattttagccatattttgggagaacttggtgtttgaggtcccaggaaatgaggtctgatcaaatgaaatgcaagcacaatttcttacagccatttaactttctgttgggaggatgaattaacaaactcacattgtgcagtctgcttaatccaggcacttttctttgtgcaggtgtagtgagtagttacttctctcccttacacagatgacttgtgaaactcaagctcaccatcttcagtgctggcattttactttgccactacccaaaaacaatgtgagatgtgttcagtggcctctggtactctttgcaggcaagaatcaaacaacatggggactgagggaaggatggggaagtgtagccacagttcttccaaatgtaaatactttttgtttgttctagtggtaaaatgcaaatgcaatccatatttgttaggatggtcaggtctcatgagaaatctatgctatgtgtccagagcttttgaaacagagtccattggagtgggagttagggagtgtagtggatgccaaatatgtttttcttcagtgcttaagagaactgtttcctgaagtccagctttgaacataaacaggggtgtgggttgggggaggagcttaggacaaacctctctgatgaaggtcagcaatagactgaagtcttgactgcatggaagaggaaaaacatcagaactgtctgacaatggaggggacagtgagctacgcacaactgccagcggaggtgaacttgcacctgcccaggccggatgaacatcagcctgcaagaactagttgtttgagttgatttgcagtgctctcaatgggcaagtgccacattttccctggcagagatctccaaaaatttaaaacagaataataatggctatatcgagtgttttctcagtattggagaaatgcttaggtcctatgatagcttcgggacatctttctgtaattttcctcaattaacgggttggtaggggtaaatcttatgacacctttccaccgtcgatttgagatcagttttaatggttaaaatgtttactctccttctgtcaaccctcacctttttatttacacccctccctttttttctgtacagggagagaagacatattgactctgactggacaccctgattcctccaaatatatataccactgtgtattaatctttctctcagtgttttataggagtactaacatttattgctctgtcaataatgaaaggctcgatgtaatatagctgtaatttactttccatatgaatacagtggctaggttcataaaagagaattgtgtgagtctgggattaccacatctaaaacattattctttaatgggataatacaattcattgagcagctaccacttaaaaaacttgcaggacagttagagcctgcatttctagttaagatggatcttgtaaatttaaaattggattaacattggagtgctggggtggctgcaataatttgggggctaactccatttggtttccaagatctcacttctgcattatctttatggctctttaaaccagccacctagccaatcaagggcaattcccatctcatccatcactcaggtctttgtaaagggtgcagccaagctctgcagacttttgcaggattgtctagcctgagtaccgggctacttcttaaatgccgtcactcctgctgagataaatgcgtctttaaaaatagtctctgtggcaggtcactgggggacaatgtacagcattctggccatccacttctttttcacttcatgttctaccccaagagactcccgatgtcggctgtggagggttaaagggatgaggctttcctttgtttagcaaatctgttcacagttcttgatgatgtattttatgatgcccagcttggaaatagttgctttccatagtctcaactgtattgtgtcatctcctgatgctgatttttgatcttttgttttattaaaaataattagtgaaagaggtgtgcctatctgtgaagtttgtagtacatcatcctgaggtcatgtaacaagtaaaccccaacccagcgttccctcctacgttgtgttagttcattaaaactaaataataaaaataactgtaagaaaaccttaaggactggggttagagattattttcaggcactaaggtctcttctgtattccaaaattgattgaatcagctgggagaaacattgagaatcgcttccttcaacttttattttgcaacatggggaccttgagaggttaaacgatgtggcccagattacatgtaatgtgaggagtgggcgagaaggcctaaggtgatgctctcatgacagttctggggaagcctgcagtttggggaatgggacaatgtgacaaatactcgccattccctgagaccattcattgactattcccttgatggctttactataatgagaggaagcatcagtttaaacataaaaagattagtatttatccatccatttattcattcagcaaatccttattgagccctgaccatgggccagtctctctgccaagccctggggacacagtgatgaaaaaactggccacagtttctgcttcctgcctcattccacttgcagtgagcggatattaaattggccataaacaccgagtacgatgaccttacaatccgcaaactgcacctttcatgtgtaaaaggattgctactactttacttgtcagctgtggatttccaaatgtggtggctccctcttatttttttttctttgaggagtgtaccaattttttatctttataaaccaggtaagggaaatgatgcccttgcccattttctacagacctaatcgatttttacctaatcagttttacagaaagggttacatggaagaagagataggggccaggaatgcaagagggacattggtgagtggggtaagaatccccgtagccctgggaaaggtgtctccacttccacatctggcttttctagggggcatctgtgctaactgacctgggattatgttggatggcatatgactgcaaattcaaagaaaccaatttataataagtttatagtaagttaaaggtttgttttactctcatgtgaagggaatctggaggaaggaaagccagggctggagtggctgcctttgatcatgggagcacactccttctgcccgatcattgggagcacactccttctgcctgatcgttgggagcacactcctgcctgatcatgggcgcacgttccttctgcctgatcgttgggagcacactccttctgcctgatcatgggagcacactccttctgcctgatcattgggagcacgctccttctgcctgatcgttgggagcacactctttctgcctgatcgttgggagcacaccccttctgcctgatcattgggagcacactccttctgcctgatcatgggcacacgctccttctgcccgatcatgggcacacgctccttctgcccgatcgttgggagcacactccttctgcccaatcattgggctcacgctccttctgcccgatcgctgggctcacgctccttctgcccgatcttgggcgcacgctccttctgcccgatcgttgggcgcacgctccttctgcccgatcgttgggcgcatgctccttctgcccgatcgttgggagcacgctcattctgcccgattgttgggagcacgctccttctgcccgatcgttgggcgcacgctccttctgcccgatcgttgggcgcacgcttcttctgcctgatcgttgggcgcacgctccttctgcctgatcgttgggcgcacgctccttctgcctgatcgttgggagcacgctccttctgcctgattgttggaagcacgctccttctgccttcagactccttgatttttagtgcagtttccatcactgaggctgcctcatgggctgagatggctgttgaagcactgaacctcacatccacaattcaggcaggaagcagaaggaagggcaatgggcaaaggggctgtgccttgcagccgatccagcctccctttgctgcagaggaggcagggaaatgcggtatttactgggaacattgctgcccctcctccaaattgagggtcttggctcgaaggacaaaagccagaaaggataggtggattagtgcttcttaaacttttgcgtgcatcagaatcacccagaaagatgttaaaactcactcttcaaggccccatccccagagattcggattctggggatttggaatctggggtggggtctgaagaatctgcattttttaacaaactcccaggtgacatagatggcatcaattctcaagccatattttgagtagcactgacactcttccaataggtggtactttgacttgtcagggaagttctattgctctgataacttaaaaccaacccaaccagaagctcacaaaaactagcagcctgtgaaaaatgatcaccattttcctagagctccgagacaactagtggtagtgcaacagtaacccaaaaatgtcaatgaaaatatttccttccccagaaactgcttggtttcactcaggtcctgtccttatgggcctgtgtctggttgcagggcttgaagtatttcggaagctcagcagaggttgaaccctttcccctgggggttggtgatctttgttttggccatttccacctggtgaagattttcatagacaaatatgcttgtggcatcctgtaattcattgtgccttatgatggacctctgattctataagcttccccctagctagggatgcacgggggtgatcaagacatgactagatgtgaacctgacctgcagacagtccacctgaacgtgcctggaaatgtctcccgaaaaggatgaaaagcctcctcctttagacaaggaagacagagtggagcaaatttctctacatagatctcattcgaaaacaaatttacagaatgcagaatggctactgtgtgtcttgtgctatgctaggtctctctctctctaagtggactctgaccctgtccaaaacattgtgcttttgcatgtagctgtgtcgcatttaggcccagctctaagaaccgtttggaaataaatcacatagagcctttgattgtgaggcaggcttaaagtacattttgtttgatttgcagaggcatggtgaggaatttatatgcatggctgttgtggcagcagcgagatttccaaaaagatgaatgatgaaatgaaacagactgaagctatctcacaaatgttaaatggagaaataaaagttgttatagtcattgctaattacagaatgagcaagagatttatttagcaggaccatactatgccccctggaaggttcagtttatgagctggagcacaaggatttactgtcatttcacctgaaaacacacatttagctgtccatttacctttaatcctacaggcttaaaatactttaaaatttcagagaccattaatatgtattcctttagaaagcaaaggtctttcagaagctgtcctctaccaaagttaatgtggtcaccacatttgatgattttgctaggtagggaggtttatttaatcacagctactgtcactcaggaggatgagccatttaaaaatggtggccctgtcctccacttcttacctaccatatataatctcagtaattcagatttctctaaatcagcattagtgatcatttcaatagggtatgaacaaaaggcctataaaaatagctttccaattcgccaccaaaaatgcaaaaatgacaagtaagtgaggtaacgcatgagctaaatagcttgatttagtcactctaaaatgtgggtgtgtatatatacatacatatatatacacacacacattatgttatacaccataaatatatagaagttttacttgtcaattaaaactataaataaagtggctttccagaaaaattagatattggactctatcacaaaggaattgcataaaaatacttacaaacataactataagcaattgatgagcaaattacaaatgactgttttttattaaaacattcctccaaaagaacggcaaagcaaatcccatagacacccaaaatactaaaagtgacaaaacaatacttctttaaaaatgtattttatgatctatttattgatattctaatggttttaagaaggataattttccaaaacctaaatgctacacattttacagtggcaatatcaaccttatcatgagctaaagatttgcaatcagaacattggtagagtgcattgctgagttataacaagtgtctcaggacgaggatatttggtaggtatccttaaatatatagatgcttaccagtaggtttaatagaagatttctgaaaggtagcgcaagtttttatttcattatttttatttttatttttttgagacagagtctcactctgtcatctaggctggagtgcagtggtgcaatcttggcttgctgcaatctccacctcccaggttcaagcgattctcccacctcagcctcccgagtagctgggattacaggcatgcgccaccatgcctggctaatttttgtatttttagtagagacggggtttcgccatgttggccaggctcgtctcgaactcctggcctcaagtgatctgcccgcctcagcctcccaaagtgctgggattacaaatgtgagctactatgcctggtcccaacttcttaaaattaaattttggggaagttcatggagatatttttgacatgtaaaagtagaaaacaaaccatccatagtgtgtgcatatatacacacaaggtttggtttaatatacttgctgtgcactagtcagttttgattcaggttacataagggataaaatatagaaagacattttaaagtttgaaatatgtgctaagtagttagagatttggcagttttgccacatttcaaatgggccaaacattaaaataacttatccatgaatttcaggtttcaaggaaggaggaatatctgactatttttttttgtgtgtgagatttggtctcagctttttggtccatctgaatcctggaagtccccaactctaccagaccaaaagggtgtctctattttttgttgttacttctctgttcttgatgtaatgagttaagtagatgaaagagattaaggtgcagggaagggctcttaaaagtttaatgtttcagctttccatagtcattcatacttgtgaatcttcttcctcttctacttcaaagtagccaaaacttggaaagttcaaattaatctttgggctccaaagagcaattctgaaggattaacaggtttcattctctccagtgggaggtggcctagacaggtgccggttttggggagaggtgagagtacccagatgtgggtgactatttcctgttcttccctgaaagtcaggccagtggtctcgaatcattcccacagcaactgctacaaaagtgactatcttaatcctttggctagatgggatacctcttctaccttttcagaggtgagctgttgagtagtaatgtccgctacaacaccacgctcccggaatggtggttcctaagagcaaagtcagttaatacaatttctccaggtatccagctatctccaggtgtgcggtcctgtgaagcactctaagaactgtaaaaaatatttcataggtatagaaggcatttgtaatactgttggttcaaatgtgctgacatgtagccagtggaggaagatgtttctttggaagcctgccatctttctgtaacgcaccttcaacctgagataattaagagtcattacgtttcccagtcccatgtcacattgaccagtcctgtggtcctatggctaagcggaggacacggccacaagctgtgagtcatgaaaaggagggtgcaggtgataggcaaagggacccattagccagtttacaatgactggcaactgaccagatagagcttaccgtatgtccatgtagagttgctcatattagtctgtaaataattctatgcatagtgaatgcagcttctgaattattaaactgatgctataaatgtgaactgacaaaaccca

SEQ ID NO: 182618 - DNA, 2099 bp, Artificial Sequence
  derived and/or modified sequence
atatttattggtctgcaaatccggagaccttgcggcctcactggtcctccttccctctgagctatctccacacccagccttcgatcagaaggagatttagaagcagagctgcccgcagcgaatacttttaatgcccgggccgggaagaaagcgggttaggatctgatcccgctgagtagaggacccaggagcctcccgccccgcgtgctctgtagcgcgggggcgcgctgcgcgctgcgcctgggcggctggcgggggcggcgtgggcgcggtgatgcaggtgtgacacccgccggcgcctgcctccgcccggatcgcccagctccgcgttagccggagctgcacgcggggctgccggggcggacgctgctctgcctgcatccggaggcggccgccagcggatttgccacccagggatgatagtctacttgggaatgatggcgggcgccttcatcctgggaggcctggctgataagctgggaaggaagcgagtcctcagcatgtctctggccgtcaatgcctccttcgcctccctctcttccttcgtgcagggatatggagccttcctcttctgccgactcatctcaggcatcggtattgggggtgctctaccgattgtttttgcctatttttctgaattcttgtctcgggagaagcgaggagaacacctcagttggctgggcatcttctggatgactgggggcctgtacgcatctgccatggcctggagcatcatcccacactatggctggggcttcagcatggggaccaattaccacttccatagctggagagtgtttgtcatcgtctgtgctctgccctgcaccgtgtccatggtggccctgaagttcatgccagagagcccaaggtttctgctagagatgggcaaacatgatgaagcctggatgattctcaagcaagtccatgacaccaacatgagagctaaggggaccccagagaaagtgttcacggtttccaacatcaaaactcccaagcaaatggatgaattcattgagatccaaagttcaacaggaacctggtaccagcgctggctggtcagattcaagaccattttcaagcaggtctgggataatgccctgtactgtgtgatggggccctacagaatgaatacactgattctggccgtggtttggtttgccatggcattcagttactatggactgacagtttggtttcctgatatgatccgctattttcaagatgaagaatacaagtctaaaatgaaggtgttttttggtgagcatgtgtacggcgccacaatcaacttcacgatggaaaatcagatccaccaacatgggaaacttgtgaatgataagttcacaagaatgtactttaaacatgtactctttgaggacacattctttgacgagtgctattttgaagacgtaacatcaacagatacctacttcaaaaattgtaccattgaatcaaccatcttttacaacacagacctctacgagcacaagttcatcaactgtcggtttatcaactccaccttcctggagcagaaggagggctgccacatggacttggagcaagataatgacttcctgatttacctcgtcagcttcctgggcagcctgtctgtcttacccgggaacatcatttctgccctgctcatggatagaattggaaggctcaagatgattggtggctccatgctaatctctgcagtctgctgcttcttcctgttttttggcaacagtgagtctgcaatgatcggctggcagtgcctgttctgtgggacaagcattgcagcctggaatgctctggatgtgatcacagtggagctgtatcccaccaaccagagagcaacagccttcggcattctcaatggattatgcaaatttggcgccatcctgggaaacaccatctttgcttcttttgttgggataaccaaagtggtccccatccttctggctgctgcttctctggttgggggtggcctgattgcccttcgactgccagagactcgagaacaggtcctgatgtgaacaacctatgggaaaaggaaaggtcgagagaatcttgtccaggacactgaaatgcatccacacttcctgcctatcacggtccgg

SEQ ID NO: 182619 - DNA, 4077 bp, Artificial Sequence
  derived and/or modified sequence
gctgctctgcctgcatccggaggcggccgccagcggatttgccacccaggtcctaagactctcagtccagagagggccctgccccacacccagaaggaaggaatgctgcccagagatgaccagaggaatctagacagagcataaccttcggtggcaggacaaatcaggccagcacgcagtctgccaagtcctgctcgctccctgtcaagaaaaacagctggatccatttctaatcaacacttcccaacgcaacacttctgagtctctgaaggagaccagagcttgaaactttccagacttccaacagacatcgagtgcaaaaggatatttaggttgtctttgcacaaatctggttgatttgagagataaagggggggggaaccagtgtgactttcacctaagaagtcacatgaacatatttcacatttgaactacataatgaatgatggttattgaaatagcccaaacctctaccacagagcgagggatatagctcaaggggcaaccaggcagtcgcagaaccaaggaatggatgactacaagtatcaggacaattatgggggctatgctcccagtgatggctattaccgcggcaatgagtccaacccagaagaagatgcacagagtgatgtcaccgaaggccatgatgaggaagacgagatctatgagggcgagtaccagggtatccctcacccagatgatgtcaaggccaagcaggccaagatggcgccctccagaatggacagccttcggggccagacagacctgatggctgagaggctggaagatgaggagcagttggcccaccagtacgagaccatcatggatgagtgtggccatggccgcttccagtggatcctctttttcgtcttgggtttggccctgatggccgatggggtggaagtgttcgtggtgagttttgccctgcccagtgcagagaaggacatgtgtctgtccagttccaaaaaaggaatgctagggatgatagtctacttgggaatgatggcgggcgccttcatcctgggaggcctggctgataagctgggaaggaagcgagtcctcagcatgtctctggccgtcaatgcctccttcgcctccctctcttccttcgtgcagggatatggagccttcctcttctgccgactcatctcaggcatcggtattgggggtgctctaccgattgtttttgcctatttttctgaattcttgtctcgggagaagcgaggagaacacctcagttggctgggcatcttctggatgactgggggcctgtacgcatctgccatggcctggagcatcatcccacactatggctggggcttcagcatggggaccaattaccacttccatagctggagagtgtttgtcatcgtctgtgctctgccctgcaccgtgtccatggtggccctgaagttcatgccagagagcccaaggtttctgctagagatgggcaaacatgatgaagcctggatgattctcaagcaagtccatgacaccaacatgagagctaaggggaccccagagaaagtgttcacggtttccaacatcaaaactcccaagcaaatggatgaattcattgagatccaaagttcaacaggaacctggtaccagcgctggctggtcagattcaagaccattttcaagcaggtctgggataatgccctgtactgtgtgatggggccctacagaatgaatacactgattctggccgtggtttggtttgccatggcattcagttactatggactgacagtttggtttcctgatatgatccgctattttcaagatgaagaatacaagtctaaaatgaaggtgttttttggtgagcatgtgtacggcgccacaatcaacttcacgatggaaaatcagatccaccaacatgggaaacttgtgaatgataagttcacaagaatgtactttaaacatgtactctttgaggacacattctttgacgagtgctattttgaagacgtaacatcaacagatacctacttcaaaaattgtaccattgaatcaaccatcttttacaacacagacctctacgagcacaagttcatcaactgtcggtttatcaactccaccttcctggagcagaaggagggctgccacatggacttggagcaagataatgacttcctgatttacctcgtcagcttcctgggcagcctgtctgtcttacccgggaacatcatttctgccctgctcatggatagaattggaaggctcaagatgattggtggctccatgctaatctctgcagtctgctgcttcttcctgttttttggcaacagtgagtctgcaatgatcggctggcagtgcctgttctgtgggacaagcattgcagcctggaatgctctggatgtgatcacagtggagctgtatcccaccaaccagagagcaacagccttcggcattctcaatggattatgcaaatttggcgccatcctgggaaacaccatctttgcttcttttgttgggataaccaaagtggtccccatccttctggctgctgcttctctggttgggggtggcctgattgcccttcgactgccagagactcgagaacaggtcctgatgtgaacaacctatgggaaaaggaaaggtcgagagaatcttgtccaggacactgaaatgcatccacacttcctgcctatcacggtccggaggacaccttggatagcacgggaggagaagttgactttgtgacccctagtttaggacccacttcagctgtcaatatgtttgtaactcaggtgactgatttgggggtgccctgagccacccttagaatcacagagctgcgtgtttaacttcaagtcttcccagtccaaggcagggagaggattctccagtgagtgcacacactatgcgaggagcaagcatttctctaagtcaagtgcaaggacttaacttgcgtttgaaaaggaattagagggtcagaaacacccaggttcctccagaaagctccttggagcccaacaacttaacaaatcaacttggctggaagttagagtcattatatgaagattgggcttgaagtatatatttttgcatttaaaagtatcacctatcatattttccactcgaaaattgacatagtagcattgaggatactctgatctagaaagccaagtatttgagcaacatctatagagatctacttttctcctatgtctcctaggctttccatgataattagggagagaagacatattgactctgactggacaccctgattcctccaaatatatataccactgtgtattaatctttctctcagtgttttataggagtactaacatttattgctctgtcaataatgaaaggctcgatgtaatatagctgtaatttactttccatatgaatacagtggctaggttcataaaagagaattgtgtgagtctgggattaccacatctaaaacattattctttaatgggataatacaattcattgagcagctaccacttaaaaaacttgcaggacagttagagcctgcatttctagttaagatggatcttgtaaatttaaaattggattaacattggagtgctggggtggctgcaataatttgggggctaactccatttggtttccaagatctcacttctgcattatctttatggctctttaaaccagccacctagccaatcaagggcaattcccatctcatccatcactcaggtctttgtaaagggtgcagccaagctctgcagacttttgcaggattgtctagcctgagtaccgggctacttcttaaatgccgtcactcctgctgagataaatgcgtctttaaaaatagtctctgtggcaggtcactgggggacaatgtacagcattctggccatccacttctttttcacttcatgttctaccccaagagactcccgatgtcggctgtggagggttaaagggatgaggctttcctttgtttagcaaatctgttcacagttcttgatgatgtattttatgatgcccagcttggaaatagttgctttccatagtctcaactgtattgtgtcatctcctgatgctgatttttgatcttttgttttattaaaaataattagtgaaaga

SEQ ID NO: 182620 - protein, 1099 aa, Artificial Sequence
  derived and/or modified sequence
MSSQTKFKKDKEIIAEYEAQIKEIRTQLVEQFKCLEQQSESRLQLLQDLQEFFRRKAEIELEYSRSLEKLAERFSSKIRSSREHQFKKDQYLLSPVNCWYLVLHQTRRESRDHATLNDIFMNNVIVRLSQISEDVIRLFKKSKEIGLQMHEELLKVTNELYTVMKTYHMYHAESISAESKLKEAEKQEEKQFNKSGDLSMNLLRHEDRPQRRSSVKKIEKMKEKRQAKYSENKLKCTKARNDYLLNLAATNAAISKYYIHDVSDLIDCCDLGFHASLARTFRTYLSAEYNLETSRHEGLDVIENAVDNLDSRSDKHTVMDMCNQVFCPPLKFEFQPHMGDEVCQVSAQQPVQTELLMRYHQLQSRLATLKIENEEVRKTLDATMQTLQDMLTVEDFDVSDAFQHSRSTESVKSAASETYMSKINIAKRRANQQETEMFYFTKFKEYVNGSNLITKLQAKHDLLKQTLGEGERAECGTTRPPCLPPKPQKMRRPRPLSVYSHKLFNGSMEAFIKDSGQAIPLVVESCIRYINLYGLQQQGIFRVPGSQVEVNDIKNSFERGEDPLVDDQNERDINSVAGVLKLYFRGLENPLFPKERFQDLISTIKLENPAERVHQIQQILVTLPRVVIVVMRYLFAFLNHLSQYSDENMMDPYNLAICFGPTLMHIPDGQDPVSCQAHINEVIKTIIIHHEAIFPSPRELEGPVYEKCMAGGEEYCDSPHSEPGAIDEVDHDNGTEPHTSDEEVEQIEAIAKFDYMGRSPRELSFKKGASLLLYHRASEDWWEGRHNGVDGLIPHQYIVVQDMDDAFSDSLSQKADSEASSGPLLDDKASSKNDLQSPTEHISDYGFGGVMGRVRLRSDGAAIPRRRSGGDTHSPPRGLGPSIDTPPRAAACPSSPHKIPLTRGRIESPEKRRMATFGSAGSINYPDKKALSEGHSMRSTCGSTRHSSLGDHKSLEAEALAEDIEKTMSTALHELRELERQNTVKQAPDVVLDTLEPLKNPPGPVSSEPASPLHTIVIRDPDAAMRRSSSSSTEMMTTFKPALSARLAGAQLRPPPMRPVRPVVQHRSSSSSSSGVGSPAVTPTEKMFPNSSADKSGTM

SEQ ID NO: 182621 - DNA, 3300 bp, Artificial Sequence
  derived and/or modified sequence
atgtcctcacagacaaagtttaagaaagataaggaaatcatagccgaatacgaagcccagattaaagaaattagaacacagcttgtcgaacaatttaagtgtctggaacaacagtcagagtcacgcctgcaattgctccaggatcttcaggaattctttagacgaaaagctgagatcgagctggagtactccaggtcacttgagaagctggcggagagattcagttcaaaaattagatccagtagagagcatcagtttaagaaggatcagtacctcctatcccccgttaactgttggtacctggtgttacaccagactagacgggagtcccgcgatcacgccactctgaatgatatcttcatgaataacgttatcgtgagactgagtcagattagtgaggacgtaatccggctgtttaaaaaatccaaagagattggactccaaatgcatgaagagctgttgaaggttaccaatgaattgtacactgtgatgaagacataccatatgtaccacgcagaatccattagcgctgaatcaaaactgaaggaagccgagaagcaggaggaaaagcaatttaataaatctggggaccttagtatgaacctcttaagacacgaggaccggccgcagcggcggtcatccgtaaaaaaaatagagaagatgaaggaaaaaagacaagcaaagtatagtgagaataagctcaagtgcacaaaagcccggaatgattacctgctgaacttagccgcgacaaacgccgccatttcgaaatactatatacacgatgtgagtgaccttatagactgttgcgatttgggcttccatgcttccctcgcgagaacatttcggacttacttaagcgcagagtacaatctcgagacctcaagacacgagggactggacgtgatagaaaatgccgtggacaatcttgacagccgctccgataaacataccgtgatggacatgtgtaatcaggtcttttgccccccattaaaatttgagtttcagcctcacatgggagatgaagtgtgccaggtaagtgcacagcagccagtccaaaccgaacttcttatgcggtaccaccagctacagagccggttggccactcttaaaatcgagaacgaggaagtaaggaagacattggacgcaaccatgcagacattgcaggacatgctgaccgtagaggactttgacgtgagcgacgctttccagcactcaagatccacggaatccgttaagtctgcggccagcgagacgtatatgtcaaaaatcaacatcgctaaacggcgggccaatcaacaggaaaccgagatgttttatttcactaagtttaaggagtacgttaacgggtccaatctcatcaccaagctacaggcaaagcacgacctactcaagcagactttaggagagggagaacgggcggagtgcggcacaacccggccaccatgccttccgccgaagccgcaaaaaatgagacgtccaagacccttaagcgtgtattctcacaagttgtttaacggaagcatggaggcatttatcaaggatagcgggcaagccatccccttggtagtggagtcctgtatccgatatattaacctctacggcctgcagcagcaaggcatctttagggttccagggtcacaggtggaggtgaacgacattaaaaatagcttcgagcgcggcgaggatcctttggtagacgaccagaacgagcgggatattaactccgtggctggcgtcctcaagctgtattttcgagggttagagaatcccctgtttccgaaagaacgttttcaggatttgattagtaccatcaagctcgaaaaccccgccgagagagtgcatcagatacagcagatcctagtcacacttccacgcgtcgtcatcgtcgtcatgcggtatctgtttgcctttctcaaccatttaagccagtatagcgacgaaaacatgatggatccctacaatctcgccatctgcttcgggccaaccctgatgcacatcccagacgggcaggaccccgtctcctgtcaggcacacattaacgaggtcatcaagacaattataatacaccacgaagcaatttttcctagccctcgtgagctggagggacctgtctacgagaagtgcatggccggcggcgaggagtactgcgattccccccattcagaaccaggggcaatcgatgaggttgaccacgataatgggactgaaccacatacatctgacgaagaggtggaacagattgaagctatagcgaagttcgattacatgggacgctcaccacgcgaattgtcgttcaagaagggcgcttctctgctattgtaccacagggccagtgaagattggtgggagggcagacacaatggtgtcgatggcctgatcccccatcagtacattgtcgtgcaggatatggatgacgcattctctgattccctgagccagaaagccgatagtgaagcatcctccggtcctctcctggacgataaggctagctccaaaaatgatttgcagagcccgaccgagcatatctcagattacggattcggtggagtgatgggcagggttcgtctccgtagtgacggagccgctatcccccgacgcagaagcggcggcgatacccatagcccccccaggggtcttggcccttctattgacacgccacccagagccgctgcttgcccatcttcccctcataaaattcccctcacccgcggcagaatagagagtcccgaaaagcgccgaatggcgacgtttgggtccgccggatcaatcaattatccagacaagaaggccctgagtgaaggccacagtatgaggagcacatgcggtagtacccgacattccagccttggcgatcataaatcgctggaagccgaagcactggctgaggacatcgaaaagaccatgtccacagctctccacgagttaagagaactggagcgacaaaatacagtgaaacaggcacccgacgtcgtgctcgacactctggaacccctaaagaacccgcctggcccagtctctagcgagcccgcatcccctctgcacaccatagtgattagggatccagacgcagccatgagacgctcaagtagtagtagcactgaaatgatgactacgttcaaacctgctctctctgcaagactcgcgggtgcccagctccgtccacctccaatgcggcctgttcgaccagtcgtgcagcatcggagctcctcatcatcgagttcaggcgtggggagccccgctgtgactcccaccgaaaagatgttcccaaactcctcagccgacaaatccggcacaatgtag

SEQ ID NO: 182622 - DNA, 3300 bp, Artificial Sequence
  derived and/or modified sequence
atgagcagccagaccaagttcaagaaggacaaggagatcatcgccgagtatgaggcccagatcaaggagatccgcacccagctggtggagcagttcaagtgcctggagcagcagagcgagagccggctgcagctgctgcaggacctgcaggagttcttccggaggaaggccgagattgagctggagtacagccgcagcctggagaagctggccgagcgcttcagcagcaagatccgcagcagccgggagcaccagttcaagaaggaccagtacctgctgagccctgtgaactgctggtacctggtgctgcaccagacccggcgggagagccgggaccacgccaccctgaatgacatcttcatgaacaacgtgattgtgcggctgagccagatcagtgaagatgtgatccgcctcttcaagaagagcaaggagatcggcctgcagatgcatgaggagctgctgaaggtgaccaatgagctgtacacagtgatgaagacctaccacatgtaccacgccgagagcatctctgctgagagcaagctgaaggaggccgagaagcaggaggagaagcagttcaacaagagcggggacctgtccatgaacctgctgcggcatgaggaccggccccagaggaggagctctgtgaagaagattgagaagatgaaggagaagaggcaggccaagtacagcgagaacaagctgaagtgcaccaaggccagaaatgactacctgctgaacctggccgccaccaatgctgccatcagcaagtactacatccatgatgtgtctgacctgattgactgctgtgacctgggcttccacgccagcctggcccggaccttccgcacctacctgtctgctgagtacaacctggagaccagcagacatgagggcctggatgtgattgaaaatgctgtggacaacctggacagcagaagtgacaagcacacagtgatggacatgtgcaaccaggtgttctgcccccccctgaagtttgagttccagccccacatgggagatgaggtgtgccaggtgtctgcccagcagcctgtgcagacagagctgctgatgagataccaccagctgcagagccggctggccaccctgaagattgaaaatgaggaggtgaggaagaccctggatgccaccatgcagaccctgcaggacatgctgactgtggaggactttgatgtgtctgatgccttccagcacagccgcagcacagagagcgtgaagtctgctgccagcgagacctacatgagcaagatcaacatcgccaagaggcgggccaaccagcaggagacagagatgttctacttcaccaagttcaaggagtatgtgaatggcagcaacctgatcaccaagctgcaggccaagcatgacctgctgaagcagaccctgggggagggggagcgggcagaatgtggcaccacccggcccccctgcctgccccccaagccccagaagatgagaagaccccggcccctgtctgtgtacagccacaagctgttcaacggctccatggaggccttcatcaaggacagcggccaggccatccccctggtggtggagagctgcatccgctacatcaacctgtatggcctgcagcagcagggcatcttccgggtgcccggcagccaggtggaggtgaatgacatcaagaacagctttgaaagaggagaggaccccctggtggatgaccagaatgaaagagacatcaacagcgtggccggcgtgctgaagctgtacttccggggcctggagaaccccctcttccccaaggagcgcttccaggacctgatcagcaccatcaagctggagaacccagctgagcgggtgcaccagatccagcagatcctggtgaccctgccccgggtggtgattgtggtgatgagatacctgtttgccttcctgaaccacctgagccagtacagtgatgagaacatgatggacccctacaacctggccatctgcttcggccccaccctgatgcacatcccagatggccaggaccctgtgtcctgccaggcccacatcaatgaggtgatcaagaccatcatcatccaccacgaggccatcttccccagcccccgggagctggagggccctgtgtatgagaagtgcatggccggcggggaggagtactgtgacagcccccacagcgagcccggggccattgatgaggtggaccatgacaatggaacagagccccacaccagtgatgaggaggtggagcagatcgaggccatcgccaagtttgactacatgggccgcagcccccgggagctgtccttcaagaagggggccagcctgctgctgtaccaccgggccagcgaggactggtgggagggccgccacaatggagtggatggcctcatcccccaccagtacatcgtggtgcaggacatggatgatgccttcagtgacagcctgagccagaaggctgacagcgaggccagcagcggccccctgctggatgacaaggccagcagcaagaatgacctgcagagccccacagagcacatcagtgactatggctttggaggagtgatgggccgggtgcggctgcggagtgatggagctgccatcccccggcggcgcagcggcggggacacccacagccccccccggggcctgggccccagcattgacaccccacccagggctgctgcctgccccagcagcccccacaagatccccctgacccggggccgcatcgagagccctgagaagaggaggatggccacctttggatctgctggcagcatcaactacccagacaagaaggccctgtctgagggccacagcatgaggagcacctgtggcagcaccaggcacagcagcctgggggaccacaagagcctggaggccgaggccctggccgaggacatcgagaagaccatgagcacagccctgcacgagctgcgggagctggagcggcagaacacagtgaagcaggccccagatgtggtgctggacaccctggagcccctgaagaaccccccaggccctgtgtcctctgagcccgccagccccctgcacaccatcgtcatccgggaccctgatgctgccatgaggaggagcagcagcagcagcacagagatgatgaccaccttcaagccagccctgagcgcccggctggccggggcccagctgcggcccccacccatgaggcctgtgcggcctgtggtgcagcacaggagcagcagcagcagcagcagcggcgtgggcagccctgctgtgacccccacagagaagatgttccccaacagcagcgctgacaagagcggcaccatgtag

SEQ ID NO: 182623 - DNA, 3300 bp, Artificial Sequence
  derived and/or modified sequence
atgagcagccagaccaagttcaagaaggacaaggagatcatcgccgagtatgaagcccagattaaggagattcggacccagttggtggaacagttcaagtgcttagagcagcagagcgaatcacgtcttcagctgctgcaggatctccaggaattttttagaagaaaggctgagatcgaactggaatacagcaggtctttagagaagttagcagagcgattttctagcaaaatcagaagtagccgcgagcatcaattcaaaaaggatcagtacctcctctctccagtgaattgctggtacctggtgcttcatcagacaaggagagaaagccgtgaccatgctactcttaatgacattttcatgaataacgttatcgtgagactgtcacaaatttcagaagatgtcattaggctctttaagaaaagcaaagaaatcggactccagatgcacgaagaactgttgaaggtcacaaatgagctatacactgtcatgaagacctatcacatgtaccacgcagaatcgatctcagctgaatcaaagctgaaagaggcagaaaagcaggaagagaagcagtttaacaagtctggagacttgagtatgaatctgctcagacacgaggatagaccacaaagaagatcttctgtcaagaaaattgagaaaatgaaagaaaaacgacaggctaagtacagtgagaacaagttgaaatgcacaaaggccagaaacgactacctgctgaatctggccgcgaccaacgccgcaattagcaaatactatatccatgatgtatctgacctgatcgattgctgcgacctgggatttcacgccagtctagcgaggacgtttcggacttatctgtcagcagaatataacctggaaacttctcgacatgagggattggacgtcatcgaaaatgctgtggacaacctagattccagaagtgacaaacacacagtgatggacatgtgcaatcaggtgttctgtcccccattaaaattcgagtttcagccacatatgggagacgaagtgtgccaggtcagtgcgcagcagccggtgcaaaccgaattgctgatgaggtatcaccagctgcagagtcgccttgcaacccttaaaatcgaaaatgaagaagtcaggaagaccctggatgctacaatgcagacgctgcaagacatgttaacagtggaagacttcgatgtgtctgacgctttccagcatagccgctcgaccgagtctgtaaagtcagcagcatccgaaacctatatgtccaagattaatatcgcaaaacgcagagccaatcagcaagaaaccgagatgttctactttactaaattcaaagagtatgtgaacgggtcaaatcttattaccaagctgcaggcaaagcacgacctgttaaaacagacactcggtgagggggaacgagccgagtgtggcacaacgcgcccaccctgtttgccccccaagccccagaaaatgcggaggccaagaccactctcagtgtactctcataagttatttaacggatccatggaggcctttatcaaagactctggccaagctatacccctggttgtggaatcctgtatccgctatataaatctctacggactccagcaacaggggatcttcagggtgcccggaagtcaagttgaggttaacgatatcaagaattcttttgagcggggggaggatccactggtggacgatcagaacgaaagagatattaattctgtagctggggttttgaagctctatttcagaggcttggagaatccactgttccccaaggaacgatttcaagatctgattagcactatcaagctggaaaatcccgccgaacgtgtacaccaaatccagcaaatattagtgaccctgccaagggtagtgattgtcgttatgagatatctgttcgcattcctcaatcacctgtctcagtacagcgacgagaacatgatggacccttataacttggcgatctgcttcggccctacgctgatgcacattccagacgggcaggatcctgtttcttgtcaggcccatatcaacgaggtcattaaaacaattatcatccaccacgaagcaatctttccgagtcccagggagctggagggcccagtctatgagaagtgtatggccggaggcgaggagtactgtgactccccccactccgagcctggcgctatcgacgaagtggatcacgataacggaaccgagccgcatacaagtgatgaagaagtcgagcaaatcgaagccatcgcaaagtttgactacatggggaggtcacccagggaattgagcttcaaaaagggagcttcgctccttctgtatcaccgagcgagcgaagattggtgggaaggaaggcacaatggcgtcgacggcctgatccctcaccaatatattgtcgtccaggacatggacgacgcgtttagtgacagcctgagccagaaagccgatagtgaggcttcatccgggcccctgttggatgacaaggcgagctctaagaacgacttgcagtctccaactgagcatattagcgactatggatttggcggcgtgatgggtcgggtccgactgagatcagacggcgctgcaataccaaggagaagaagcgggggagatacccatagcccaccacgggggttagggccttcgattgacaccccgcccagagctgctgcctgccccagttcacctcataagatcccactgacccgtggtcgtattgagtcccctgagaagaggaggatggctactttcggcagtgcgggatccatcaattatcccgacaaaaaggctctgtcagaaggtcatagtatgcgcagtacctgtggatcaacaaggcattcaagccttggagatcacaaaagcctggaggctgaagccctggccgaagatattgaaaaaacaatgtccaccgctctgcacgaattgcgggagttggagagacagaacacagtgaagcaggctccagacgtggtgttagacactctggaaccacttaagaaccctcccgggcctgtaagtagtgagcccgcaagccccctgcacaccatcgtgattcgagaccctgacgccgccatgcgccgctcaagctcctcatcaacggagatgatgaccacattcaaaccagctttatctgcccgactcgcaggggcacagttgcgtcccccgcccatgcggcctgtgagaccagtggttcagcaccgctctagctcctcatccagttctggggtgggatctccagctgttacgcctaccgaaaagatgttcccaaattctagcgctgataaatcagggaccatgtag

SEQ ID NO: 182624 - DNA, 3300 bp, Artificial Sequence
  derived and/or modified sequence
atgagcagccagacaaaatttaagaaagacaaggaaattatcgccgagtacgaggcgcagatcaaggaaattcggacccagctggtggagcagttcaaatgtcttgagcagcaaagcgagagtaggcttcagctccttcaggatctgcaggagttctttagacgaaaagccgaaattgaactggagtacagccgcagtctggagaagctggccgaaaggttctcctcgaagattcgtagcagtcgggagcaccagttcaaaaaagatcagtacctgctgtcccccgtgaactgctggtacttagtgctccatcagactcgtcgcgaaagccgcgaccatgccacgctgaatgacatattcatgaataatgtaatcgtgcgcctcagccaaatcagcgaagacgtgattagacttttcaaaaaatccaaggagataggattacagatgcatgaggagctcctgaaagtgaccaacgagctatacacagtgatgaaaacttatcacatgtaccacgccgaatcaattagcgctgagtcaaagctgaaggaggccgagaaacaggaggagaagcagtttaataagtcaggggatctctccatgaacctgcttcggcatgaggatagaccacagcgcagaagcagtgtaaagaagattgagaaaatgaaagagaaacgccaagccaagtattcagagaataagctgaagtgtaccaaggccagaaacgactacctcttgaacctggccgctaccaacgccgctattagcaaatattacatccacgatgtgtcggatctgattgattgctgcgatcttgggttccatgctagcctcgctaggacatttcgcacctatctaagtgcagagtacaatctggaaaccagtcggcatgaagggttggatgttatagagaatgctgtggacaatttggacagtagaagcgacaaacatactgtgatggacatgtgcaaccaggtgttttgccctcccctgaagttcgaattccagcctcatatgggtgatgaagtgtgccaggtgagcgcccaacaaccagtccagactgagctgttaatgcgataccaccagctgcagtcacggctggctacccttaaaatagagaatgaggaagtccgcaagactcttgatgcgacgatgcagacgctgcaggatatgctgacggtcgaggactttgacgtgagcgacgcctttcagcactctcgtagcacagaatcagtcaagtcggcggcaagcgaaacctacatgtccaaaatcaacatcgccaagaggagggctaatcaacaggagactgagatgttctatttcactaagttcaaggagtacgtgaatgggagcaatctgattacaaaactgcaggccaaacacgatttgctgaaacagacactcggcgaaggcgagcgggctgagtgtggtactaccagaccaccctgccttccccctaaaccccagaagatgaggcgtccgaggcccctgtctgtgtattcccacaagctcttcaacggctccatggaggcattcattaaggactccggacaggctattcctctcgtggtcgagtcctgcatccgctatatcaacctgtacgggctgcagcagcaggggatctttcgtgtgccgggttcccaggttgaggttaacgatatcaaaaactcattcgagcggggtgaggacccactggtcgacgatcaaaacgagagggacataaattcagtggcaggagttttgaaactgtacttcaggggcttagaaaatcccctatttccgaaggagcgcttccaggatctgatcagcactatcaaacttgagaaccctgccgaaagggtccaccagatacagcagattcttgtcactttgcctagagtggtgatagttgtcatgaggtatctgtttgctttcctcaatcatcttagccagtacagcgacgaaaatatgatggatccctataatcttgctatatgcttcggccctacattaatgcacatccctgacggccaggatcctgtgtcctgccaggcccatatcaacgaggtgataaagaccattatcatccaccacgaggcgattttcccgtccccacgcgaactcgaaggtcctgtttatgaaaagtgcatggccggtggggaagaatactgcgacagtccacactctgaacctggcgcaatagatgaagtggaccatgataatgggactgagccgcatacaagcgacgaggaagtcgagcagatcgaggcaattgccaagtttgattatatggggaggagccccagagagctgtcattcaagaagggggcaagcctcctgctgtatcacagggccagtgaggattggtgggaaggccgacataatggggtggacggattaatcccccatcagtacattgtagtacaagatatggatgatgcattcagtgattcacttagtcagaaggccgattcggaagcttcttctggccctctccttgatgataaagcatcttccaagaatgaccttcagtctcctaccgagcacataagtgactatggtttcggaggggtgatgggaagggtgcgtctccgaagtgatggggctgcaatccctagaaggcgctctggcggagacacccattctccccctagggggttgggaccatctatcgacacccctccgcgagccgcagcctgtcccagttcccctcacaagattcctctcactcgtggcaggattgaatccccggaaaaacgtagaatggcaacttttggatcagctgggtcaataaattaccccgacaagaaggccctttctgagggccacagtatgagatccacctgcggatccaccagacatagttccctaggcgatcataagtctctcgaggcagaggccttggcagaagatatcgaaaagacaatgtctacagctttgcacgaacttcgagagctggaaagacaaaacacggtgaagcaggccccagatgtcgtcctcgataccctcgaacccctcaaaaaccctcctggccctgtctcttccgagcccgcatccccactgcacaccatcgtaattagagacccagatgctgccatgaggagatcttctagctcctctacagagatgatgaccacttttaaacctgccctcagtgcaaggttggcaggcgcacagttgcggcctcctcctatgaggcctgtgaggcctgtagtgcaacacagatcatcgtcctccagttccagcggcgtggggtccccagcagtaactcctaccgaaaagatgtttcccaactcttcggctgataagagtggaaccatgtag

SEQ ID NO: 182625 - DNA, 8656 bp, Artificial Sequence
  derived and/or modified sequence
gtgtgtgtgtatgcctgtgtgcacagcacaactgtgtgcgtgtcccggtgagtgtgcctgtgcatgcgtgagtgtgtgtacgtgtgcatgtgtgtgtgagtgcgcttggttattactattattattatttttggaagaaaaatctttgaaaatctggggcaggttactgtgctcctagggtgattcttcttttgcaagaggagctgaccagggcaagctactagagccatttctcggcaagtaaagagatttttccttccagaaggagaaggatttttctccctgctctgcagccaagtgaaagagattagtccctaaacctgtgaaatcgaccagagctgtgtgattaccagggcttgagagaggactcgaaaagaaaaggagaaataaatcaaacagcctgtcagttcctttggccacgtcagaagatgtcatctcaaactaagttcaagaaagacaaagagatcattgctgaatatgaagcccaaataaaagagatccgcacgcagctggtggagcagttcaaatgtctggagcagcaatcagagtcgcgactgcagctgcttcaagacctccaggagtttttccgccggaaagctgagattgagctcgagtactcccgcagcctggagaagctggctgagcgcttctcctccaaaatccgcagctcccgggagcaccagttcaagaaggaccagtacctcctctcgcctgtgaactgttggtatctggttctgcatcagacccggcgggagagccgagaccatgccaccctcaatgacatcttcatgaacaatgtcatcgtccgcctctcccagatcagtgaggatgtcatcagactcttcaaaaagagcaaggagattggcctgcagatgcacgaggagctcctgaaggtgaccaatgagctctacacagtcatgaaaacctaccacatgtaccatgcagagagcatcagtgcggaaagcaagctgaaggaggctgagaagcaggaggagaagcagttcaataagtcaggagacctcagcatgaacctgctccggcacgaggaccggccccagcgccgcagctctgtgaagaagattgagaagatgaaggagaagaggcaggccaagtactctgagaacaagctgaaatgcacaaaggcccggaatgactacttgctcaatctggcagccaccaacgcagctataagcaaatactacatccatgatgtctctgatctgatcgattgctgtgatttgggcttccatgccagcctggcccgcaccttccggacctatctctcagctgaatacaacctggagacctctcgccacgaagggctggatgtcattgagaatgcagtggacaacctggattcccgaagtgacaagcacacagtcatggacatgtgcaatcaagtcttctgccctccactcaagttcgagttccagccccacatgggggatgaggtctgccaggtcagcgctcagcagcccgtccagacagaactgctcatgcgttatcaccagctgcagtccagactggccaccctcaagatagagaatgaggaggttaggaaaaccctggatgccaccatgcagacattacaggacatgctgactgtggaggactttgatgtctccgatgccttccaacacagtcgatcgacagagtccgtcaagtcggctgcctctgagacctacatgagcaagatcaacattgccaagaggagagccaaccagcaggaaacagaaatgttttattttacaaaatttaaagagtatgtgaatggcagtaacctcatcaccaagctgcaggccaagcacgatttactcaagcagaccctgggcgaaggggaaagagcagaatgcggcaccaccaggcccccctgtcttccccctaaaccacagaaaatgaggagacctaggcctctctcagtgtatagccataaactctttaacggcagtatggaagcattcattaaggattcaggacaagctataccgcttgtagtcgagagctgcatccgttacatcaatttatatggactccagcagcaggggatcttcagagtgccaggatctcaggtggaagtcaatgacatcaaaaattcctttgagagaggtgaagacccccttgtggacgatcaaaatgaacgagatatcaattcagtcgctggtgttttaaaactgtatttccgaggactggaaaacccactctttcctaaggaaaggtttcaagatttgatatctactattaaactggagaacccagccgagagggtgcaccagatccaacaaatcctcgtcacccttccccgcgtggtcattgtggtcatgagatacctcttcgctttcctcaaccacctctcccagtatagcgacgagaacatgatggatccctacaacctggccatctgcttcgggcctaccctcatgcacatccctgatgggcaggaccctgtgtcctgccaggcacacatcaatgaagtcatcaaaaccatcatcatccatcatgaagccatcttccccagcccccgggagctagagggacctgtgtatgaaaaatgcatggctggaggggaagaatattgtgacagcccacacagcgagccaggggccatcgatgaagttgaccatgacaatggcactgagcctcataccagcgatgaagaagtggagcagatcgaggctattgccaagtttgactacatggggcggtccccgcgtgagctatccttcaagaagggggcctcgctgctcctgtaccaccgcgcctcggaggactggtgggagggccggcacaacggcgtggatggactcatcccccatcagtacatagttgtacaggacatggatgatgccttctccgacagcctgagccagaaggctgacagcgaggccagcagtgggccattgctggatgacaaggcctcttccaaaaacgacctccagtcccccacggagcacatctcggattacggctttgggggggtgatgggccgagtgcggttacgatctgatggagcagccatccccagacgccgaagcgggggcgacacacacagcccgccccggggcctgggccccagcatagacacaccaccccgggctgctgcctgccccagcagcccccacaaaatccccctcacccgggggaggatcgagagccctgagaagcggaggatggcgacgttcgggagcgctggcagcatcaactaccctgacaagaaggcgctctccgaagggcactcgatgaggtcgacctgcggttccaccaggcacagcagcctaggggaccacaagtccctggaggccgaggccctggcagaagacatcgagaagaccatgagcacggctctgcacgagttgcgggaactcgagaggcagaacacggtcaagcaggcgccagatgtggtgctggacaccctggagcccctgaagaacccgccaggccccgtcagctcggagcccgccagtccccttcacaccatcgtcatccgcgaccccgatgccgccatgcgccgcagcagcagctcctccaccgagatgatgaccaccttcaagccagccctgtccgcccgcctggctggcgcccagctccgcccgccccccatgcggcccgtgcggccggtggtccagcaccggtccagcagcagcagcagctcgggcgtgggcagcccggccgtgacgcccaccgagaagatgttccccaacagctcagcggacaagtcgggcaccatgtgacctgcaggatgggccgcgccgccgtggcccgctgtggctcaccacggcccagggtggccttggtggcttccacgtgcttcccagtgaccctggccttggagggcagaggtccgtctgggagggtgtgtctgtgcagagctgaggcccgggcgctggctgcagctcacgtccagccatgggaatcccacggacctctcgcgtgtcaacagacgaccagaggagtgctggagctccagcagccccaaccacagcattccctaacatggaggcaaaataccacatggcttctcccgcatatcgtcactggaaacttcctctctcgacattctctctacatacgtatatgtgtgtgtatatcgatgtgtgcatatatacacatgtatacgtatgtacgtgtctgtaggtgtgtgtatatatatatatatttatgcatctatatacatatactagatctggacacacgcatactaagtgtatatagtatctcctttttctttttatgaaacttagatttacctcagatccatgccaccaaacatctcccaccgagttatttggtgggatttgcagggacttttctgggagaacttaaaggcccatagtaactgcgaatgaagcaatataccactaacctgcagaaaaacacaaacaaaaacagactcccactgtctccagaagtcgtggccttccagaacagtctgcccctcaaggaagggtggggcaggcagtacccccaagcaggctgctcccagaggtggggaacccttcataggaaatccccacccccgtccaccccagagaccctgcccttccacccggaggccaaaggccaactgtactcccaaaggcatgggagaaggttggcgagaagacccctgactaccacatccttgtgtttgtgtgtagagacgggggatagtgagaacctaagccccatcgtagcacagtattacatgtggttgggaaaaataaaaatacagtggtgtggaatactccaaaacctagaaatgctgtaggaataaatctgtggtaactatagaggtttaacttatatcattttcaaactatttaattttttcttttcctggttctactaattatactgtgtcagatttggaactaaacaggcaaggaggctttgagtcacatcgttttcattttaaatcaggctgtgatgcactgtggctggtgccgtcttgcatgaaacgcatgagccgtgagcgcccagttcagactggggccagggaggggcagtccttggcactttctgtcctagaggacactgtcagttgagttaatacaagtgacatagcttcccttccctcccccttcacccactccctccagaacatttagtgtagatgaaaatgtggtgatagaaatgggtgcatgatcttcacgtgtgacagccaggcctttgcctcttggccaagtaaagcccttccgggtcgctctccttcgattccattttacctcctcttctgatcacttccagagatgagctgtttctggataatggcacacgggcaaatctgtgtgccctgtgggccgctgttacttaccctctcctgcgagacccaggggcttttccctactgttcccacgcttcctctctctcgaggccactgaagtttggagtcaaaaggcccagagtctgagtcccagccctgagcacttaggagccttctgacttagggtttgtcactccacctcattgagcctgactgttctgctccataaaatagggtaataaaggtcaaacatcagtgagcaagctgtgtacactggaaaacactgaatcaatacaatgcgtttgtgattatcattagtaaggtaagtcttagatcagagccctccagcccttctttttgaaacctcccaatggcatttcagaagtgagcagtggaattttcctgccatcctaataagagccctggattccatcattaacatttcagcccattggatgaagtggtgccctctcctctggtcccccgcgaaaaggtaaatacacccaaagggagggacctagttaagtcactggcacctagataagttaggagggtaaagccactacctcgtctgaaggactggacttgacaccccacagtggaagggagcatcaggagaggaacaaaaaaagggatctcagggagaggccagtgtcaaacttgacctcccttgtttggcctagaatgaacccttctctttagctcctggatatgaaaggccatctgcttggagcacagaaagatattgccattttacagcttaagagagtaaggccttgggctgtgctgtgacctgcccaagatttgacactggctaggagcagaggctgcgtcaggctcttaaagtcatgtgtttgcatgctggatgctatactgtccagccaggacacaagacttctgatttctaccctcaagatactcccagatcctaaatccagtagcctcccaggcaaaatatagcaatctgccacaactgccagatgaaaagcaacaatcagagtagaaaaatctgttgcctgatatacataacaccaatcagaccgtgtggatttttctctgaattgactgattttgtttttttcttactgaaaatggacctgcctttcactgaattttctgagggcagagtcttagctgttttctttaagcaccttttttttttttttccattgggaaatggctgatgagttcacatttagggatgtacacacacagatggcagacgtctccccactcatccagccccagatctgagccttgacgcaggccaagtggaaaaatactttcccgcccccctcccctgttcccacttcctcatctggcactatgcatgtctcactcaccctccacagcactcagtcccatcgacgttcactgaacattggctttctctttctgactcctgcctgttttagtccactatatattgctgtatttgcttaaatgctggaaagtaactgttaaaatgtgaaattgtaatttttaaaaaggctacaattaaattttagccaatgccactcaccaaatctttgcacctagtagatagatcaatgtaaaaacaaatacctaactgtacagtgagtgtgggggaaatgtagtaacctagttagtagtcttcaatataaccaattgtacaaggggaagtggtgtttacctacttgttcatcaccattattgaaagccgtactgatcagttagttgacaacgggcatttttttttctttgcttcatggaatgatttcttttcttaaccttcgacttatcctgaggtcaagccttttgtctttatgtgtaaccgacgttcagtctattctaggaatgaaccagcaagttgttcatttaaaactgaccaaagacaattaattcctggtctagtttcctgggccttgtggctcagctgccactaaagagctttttggataaaattgagaacaagctgtgcttcctaccccactctccccgtccccttttattcccttttcctcttaaagagctgctctgagctgtgggattctatgaaaaattcttgcctttccttgtttcagtgctaacgatttctcacctcgaagcgccttttgaaccccggacagagtgcacaatcggagggaattgcgagcttgggaattagactttggagtcttttctctgaagtcaccaggccaggggtcaggagagagatggattcccaagggatgaaaggtttctattcaatgaagaaatcggagtgggaagagacacagggaaattgagccatattttggctatcggctggaaccagcagttcagagatctgccttataaacatttaaaaccggtttgtggtacacaaagaggaaccagtgtgggaaggggcctttatgtggggctttcttctctgttggagtcccttggagtgccttgttgggtatatttctctgtcattcaggaggcacgaatgtggaggacttctcgtgacctggtcgtgatgtggcattcagtgcatgtccacagctaatggaaaaacacgaggactcgggtaatggttcttcctctcagtctttctattcctaacttttcacacatccagatggttccacactagtgcaaatgcctcactctcctgagaaacccagaaagaagagtggctggctcacaaccatggggttagcccctgctgggctgggagtcggggtggcggccaggaggaaaggcagaaaggggtgagccgaggtgttgcctagctgattttctgctgtgcagagctaatgctgacatttcatgtcaacttccccggttctctggggtctcctctcctctgagcagccacatagaacattccccacatatccaaagctgcccaggggagccgagagaagggactttgctgtcaggtccaagccctcctgacctccctgagattgatctgccagtgtcctgctgtccctctgggactggccacatggccatcgctgccccttgttgacacctcctttctgtgtgagttgtccccggccaataacaaagctgttccttgaaccagaacaaccagagtgcacttttccttccttagacggaagtagatcctggctagggtttctgcccaggcccttgttcccggcagtgtgactgtttacatggtttggcaataggtttgattctgattgcttcagagtggctggtctattttgtttcctttggtttccttcctccccaaattgtgacaggaaaaacagaccaaaaccaccctaggaaattgctggttgcctgtccccacgtgatgataaatgttgccctcttctggatatcgtttctctaccttacgaccaaacgcccgtcctatagagtgtctgattggatcctctgtcgcgtattctgatggtgcctgctggtttgacgtggagctatcctgtgaaataaaacagcttaacttttctcaaa

SEQ ID NO: 182626 - DNA, 3300 bp, Artificial Sequence
  derived and/or modified sequence
atgagcagccagaccaagttcaagaaggacaaggagatcatcgccgagtacgaggcccagatcaaggagatcagaacccagctggtggagcagttcaagtgcctggagcagcagagcgagagcagactgcagctgctgcaggacctgcaggagttcttcagaagaaaggccgagatcgagctggagtacagcagaagcctggagaagctggccgagagattcagcagcaagatcagaagcagcagagagcaccagttcaagaaggaccagtacctgctgagccccgtgaactgctggtacctggtgctgcaccagaccagaagagagagcagagaccacgccaccctgaacgacatcttcatgaacaacgtgatcgtgagactgagccagatcagcgaggacgtgatcagactgttcaagaagagcaaggagatcggcctgcagatgcacgaggagctgctgaaggtgaccaacgagctgtacaccgtgatgaagacctaccacatgtaccacgccgagagcatcagcgccgagagcaagctgaaggaggccgagaagcaggaggagaagcagttcaacaagagcggcgacctgagcatgaacctgctgagacacgaggacagaccccagagaagaagcagcgtgaagaagatcgagaagatgaaggagaagagacaggccaagtacagcgagaacaagctgaagtgcaccaaggccagaaacgactacctgctgaacctggccgccaccaacgccgccatcagcaagtactacatccacgacgtgagcgacctgatcgactgctgcgacctgggcttccacgccagcctggccagaaccttcagaacctacctgagcgccgagtacaacctggagaccagcagacacgagggcctggacgtgatcgagaacgccgtggacaacctggacagcagaagcgacaagcacaccgtgatggacatgtgcaaccaggtgttctgcccccccctgaagttcgagttccagccccacatgggcgacgaggtgtgccaggtgagcgcccagcagcccgtgcagaccgagctgctgatgagataccaccagctgcagagcagactggccaccctgaagatcgagaacgaggaggtgagaaagaccctggacgccaccatgcagaccctgcaggacatgctgaccgtggaggacttcgacgtgagcgacgccttccagcacagcagaagcaccgagagcgtgaagagcgccgccagcgagacctacatgagcaagatcaacatcgccaagagaagagccaaccagcaggagaccgagatgttctacttcaccaagttcaaggagtacgtgaacggcagcaacctgatcaccaagctgcaggccaagcacgacctgctgaagcagaccctgggcgagggcgagagagccgagtgcggcaccaccagacccccctgcctgccccccaagccccagaagatgagaagacccagacccctgagcgtgtacagccacaagctgttcaacggcagcatggaggccttcatcaaggacagcggccaggccatccccctggtggtggagagctgcatcagatacatcaacctgtacggcctgcagcagcagggcatcttcagagtgcccggcagccaggtggaggtgaacgacatcaagaacagcttcgagagaggcgaggaccccctggtggacgaccagaacgagagagacatcaacagcgtggccggcgtgctgaagctgtacttcagaggcctggagaaccccctgttccccaaggagagattccaggacctgatcagcaccatcaagctggagaaccccgccgagagagtgcaccagatccagcagatcctggtgaccctgcccagagtggtgatcgtggtgatgagatacctgttcgccttcctgaaccacctgagccagtacagcgacgagaacatgatggacccctacaacctggccatctgcttcggccccaccctgatgcacatccccgacggccaggaccccgtgagctgccaggcccacatcaacgaggtgatcaagaccatcatcatccaccacgaggccatcttccccagccccagagagctggagggccccgtgtacgagaagtgcatggccggcggcgaggagtactgcgacagcccccacagcgagcccggcgccatcgacgaggtggaccacgacaacggcaccgagccccacaccagcgacgaggaggtggagcagatcgaggccatcgccaagttcgactacatgggcagaagccccagagagctgagcttcaagaagggcgccagcctgctgctgtaccacagagccagcgaggactggtgggagggcagacacaacggcgtggacggcctgatcccccaccagtacatcgtggtgcaggacatggacgacgccttcagcgacagcctgagccagaaggccgacagcgaggccagcagcggccccctgctggacgacaaggccagcagcaagaacgacctgcagagccccaccgagcacatcagcgactacggcttcggcggcgtgatgggcagagtgagactgagaagcgacggcgccgccatccccagaagaagaagcggcggcgacacccacagcccccccagaggcctgggccccagcatcgacaccccccccagagccgccgcctgccccagcagcccccacaagatccccctgaccagaggcagaatcgagagccccgagaagagaagaatggccaccttcggcagcgccggcagcatcaactaccccgacaagaaggccctgagcgagggccacagcatgagaagcacctgcggcagcaccagacacagcagcctgggcgaccacaagagcctggaggccgaggccctggccgaggacatcgagaagaccatgagcaccgccctgcacgagctgagagagctggagagacagaacaccgtgaagcaggcccccgacgtggtgctggacaccctggagcccctgaagaacccccccggccccgtgagcagcgagcccgccagccccctgcacaccatcgtgatcagagaccccgacgccgccatgagaagaagcagcagcagcagcaccgagatgatgaccaccttcaagcccgccctgagcgccagactggccggcgcccagctgagacccccccccatgagacccgtgagacccgtggtgcagcacagaagcagcagcagcagcagcagcggcgtgggcagccccgccgtgacccccaccgagaagatgttccccaacagcagcgccgacaagagcggcaccatgtag

SEQ ID NO: 182627 - protein, 1051 aa, Artificial Sequence
  derived and/or modified sequence
MGSAEDAVKEKLLWNVKKEVKQIMEEAVTRKFVHEDSSHIIALCGAVEACLLHQLRRRAAGFLRSDKMAALFTKVGKTCPVAGEICHKVQELQQQAEGRKPSGVSQEALRRQGSASGKAPALSPQALKHVWVRTALIEKVLDKVVQYLAENCSKYYEKEALLADPVFGPILASLLVGPCALEYTKLKTADHYWTDPSADELVQRHRIRGPPTRQDSPAKRPALGIRKRHSSGSASEDRLAACARECVESLHQNSRTRLLYGKNHVLVQPKEDMEAVPGYLSLHQSAESLTLKWTPNQLMNGTLGDSELEKSVYWDYALVVPFSQVVCIHCHQQKSGGTLVLVSQDGIQRPPLHFPQGGHLLSFLSCLENGLLPRGQLEPPLWTQQGKGKVFPKLRKRSSIRSVDMEEMGTGRATDYVFRIIYPGHRHEHITINYHHLAASRAASVDDDEEEEDKLHAMLSMICSRNLTAPNPMKDAGDMIEMQGFGPSLPAWHLEPLCSQGSSCLSCSSSSSPHATPSHCSCIPDRLPLRLLCESMKRQIVSRAFYGWLAHCRHLSTVRTHLSALVHHSVIPPDRPPGASAGLTKDVWSKYQKDKKNYKELELLRQVYYGGIEHEIRKDVWPFLLGHYKFGMSKKEMEQVDAVVAARYQQVLAEWKACEVVVRQREREAHPATRTKFSSGSSIDSHVQRLIHRDSTISNDVFISVDDLEPPEPQDPEDSRPKPEQEAGPGTPGTAVVEQQHSVEFDSPDSGLPSSRNYSVASGIQSSLDEGQSVGFEEEDGGGEEGSSGPGPAAHTLREPQDPSQEKPQAGELEAGEELAAVCAAAYTIELLDTVALNLHRIDKDVQRCDRNYWYFTPPNLERLRDVMCSYVWEHLDVGYVQGMCDLLAPLLVTLDNDQLAYSCFSHLMKRMSQNFPNGGAMDTHFANMRSLIQILDSELFELMHQNGDYTHFYFCYRWFLLDFKRELLYEDVFAVWEVIWAARHISSEHFVLFIALALVEAYREIIRDNNMDFTDIIKFFNERAEHHDAQEILRIARDLVHKVQMLIENK

SEQ ID NO: 182628 - DNA, 3156 bp, Artificial Sequence
  derived and/or modified sequence
atgggatccgcagaggacgccgtcaaagagaagctgctctggaatgtgaagaaggaagttaagcagattatggaagaagccgtgacccgcaagttcgtccatgaagatagcagccacattatcgccctttgtggggcggtcgaggcctgcttgctgcatcagctacgcaggagggccgcagggtttttaaggtcggataagatggccgcgctattcactaaagttggtaagacgtgcccggtcgctggagagatttgtcacaaggtgcaggaactgcagcaacaggccgaaggcagaaaaccatctggggtctcccaggaggcactgaggcggcagggcagcgcgtccggtaaggctcccgctttatcaccacaagccttaaagcatgtgtgggtaagaaccgccctgatagagaaggtcctggacaaggtcgtgcaatatctggctgagaactgttctaaatattatgagaaggaagcactactcgcggatccagtcttcgggcccattctagccagtttgttagttggcccttgcgccctggagtacactaaattgaagactgcagaccattactggaccgacccaagcgctgacgagctggtgcagagacaccgcatacgcggacccccaacccgacaagactctcccgctaagcggcccgcactgggcatccgtaaacggcattcttctggctctgcttccgaggatcgccttgccgcttgcgcaagagagtgcgtggagagcctccatcagaatagtcggacgagactgctttacgggaagaatcacgtgttggttcagcctaaggaggacatggaggcagtgcctggatacttatcacttcatcagagtgccgaaagcctgacgcttaagtggacccccaaccagctgatgaacggaacattaggagatagcgagcttgaaaagtcagtctactgggactacgccctcgttgtgcccttcagtcaggtcgtgtgtatccattgccaccagcaaaagtcgggtggaacactggtgctagtgtcgcaggacggcatacagagacctccattacactttccacaaggcggacacctcctgagcttcctgagctgcctcgaaaacggcctgctcccccgcggtcaactcgagccacccctgtggactcagcagggtaagggcaaggtgtttccaaagctccgtaaacgatccagtattcgttctgttgatatggaggagatgggcactggaagggccactgattacgtttttcggataatctacccagggcaccggcatgagcacatcacaatcaattatcaccacctggcggcctccagggctgccagtgtagacgatgatgaggaggaggaagacaagctccacgcaatgcttagcatgatctgcagccgaaacctcaccgcacccaatccaatgaaagatgcgggagacatgattgagatgcagggcttcggcccaagcctccctgcgtggcacctcgagccgctgtgctcccaggggagttcctgcctgtcgtgcagctcaagctcaagcccccacgctacaccttctcattgttcttgtattcccgaccgtctcccactgaggctgctctgcgaatctatgaaacgccagattgtttcaagggcattctatggttggcttgcccactgcagacacctcagcaccgtgaggacacatctctctgctctggtccatcactccgtgattcccccggaccgccctcctggcgctagcgcagggcttaccaaggacgtgtggtccaagtaccaaaaggataagaagaactataaagaacttgagttactgcggcaggtgtactacggcggcattgaacacgaaattcggaaggatgtctggccatttctgctggggcactacaagttcgggatgagcaaaaaggagatggagcaggtagacgcggttgtggctgcacgatatcagcaggttctggctgaatggaaggcctgtgaggtcgtggttcgccaacgcgagcgcgaggctcatcccgcaacaagaacaaaattttcgtctggctcatctatcgattctcatgtgcaaaggttgattcaccgggatagcaccatatccaacgatgtgtttatctccgtagacgatctagaaccccctgaaccccaggaccctgaagactcgcgtcctaaacccgagcaagaagccggacctgggactccaggtaccgctgtggttgagcagcagcattcggtggagtttgattctcccgattcagggctgccctcgtctcgtaattactccgtggcgtcagggatccagtctagcctggatgaaggccagtccgtcgggtttgaggaagaagatggaggcggggaagagggtagttctggccccgggcccgccgcgcacacactgcgcgaacctcaggacccgagccaggaaaagccccaggcaggagaattggaggccggcgaagagcttgccgcagtctgcgcggccgcatataccatagaactgctggacactgtggccctcaacctgcatcgaatagataaagacgtgcagaggtgtgaccgaaattattggtactttaccccacctaatctggaaagactacgggacgtcatgtgctcctatgtttgggagcacctggatgttgggtacgttcaaggaatgtgtgatttactagccccactccttgtgacactcgataatgaccagctggcatatagttgttttagccatcttatgaagaggatgtctcaaaattttccaaacggtggcgctatggacacccactttgccaatatgcggtctctcatacagatcttagacagtgaactcttcgaactaatgcatcagaatggcgactacacacatttctacttttgttatcgctggtttcttctggacttcaagagggaactcttatatgaggatgtttttgccgtttgggaggtgatatgggccgcacgacacataagctccgagcacttcgtcttatttatcgctttggctctggtggaggcctatcgcgagatcatccgagacaacaacatggattttactgatataattaagttctttaatgaacgggcagagcaccacgatgcccaggaaatactgaggattgcacgcgacctcgtgcataaagttcagatgcttatagaaaacaagtag

SEQ ID NO: 182629 - DNA, 3156 bp, Artificial Sequence
  derived and/or modified sequence
atgggcagcgcagaagatgctgtgaaggagaagctgctgtggaatgtgaagaaggaggtgaagcagatcatggaggaggccgtgaccaggaagtttgtgcatgaggacagcagccacatcatcgccctgtgtggggctgtggaggcctgcctgctgcaccagctgcggaggagagctgctggcttcctgcggagtgacaagatggccgccctcttcaccaaggtgggcaagacctgccctgtggccggggagatctgccacaaggtgcaggagctgcagcagcaggccgagggcaggaagcccagcggcgtgtcccaggaggccctgcggcggcagggcagcgccagcggcaaggccccagccctgagcccccaggccctgaagcacgtgtgggtgaggacagccctgattgagaaggtgctggacaaggtggtgcagtacctggccgagaactgcagcaagtactatgagaaggaggccctgctggccgaccctgtgtttggccccatcctggccagcctgctggtgggcccctgtgccctggagtacaccaagctgaagacagctgaccactactggacagaccccagcgcagatgagctggtgcagaggcaccgcatccggggcccccccacccggcaggacagccctgccaagaggcctgccctgggcatcaggaagaggcacagcagcggcagcgccagcgaggaccggctggccgcctgtgccagagaatgtgtggagagcctgcaccagaacagcaggacccggctgctgtatggcaagaaccacgtgctggtgcagcccaaggaggacatggaggccgtgcccggctacctgagcctgcaccagagcgctgagagcctgaccctgaagtggacccccaaccagctgatgaatggcaccctgggggacagcgagctggagaagtctgtgtactgggactatgccctggtggtgcccttcagccaggtggtgtgcatccactgccaccagcagaagagcggcggcaccctggtgctggtgtcccaggacggcatccagaggcctcccctgcacttcccccagggcggccacctgctgtccttcctgagctgcctggagaatggcctgctgccccggggccagctggagccccccctgtggacccagcagggcaagggcaaggtgttccccaagctgaggaagaggagcagcatccgctctgtggacatggaggagatgggcaccggccgggccacagattatgtgttccgcatcatctacccaggccacagacatgagcacatcaccatcaactaccaccacctggccgccagccgggccgcctctgtggatgatgatgaggaggaggaggacaagctgcacgccatgctgtccatgatctgcagcaggaacctgacagcccccaaccccatgaaggatgctggggacatgattgagatgcagggcttcggccccagcctgcctgcctggcacctggagcccctgtgcagccagggcagcagctgcctgagctgcagcagcagcagcagcccccacgccacccccagccactgcagctgcatcccagaccggctgcccctgcggctgctgtgtgagagcatgaagaggcagatcgtgtcccgggccttctacggctggctggcccactgccgccacctgagcacagtgaggacccacctgagcgccctggtgcaccacagcgtcatccccccagaccggcccccaggggccagcgctggcctgaccaaggatgtgtggagcaagtaccagaaggacaagaagaactacaaggagctggagctgctgcggcaggtgtactatggaggcatcgagcacgagatcaggaaggatgtgtggcccttcctgctgggccactacaagtttggcatgagcaagaaggagatggagcaggtggatgctgtggtggccgcccgctaccagcaggtgctggccgagtggaaggcctgtgaggtggtggtgcggcagcgggagcgggaggcccacccagccaccaggaccaagttcagcagcggcagcagcattgacagccacgtgcagaggctcatccaccgggacagcaccatcagcaatgatgtgttcatctctgtggatgacctggagcccccagagccccaggaccctgaggacagccggcccaagccagagcaggaggccggccctggcaccccaggcacagctgtggtggagcagcagcacagcgtggagtttgacagcccagacagcggcctgcccagcagcaggaactacagcgtggccagcggcatccagagcagcctggatgagggccagagcgtgggctttgaggaggaggatggcggcggggaggagggcagcagcggccctggccctgctgcccacaccctgcgggagccccaggaccccagccaggagaagccccaggccggggagctggaggccggggaggagctggccgctgtgtgtgccgccgcctacaccatcgagctgctggacacagtggccctgaacctgcacagaattgacaaggatgtgcagagatgtgacaggaactactggtacttcaccccacccaacctggagcggctgagagatgtgatgtgcagctatgtgtgggagcacctggatgtgggctacgtgcagggcatgtgtgacctgctggcccccctgctggtgaccctggacaatgaccagctggcctacagctgcttcagccacctgatgaagaggatgagccagaacttccccaacggcggggccatggacacccactttgccaacatgaggagcctcatccagatcctggacagcgagctgtttgagctgatgcaccagaatggagactacacccacttctacttctgctaccgctggttcctgctggacttcaagcgggagctgctgtatgaagatgtgtttgctgtgtgggaggtgatctgggccgcccggcacatcagcagcgagcactttgtgctcttcatcgccctggccctggtggaggcctaccgggagatcatccgggacaacaacatggacttcacagacatcatcaagttcttcaatgaaagagctgagcaccatgatgcccaggagatcctgcgcatcgcccgggacctggtgcacaaggtgcagatgctgattgagaacaagtag

SEQ ID NO: 182630 - DNA, 3156 bp, Artificial Sequence
  derived and/or modified sequence
atgggcagcgccgaggacgccgtgaaggagaagctgctgtggaacgtgaagaaagaggttaaacaaattatggaagaggccgtgacacgtaagtttgtgcacgaggacagcagccacattatagccctgtgcggggccgttgaggcttgcctcttacatcagctgaggcggagagccgccggcttcctgagaagcgataagatggcagcactgtttaccaaggtgggtaagacatgtcccgtggcgggcgaaatatgtcacaaagttcaggaattgcaacagcaggcggaggggaggaagccgtctggagtcagccaggaagcgctgcgccggcaggggagcgccagtggaaaagctccagccttgtcgccccaagctctaaagcatgtctgggtgcgaacggctctcatagaaaaagtgctcgataaagttgtacagtacctggccgagaactgctcaaagtattatgaaaaggaggcccttctcgcggatccagtctttgggcccatacttgccagtctgctggtgggcccatgcgccctcgagtacacgaaactgaaaacagcagaccactattggacagatccaagcgccgacgagctcgtccagagacatcgcatcagaggaccgcccactcgacaagacagccccgcgaagagacctgctctcggtatacgaaaacggcactcttccggcagtgcttccgaggaccgactggctgcatgcgcccgggaatgcgtcgagtcgctacaccaaaactcaagaacgcggctcttgtatggcaagaaccacgtattagtccagccaaaggaagatatggaagccgttcccggctatttgtcgttacatcagagcgccgagtcacttactctgaagtggactccgaaccagctcatgaacggcactctcggcgacagcgagctggagaagagcgtatactgggactacgcgctagtggttccattctcccaggtggtgtgcatccactgccatcagcagaagagtgggggcacgctggttctcgtgtcccaagatggaatacagcgcccccctctgcacttcccacaaggaggacacctcctcagcttccttagttgtttggagaacggtctcctcccccggggccagttggaacctccactgtggacccaacagggtaagggaaaagtcttcccgaaattgcggaaacggtcttcaatccgctccgtagacatggaagagatgggtacagggagagcaactgactacgtgttcaggattatttacccagggcatcgacacgaacacattacaatcaattaccatcatctggccgcgagcagggcggcctccgtggatgatgacgaggaagaggaggacaagctgcatgccatgctttccatgatatgtagccgaaacttaacagcccccaatcctatgaaggatgccggtgacatgattgagatgcagggcttcggaccatccctgcccgcctggcatcttgaacctctgtgttcacaaggatctagttgtttgagctgctcctcaagtagctccccacacgcaaccccttcccactgttcttgtattcctgacaggctccctctgaggctgctgtgcgagagcatgaagagacaaatcgtctccagggctttctatggatggctcgcccattgccgtcacttatcaaccgtcaggactcacctcagcgccctcgtccatcacagcgtgattccgccagaccggccacctggagctagtgccggcctgactaaggacgtgtggtcaaaatatcaaaaggacaaaaaaaactacaaggagctggagttacttaggcaggtgtactatggcggcatcgaacacgagatacgcaaggacgtctggccattcctactgggccattacaaattcggcatgtccaaaaaggaaatggaacaagtggatgcagtagtagctgcgagatatcagcaggtcctggctgagtggaaggcttgcgaagtagtggttcgacagagggagcgagaggcccatcccgccacccggaccaagttctcttctggtagttctattgattcccacgtgcagcgcctcatccaccgcgatagcaccatttcgaatgacgtgtttatttcagtcgatgaccttgagcccccagaacctcaggacccagaggatagcaggccaaagccagagcaggaggctggtcctgggacccctggcaccgctgtggttgagcagcagcattccgtagagttcgactcccctgattcgggcctgccatccagcaggaattactctgtggcatcaggaatacagtcctccttggacgagggacagtccgttggattcgaggaagaagatggtggaggtgaggaaggtagtagtgggcccggaccagctgcgcataccctgcgggaaccccaggatcccagccaggagaagccgcaggctggtgagctcgaggctggtgaagagttagctgccgtctgcgccgctgcctatactatcgagttgctggacactgttgccctgaacctgcatagaatcgacaaggacgtgcaaaggtgtgaccggaattactggtattttacgcctccaaatctggagaggctgagagatgtgatgtgtagttacgtgtgggagcacctggacgttggctacgtccagggaatgtgcgatctgctagccccactcctggtcacactggacaacgaccagctcgcgtacagctgttttagccaccttatgaaacggatgtcccaaaatttcccaaacgggggcgccatggatactcactttgcaaatatgaggagcctgatacagattctcgattctgagctgttcgagctgatgcatcagaatggcgactacacacacttctacttctgctatcggtggttcctactggatttcaagagagaattgctgtacgaggacgtattcgctgtatgggaggtaatctgggctgcaagacatatctctagcgagcatttcgttctctttatcgccctggccctcgtcgaggcctatagagaaattatccgggataacaatatggattttacggacattattaaattctttaatgaacgggcagagcatcatgatgcccaggaaatcctgcgaatcgccagagatttggtccacaaagttcagatgctaattgagaataaatag

SEQ ID NO: 182631 - DNA, 3156 bp, Artificial Sequence
  derived and/or modified sequence
atgggcagcgctgaggacgccgtgaaggagaaattgctgtggaatgtgaaaaaggaggtgaaacagatcatggaagaagcagttactaggaagtttgtccatgaggactctagtcacattatcgccctttgcggcgctgtggaggcgtgtctccttcatcagttacgcaggcgagcggctggcttcttgcggtctgacaagatggccgctctcttcacaaaagtcggaaaaacttgccctgtcgcaggggaaatctgccataaggttcaagagctacaacagcaggctgaggggaggaagccctcaggcgtctcacaggaggccctgcggagacagggaagcgcctcaggcaaggcccctgcacttagtcctcaggcacttaagcatgtgtgggtaaggactgcacttattgagaaagtgctcgataaggtcgtgcagtacctggcagagaactgcagcaaatactatgaaaaggaggcacttctggcagaccccgtgtttgggccaattcttgccagcctcttggtcggtccatgcgctctggagtatactaaattaaagacggctgatcattattggaccgaccctagcgccgacgagctggtccagagacacagaatccggggacctccgacgaggcaagattctccagctaaaagacccgcactaggtatccgtaaaagacatagttctggtagtgcaagcgaggatagactggcagcctgcgccagagagtgcgtcgagagcctgcaccagaattcacggacaaggcttctatacgggaaaaaccatgtactcgtccaaccaaaagaagacatggaagctgtcccgggatacctctcgctccatcagtccgctgagagtctgaccctcaaatggacccccaatcagctgatgaatggaacactgggggattctgaactagagaagagcgtgtactgggactatgcgttagtggtccctttcagccaagtcgtatgcatccactgtcaccagcagaaaagcggtgggacattggtgctcgtcagtcaggacggcattcagaggccacccttgcatttcccacaaggtggtcatctgctgagtttcctatcttgcctggaaaatggactgttgcctcgtggacagctggagcccccactctggactcaacagggtaaaggcaaagtgttcccgaagctgagaaaacgctcctccatcagatctgtggacatggaagaaatgggtaccggcagagctaccgattacgtattccggattatctatcccggacaccgccacgagcatattactatcaattaccatcatctcgccgcttcccgggctgcctccgtcgatgacgacgaggaggaagaagataagctgcacgcgatgctgagtatgatatgttcccgaaatctgacggcccctaacccgatgaaggacgccggtgacatgattgaaatgcaagggttcggccctagcttgcctgcctggcatctggaaccactatgtagccagggcagctcttgcctgagctgctcctcatcctcctccccccacgccacgccctcacactgttcctgcatccctgaccggctgccgcttcgactgctttgtgaaagcatgaagagacagatcgtgagccgcgcattctacggttggttagcgcattgcagacatcttagtaccgtacgcacccatctgagcgccttggtacatcattcggtgatccccccagaccgtccaccgggagcgagcgccggattgacaaaggatgtctggagcaagtatcagaaggacaagaagaactataaagagcttgaattactgcggcaggtttactacgggggtattgagcacgagattaggaaagacgtctggccattcctgctaggccattataagttcggcatgagcaaaaaggaaatggagcaggttgacgcagtggtcgcggctcgctatcagcaggttctggctgaatggaaggcctgcgaagttgtggtgcggcagcgtgaaagggaagctcatccagccacgagaaccaagttctcctccggttcctctatcgattcccatgttcagagactgatccatcgcgactcgaccatctctaacgatgtgttcattagcgttgatgatttagaaccgcctgaacctcaggatcctgaggattcccgtcctaagcccgagcaggaagcgggaccaggcactcccggaaccgccgttgtcgaacagcagcacagcgtggagttcgattccccagactccggattgcctagcagccgaaattactctgtggcctctggcattcagagctcattggatgaaggtcagtctgttggttttgaagaggaggacggaggaggcgaggagggatcaagcggcccaggaccagccgcacacacactgagggaaccacaagatccctctcaagagaagccccaagctggagaattggaggccggagaggagctagcagccgtctgcgccgctgcctatacaatagagctgctggacacagtcgctcttaatctccacagaatcgacaaggacgtccagcgatgtgaccgcaattattggtacttcacccccccaaatctcgagagactgcgggatgtgatgtgtagctacgtctgggagcatctcgatgtcggatacgtgcagggaatgtgtgacctcctggccccactgcttgttacactggataacgaccaacttgcttatagctgcttttcacatcttatgaaaagaatgtcgcagaattttcctaatggaggggctatggacacacatttcgctaacatgcgttcactgattcagatccttgacagtgagctattcgagttgatgcatcaaaacggagattacacacatttttacttttgctaccgatggtttttactggatttcaagcgagagctgctttacgaggatgtgtttgccgtgtgggaggtgatttgggctgcacgacacatatcctcagaacacttcgtgctgtttatcgcattggctttggttgaggcttacagggagatcatccgcgataataacatggattttaccgacatcattaagtttttcaacgaaagagctgagcatcatgatgcacaggagattctgcgaattgctcgggacctggtccacaaggtccagatgcttatcgaaaacaagtag

SEQ ID NO: 182632 - DNA, 4863 bp, Artificial Sequence
  derived and/or modified sequence
ggaagatggctgcggagccgagcaccgggcagtggctgcggcggcggcggcggcggcgggccgggagcgcggcgggcgggggctccgccttgcgcgtggggcgctgagccgagaggcgcggaggcggcgagggcgcgggggctctgaggaccgctcggcgccgcctcctgccacaccatgggcagcgcagaggacgcagtcaaagagaaactgctgtggaacgtgaagaaggaggtgaagcaaatcatggaggaggctgtcaccaggaagtttgtgcatgaagacagcagccacatcattgctttatgtggtgcagtggaggcttgcctcttgcatcagctgagacgccgtgccgctggcttcctgcgcagtgacaagatggcagccctgttcaccaaggtggggaagacgtgcccagtggcgggggagatttgccacaaggtacaggagctgcagcaacaagcagagggcaggaaaccctcaggggtcagccaggaggccctgcggagacagggctcagccagcgggaaggccccggccctcagccctcaggccttgaaacacgtatgggtacgcacggcgctcatcgagaaagttctggacaaggtcgtgcaatacctggcggaaaactgcagcaagtactacgagaaggaggcactgctggcagaccctgtgttcggcccgatcctggcctctcttctagtgggaccctgtgccttggaatacactaagctcaagacagccgatcactactggactgacccctctgctgatgagctggtccagcggcaccgcatccggggtccacctactcgccaggactcccctgcaaagcgcccagccctggggatccggaaacggcactcaagcggcagcgcgtcggaggacaggctggctgcctgtgcccgcgagtgtgtggagtccctgcaccagaactcacggacgcggctgctctatggcaagaaccacgtgctggtgcagccgaaggaggatatggaggcggtccctggctacctctccctgcaccagtctgcagagagcctgactctgaagtggacccccaaccagctcatgaatgggactctgggggactccgagctggaaaagagcgtttactgggactatgccctcgtggtgcccttcagccaggtcgtgtgcatccactgccaccagcaaaagagcggtggcacgcttgtgctggtgagccaggatggcatccagaggccgccgctgcatttcccacagggaggacacctgctgtcctttctgtcctgtctggagaatgggctgctgcctcggggacagctagagcccccgctgtggacccagcaagggaaggggaaagtgttccccaagctacggaaacgaagcagcattcgctccgtggatatggaggagatgggcacggggcgggccaccgactatgtgttccggatcatctaccccggccacaggcacgagcacatcactattaactaccaccacctagcggccagccgcgcggcctcggtggacgatgatgaggaagaggaggataaactgcacgcgatgctctcaatgatctgctcgcggaacctcacagctcccaatccgatgaaagacgctggtgacatgatcgagatgcagggctttgggcccagcctgccagcctggcacctggagcccctgtgcagtcagggctcctcctgcctctcctgctcctccagcagctccccacatgcaacccccagccactgtagctgcatccccgaccggttgccgctcaggctactgtgtgagagtatgaagaggcagatcgtgtcccgggccttctacggctggctggcacactgccgccacctgtccacggtgcggacccacctgtcggcgctggtgcaccatagcgttatcccacctgaccggcccccgggggcctccgcgggcctcaccaaggacgtgtggagcaagtatcagaaggacaaaaagaactacaaagagctggagctgctgcggcaagtttactacggaggcatagagcacgagatccgcaaggacgtctggccctttctgcttggccactacaagttcggcatgagcaagaaggagatggagcaggtggacgcagtggtggcagcaaggtaccagcaggtgttggcagagtggaaggcctgcgaggtggtggtgaggcagcgggagcgggaggcccacccagccacacgcaccaagttctcctcaggcagcagcatcgacagccacgtgcagcgcctcatccaccgagactccaccatcagcaacgatgtgtttatctcagtggatgatctggaacccccggagccccaggaccctgaagattccagaccaaaacctgagcaggaagcaggacccgggactccgggcaccgccgtggtggagcagcagcattccgtggagttcgactctccagactcaggactgccctcctctcgcaattactccgtggcctcgggcatccagtcaagcctagatgaggggcagagcgtgggcttcgaagaggaggacggcggtggggaggaaggctccagtgggcccggccctgcagctcacactttgagggagccccaggatcccagccaggagaagcctcaggccggagaactggaggccggagaggagcttgcggctgtgtgtgcggctgcctacactatagaattactggacactgtggccttaaacctgcaccgcatagacaaggatgtgcagaggtgtgaccgcaactactggtacttcacgccccccaacctcgagaggctcagagacgtcatgtgcagctacgtgtgggagcacctggacgtgggctatgtgcagggcatgtgcgatctgctggcgcctctcctggtcaccctcgacaatgatcagctggcctacagctgcttcagccacctcatgaagaggatgagccagaacttccccaacgggggtgccatggacacccactttgccaacatgcgctccctcatccagatcctggactcagagctgtttgagctgatgcatcagaatggagactacacccacttctacttctgttatcgctggttcctgctggattttaagagagaactgctgtatgaggatgtgtttgctgtgtgggaggtgatctgggcagccaggcacatctcatcggagcactttgtcctgttcatcgccctcgccctggtggaggcctaccgagagatcatccgtgacaacaacatggacttcactgacatcatcaagtttttcaatgaacgtgctgagcatcacgatgcccaggagatcctgcggattgcccgggacctcgtccacaaggtgcagatgctcatagagaacaagtgagctggggccaggaggcagcagccgtgcagagcctgggctccggcagggagaggtgcaggggagtcaccgcccagacctccccagccaccaaccgaccccacctctgttcctaacaaagcggttgtgagcctggatccgactcccggcagtgctgaccctgcagggcaagtcaggggccaggatgccctcggatcagggccgggatgggaggggtcagcctcagggagcagctgccttgggggacacacctactctgctcccctctcacacatctgggagtagccccactgccacctgcagccgcagcctggactgctgcccacgagtgaacctggggccccacaggattaacaggggctatagcggcctgggccctactcagctggggtggcagagggcgagaggctctgtgctgtgtcccttctgagggtccctttgcagtcccagtatattgtgcgtgcaccagccccagctggagcaaccaaaactgcttctggtttaggcacacgtcacgggtgcgggagacccgggcacgggagacccgggccgccttcaggccgctcccccgagattctggggcagtcggaagatgtgggccctgggtgggagcagcccacttcagcagcactgccactgcctttggccacctgaggtgacccccaggcctccccggccttgtacagtgtacctctgtgtatctgtacagcctcgctcctgccaccccacccttgcgttctgcattaggtacttccctgaaaaccacgtgtaagaagtgatgcttttgccagtggatgatctggaatgcgaccggagcacttgctctgaggaatcccagggtgactctgtcggggaagaatccggtcacagcctcccctcagagacaggcctcagttcgagggcagcccattatctgtcgcagacatctgccatgtccctgagactgcgggaggcaggggatgcatgggtgtccccatctgtccctggtgagaagcaaggctagctctgccttccacatgcttctcaggatgccaagaggcctaggaacccagaaacccccttggaggagctgtgtatgcgggggtgccaggaagggcatagctcctgcccccaggcctaggcatgctgcttgctcggccatccccacttcctcctctaccccaacacatgcaggctaggccttgccctggaacatggaggccctgcccggggctggggcctagtccagcagccaccaaagtctggcagactttctgcatttgagaaacatgacaaagggccccgcagcccttctgcacccagcacagcctgcccagcccagccctgcccccgggcactgcacagcctgtctgggggccagaccaccccattgtccatccttgttgtccgtgagtccttggcctccaccaagcacgtgtggccattgtgtgcctgccttagtgactccgtggttttgtgaggagcagagtgtgtatgatttttgcctcagaaactatactcttctgtgtaacagaccaataaacaacatttgtc

SEQ ID NO: 182633 - DNA, 3156 bp, Artificial Sequence
  derived and/or modified sequence
atgggcagcgccgaggacgccgtgaaggagaagctgctgtggaacgtgaagaaggaggtgaagcagatcatggaggaggccgtgaccagaaagttcgtgcacgaggacagcagccacatcatcgccctgtgcggcgccgtggaggcctgcctgctgcaccagctgagaagaagagccgccggcttcctgagaagcgacaagatggccgccctgttcaccaaggtgggcaagacctgccccgtggccggcgagatctgccacaaggtgcaggagctgcagcagcaggccgagggcagaaagcccagcggcgtgagccaggaggccctgagaagacagggcagcgccagcggcaaggcccccgccctgagcccccaggccctgaagcacgtgtgggtgagaaccgccctgatcgagaaggtgctggacaaggtggtgcagtacctggccgagaactgcagcaagtactacgagaaggaggccctgctggccgaccccgtgttcggccccatcctggccagcctgctggtgggcccctgcgccctggagtacaccaagctgaagaccgccgaccactactggaccgaccccagcgccgacgagctggtgcagagacacagaatcagaggcccccccaccagacaggacagccccgccaagagacccgccctgggcatcagaaagagacacagcagcggcagcgccagcgaggacagactggccgcctgcgccagagagtgcgtggagagcctgcaccagaacagcagaaccagactgctgtacggcaagaaccacgtgctggtgcagcccaaggaggacatggaggccgtgcccggctacctgagcctgcaccagagcgccgagagcctgaccctgaagtggacccccaaccagctgatgaacggcaccctgggcgacagcgagctggagaagagcgtgtactgggactacgccctggtggtgcccttcagccaggtggtgtgcatccactgccaccagcagaagagcggcggcaccctggtgctggtgagccaggacggcatccagagaccccccctgcacttcccccagggcggccacctgctgagcttcctgagctgcctggagaacggcctgctgcccagaggccagctggagccccccctgtggacccagcagggcaagggcaaggtgttccccaagctgagaaagagaagcagcatcagaagcgtggacatggaggagatgggcaccggcagagccaccgactacgtgttcagaatcatctaccccggccacagacacgagcacatcaccatcaactaccaccacctggccgccagcagagccgccagcgtggacgacgacgaggaggaggaggacaagctgcacgccatgctgagcatgatctgcagcagaaacctgaccgcccccaaccccatgaaggacgccggcgacatgatcgagatgcagggcttcggccccagcctgcccgcctggcacctggagcccctgtgcagccagggcagcagctgcctgagctgcagcagcagcagcagcccccacgccacccccagccactgcagctgcatccccgacagactgcccctgagactgctgtgcgagagcatgaagagacagatcgtgagcagagccttctacggctggctggcccactgcagacacctgagcaccgtgagaacccacctgagcgccctggtgcaccacagcgtgatcccccccgacagaccccccggcgccagcgccggcctgaccaaggacgtgtggagcaagtaccagaaggacaagaagaactacaaggagctggagctgctgagacaggtgtactacggcggcatcgagcacgagatcagaaaggacgtgtggcccttcctgctgggccactacaagttcggcatgagcaagaaggagatggagcaggtggacgccgtggtggccgccagataccagcaggtgctggccgagtggaaggcctgcgaggtggtggtgagacagagagagagagaggcccaccccgccaccagaaccaagttcagcagcggcagcagcatcgacagccacgtgcagagactgatccacagagacagcaccatcagcaacgacgtgttcatcagcgtggacgacctggagccccccgagccccaggaccccgaggacagcagacccaagcccgagcaggaggccggccccggcacccccggcaccgccgtggtggagcagcagcacagcgtggagttcgacagccccgacagcggcctgcccagcagcagaaactacagcgtggccagcggcatccagagcagcctggacgagggccagagcgtgggcttcgaggaggaggacggcggcggcgaggagggcagcagcggccccggccccgccgcccacaccctgagagagccccaggaccccagccaggagaagccccaggccggcgagctggaggccggcgaggagctggccgccgtgtgcgccgccgcctacaccatcgagctgctggacaccgtggccctgaacctgcacagaatcgacaaggacgtgcagagatgcgacagaaactactggtacttcaccccccccaacctggagagactgagagacgtgatgtgcagctacgtgtgggagcacctggacgtgggctacgtgcagggcatgtgcgacctgctggcccccctgctggtgaccctggacaacgaccagctggcctacagctgcttcagccacctgatgaagagaatgagccagaacttccccaacggcggcgccatggacacccacttcgccaacatgagaagcctgatccagatcctggacagcgagctgttcgagctgatgcaccagaacggcgactacacccacttctacttctgctacagatggttcctgctggacttcaagagagagctgctgtacgaggacgtgttcgccgtgtgggaggtgatctgggccgccagacacatcagcagcgagcacttcgtgctgttcatcgccctggccctggtggaggcctacagagagatcatcagagacaacaacatggacttcaccgacatcatcaagttcttcaacgagagagccgagcaccacgacgcccaggagatcctgagaatcgccagagacctggtgcacaaggtgcagatgctgatcgagaacaagtag

SEQ ID NO: 182634 - protein, 807 aa, Artificial Sequence
  derived and/or modified sequence
MFSAGAESLLHQAREIQDEELKKFCSRICKLLQAEDLGPDTLDSLQRLFLIISATKYSRRLEKTCVDLLQATLGLPACPEQLQVLCAAILREMSPSDSLSLAWDHTQNSRQLSLVASVLLAQGDRNEEVRAVGQGVLRALESRQPEGPSLRHLLPVMAKVVVLSPGTLQEDQATLLSKRLVDWLRYASLQQGLPHSGGFFSTPRARQPGPVTEVDGAVATDFFTVLSSGHRFTDDQWLNVQAFSMLRAWLLHSGPEGPGTLDTDDRSEQEGSTLSVISATSSAGRLLPPRERLREVAFEYCQRLIEQSNRRALRKGDSDLQKACLVEAVLVLDVLCRQDPSFLYRSLSCLKALHGRVRGDPASVRVLLPLAHFFLSHGEAAAVDSEAVYQHLFTRIPVEQFHSPMLAFEFIQFCRDNLHLFSGHLSTLRLSFPNLFKFLAWNSPPLTSEFVALLPALVDAGTALEMLHALLDLPCLTAVLDLQLRSAPAASERPLWDTSLRAPSCLEAFRDPQFQGLFQYLLRPKASGATERLAPLHQLLQPMAGCARVAQCAQAVPTLLQAFFSAVTQVADGSLINQLALLLLGRSDSLYPAPGYAAGVHSVLSSQFLALCTLKPSLVVELARDLLEFLGSVNGLCSRASLVTSVVWAIGEYLSVTYDRRCTVEQINKFFEALEALLFEVTQCRPSAALPRCPPQVVTVLMTTLTKLASRSQDLIPRASLLLSKMRTLAHSPATSSTHSEEGAEAIRTRATELLTLLKMPSVAQFVLTPSTEVCSPRYHRDANTALPLALRTVSRLVEREAGLMPG

SEQ ID NO: 182635 - protein, 613 aa, Artificial Sequence
  derived and/or modified sequence
MFSAGAESLLHQAREIQDEELKKFCSRICKLLQAEDLGPDTLDSLQRLFLIISATKYSRRLEKTCVDLLQATLGLPACPEQLQVLCAAILREMSPSDSLSLAWDHTQNSRQLSLVASVLLAQGDRNEEVRAVGQGVLRALESRQPEGPSLRHLLPVMAKVVVLSPGTLQEDQATLLSKRLVDWLRYASLQQGLPHSGGFFSTPRARQPGPVTEVDGAVATDFFTVLSSGHRFTDDQWLNVQAFSMLRAWLLHSGPEGPGTLDTDDRSEQEGSTLSVISATSSAGRLLPPRERLREVAFEYCQRLIEQSNRRALRKGDSDLQKACLVEAVLVLDVLCRQDPSFLYRSLSCLKALHGRVRGDPASVRVLLPLAHFFLSHGEAAAVDSEAVYQHLFTRIPVEQFHSPMLAFEFIQFCRDNLHLFSGHLSTLRLSFPNLFKFLAWNSPPLTSEFVALLPALVDAGTALEMLHALLDLPCLTAVLDLQLRSAPAASERPLWDTSLRAPSCLEAFRDPQFQGLFQYLLRPKASGATERLAPLHQLLQPMAGCARVAQCAQAVPTLLQAFFSAVTQVADGSLINQLALLLLGRSDSLYPAPGYAAGVHRPDACRPILVPL

SEQ ID NO: 182636 - DNA, 2424 bp, Artificial Sequence
  derived and/or modified sequence
atgttctctgcgggtgccgaatccctgctccaccaggccagggaaatacaagacgaggagctgaaaaagttctgcagcagaatatgcaaattgctgcaagccgaggatctggggcccgacacccttgatagcttacagaggctgttcctgattatctcggccacaaagtactctcgaaggctggagaaaacctgtgtggaccttctgcaggccactctaggactgccggcttgccctgagcagttgcaagttttgtgcgctgcaatcctgagagagatgagcccatccgattctttatctttggcgtgggatcatactcaaaacagccgacagttgtctcttgttgccagtgttctgctggcacagggcgatcgcaatgaggaggttcgtgcagttgggcagggggtgctcagggccctggaatccaggcagcctgagggacccagcttgcggcacctccttcctgtgatggcaaaggtggtcgtcctcagccctggcactctgcaggaagaccaggctaccctgctaagcaagcggctggttgactggctacggtacgcgtccctgcagcagggcctccctcacagcggaggctttttttccacaccgagagctagacaaccggggcccgtaactgaggtggacggtgccgtagcaacggacttcttcaccgtcctatcttctggtcacagattcacggacgatcagtggctgaacgttcaggccttttcaatgctgagagcctggctcttgcactctggccctgaggggcccggcacattggataccgatgacaggtctgaacaagagggatccactcttagtgttatttccgcaactagctccgctggtagattattgcctccccgagaaaggctgcgtgaagtcgctttcgagtattgccagcgcttgatcgaacagtcaaatcggcgggcccttaggaaaggggacagcgatttacagaaggcttgccttgtcgaggctgtgctcgtgctggacgtcttatgtagacaggatccctcttttctgtatagatccctcagttgcctcaaagccctgcacggaagggttaggggggatcctgccagcgttagagtgctgctgcccctcgcccacttcttcctgtctcacggcgaggccgcagcagtggatagcgaagccgtgtaccagcacctcttcacacggatccctgttgagcagtttcactcacctatgctggccttcgaattcattcagttttgccgggacaacctccacctgttctctggacatttgtcaaccctcagactttctttcccaaacctgttcaagtttctggcctggaactctccgcctttgaccagcgaatttgtggcactactcccagccctggtcgacgccggaacagccttggaaatgctgcatgccctcctggatctgccctgcctgacagcagtcctcgatctgcagctgcggagcgctcctgctgcctccgaaagacctctatgggatacctcgctgagggcaccatcttgcctcgaagcctttcgcgatcctcagttccagggacttttccagtacctcctgcgccctaaagcctccggggccacggagagactcgcaccactccaccagctccttcagcctatggccggttgtgctcgcgtggcacaatgcgcccaagccgttccaacactgcttcaggccttcttctctgcggtgacccaggtggccgatggctcattgattaaccaactggctctgttgttactgggccgaagcgattcactctaccccgcccccggatacgctgctggggtgcactccgtcttgagtagtcaattcttggccctgtgtacgctcaagcctagtctggtggtggagctagccagggacctcctggagttcttgggatctgtgaacggcctctgctctagagcaagtcttgtgaccagtgtggtgtgggccatcggtgaatacctatctgtgacctatgaccggaggtgcactgtggagcagatcaacaaattttttgaagcattagaggcgctgctcttcgaggtaacccaatgccgtccatctgctgccctgcctcggtgtccgcctcaagttgtaacagtcctgatgacaactctaaccaagctggctagtaggtctcaggacctcatccctcgggccagcctgcttcttagcaaaatgcgaaccctggctcattcaccggccacatccagcacacactccgaagaaggagccgaggctatcaggacgagggctacagagttgctgacacttctgaagatgccctcggttgcccagtttgtgctcacaccttctaccgaagtgtgttcacctagataccaccgagacgctaataccgcgctcccactcgctctccggaccgtgtccaggctcgtggaaagagaggctggcctcatgcccgggtag

SEQ ID NO: 182637 - DNA, 1842 bp, Artificial Sequence
  derived and/or modified sequence
atgttcagcgccggcgcagagagtctgctgcatcaggcccgtgagatccaagacgaagagctgaagaagttctgttctagaatttgtaagctgcttcaggccgaagacctgggaccagacacgctggatagtctgcagcgtcttttcctgattatctccgccaccaagtactctagacgtctggagaagacctgtgtagatctcctacaagcaaccttgggattgcccgcctgtccggaacaattacaggttctgtgcgccgccatactgcgggaaatgtcaccatcagactcactgtccctggcatgggaccacacgcaaaactcgaggcagctgagtctggtggcatccgtactgctggcacagggcgatcggaacgaagaggtccgtgccgtaggacagggggttctccgtgccctcgaatcaaggcagccggagggcccctctctgcggcacctgcttcctgtcatggctaaagtggtcgtgttgtcaccaggcacactacaggaagaccaggctacccttctgtccaaacgactggtggattggctgcgttacgcttctctccagcagggtctgcctcatagcggggggtttttctctacccccagggccagacagcccgggcccgtgaccgaggtggatggcgcagtagcaactgatttcttcaccgtactttcttctggccaccgcttcacagacgatcaatggttaaatgtccaggcattttcgatgctgcgcgcatggctgctccacagcggtcctgagggtcccggcaccttggataccgatgacaggtccgagcaggaaggatccactcttagcgtgatatccgccacaagttctgccggtcgtctgctcccgcctagggagcggctgagggaggtggcgttcgagtattgccagcgccttatcgaacaaagtaacagacgagccctgcgcaagggggatagcgatctccagaaagcgtgcctggtagaggctgtgctggtgctggatgtgctgtgccggcaggatccgtcattcctctaccggagcctctcgtgcttgaaggccctgcacgggagggtgcgcggggatccagcttcagtccgcgtactcctcccactcgcccactttttcctcagccacggagaggcggcggctgtggacagcgaggcagtctatcagcacctctttaccaggatacccgttgagcagttccattcgcccatgctcgcctttgaattcatccagttttgccgcgacaatctccatttgttctcagggcatctgtcgaccctccgcctctcatttcccaacctgttcaagttcctggcttggaatagccccccactgacgagtgaatttgtggcactcctcccagcactggtggatgccgggacagccttagaaatgctgcatgctctcttggatctgccatgcttgaccgcagtacttgatttgcagttacgatccgcccctgctgcctccgagaggcctttgtgggatacttccctgagagctccctcatgcctggaggcttttcgcgatccacaattccaggggctgttccagtacctgctgagaccaaaagctagcggggcaactgaaaggttggcccctctgcaccaactgctgcagcctatggctggttgtgcccgggtcgcccagtgtgctcaggcggtgcctactctgctgcaggctttcttctctgccgtgacccaagtggctgacggcagtctgataaatcagctggcccttctcctgctggggcggtccgactctctgtacccagcgccggggtacgcggctggagtgcataggcctgatgcttgccgccccatacttgtacccttatag

SEQ ID NO: 182638 - DNA, 2424 bp, Artificial Sequence
  derived and/or modified sequence
atgttttctgctggagctgagagcctgctgcaccaggcccgggagatccaggatgaggagctgaagaagttctgcagccgcatctgcaagctgctgcaggccgaggacctgggccctgacaccctggacagcctgcagaggctcttcctgatcatcagcgccaccaagtacagccggcggctggagaagacctgtgtggacctgctgcaggccaccctgggcctgcctgcctgcccagagcagctgcaggtgctgtgtgccgccatcctgcgggagatgagccccagcgacagcctgagcctggcctgggaccacacccagaacagccggcagctgagcctggtggcctctgtgctgctggcccagggcgacagaaatgaggaggtgcgggctgtgggccagggcgtgctgcgggccctggagagccggcagcctgagggccccagcctgcggcacctgctgcctgtgatggccaaggtggtggtgctgagccctggcaccctgcaggaggaccaggccaccctgctgagcaagaggctggtggactggctgcgctatgccagcctgcagcagggcctgccccacagcggcggcttcttcagcaccccccgggcccggcagcccggccctgtgacagaggtggatggagctgtggccacagacttcttcaccgtgctgagcagcggccaccgcttcacagatgaccagtggctgaatgtgcaggccttctccatgctgcgggcctggctgctgcacagcggccctgagggccctggcaccctggacacagatgacagaagtgagcaggagggcagcaccctgagcgtcatcagcgccaccagcagcgctggccgcctgctgcccccccgggagcggctgcgggaggtggcctttgagtactgccagaggctgattgagcagagcaacagaagagccctgaggaaaggagacagcgacctgcagaaggcctgcctggtggaggccgtgctggtgctggatgtgctgtgccggcaggaccccagcttcctgtaccgcagcctgagctgcctgaaggccctgcacggccgggtgcggggggaccctgcctctgtgcgggtgctgctgcccctggcccacttcttcctgagccatggagaggccgctgctgtggacagcgaggccgtgtaccagcacctgttcacccgcatccctgtggagcagttccacagccccatgctggcctttgagttcatccagttctgccgggacaacctgcacctgttcagcggccacctgagcaccctgcggctgtccttccccaacctcttcaagttcctggcctggaacagcccccccctgaccagcgagtttgtggccctgctgcctgccctggtggatgctggaacagccctggagatgctgcacgccctgctggacctgccctgcctgacagctgtgctggacctgcagctgcggagcgccccagctgccagcgagcggcccctgtgggacaccagcctgcgggcccccagctgcctggaggccttccgggacccccagttccagggcctcttccagtacctgctgcggcccaaggccagcggggccacagagcggctggcccccctgcaccagctgctgcagcccatggccggctgtgcccgggtggcccagtgtgcccaggccgtgcccaccctgctgcaggccttcttctctgctgtgacccaggtggctgatggcagcctcatcaaccagctggccctgctgctgctgggccgcagtgacagcctgtacccagcccctggctatgctgctggggtgcacagcgtgctgagcagccagttcctggccctgtgcaccctgaagcccagcctggtggtggagctggcccgggacctgctggagttcctgggctctgtgaatggcctgtgcagccgggccagcctggtgacctctgtggtgtgggccatcggggagtacctgtctgtgacctatgaccggcgctgcaccgtggagcagatcaacaagttctttgaggccctggaggccctgctgtttgaggtgacccagtgccggcccagcgctgccctgccccgctgccccccccaggtggtgacagtgctgatgaccaccctgaccaagctggccagccgcagccaggacctgatcccccgggccagcctgctgctgagcaagatgaggaccctggcccacagccctgccaccagcagcacccacagcgaggagggcgctgaggccatccgcacccgggccacagagctgctgaccctgctgaagatgcccagcgtggcccagtttgtgctgacccccagcacagaggtgtgcagcccccgctaccacagagatgccaacacagccctgcccctggccctgaggacagtgtcccggctggtggagcgggaggccggcctgatgcctggatag

SEQ ID NO: 182639 - DNA, 1842 bp, Artificial Sequence
  derived and/or modified sequence
atgttttctgctggagctgagagcctgctgcaccaggcccgggagatccaggatgaggagctgaagaagttctgcagccgcatctgcaagctgctgcaggccgaggacctgggccctgacaccctggacagcctgcagaggctcttcctgatcatcagcgccaccaagtacagccggcggctggagaagacctgtgtggacctgctgcaggccaccctgggcctgcctgcctgcccagagcagctgcaggtgctgtgtgccgccatcctgcgggagatgagccccagcgacagcctgagcctggcctgggaccacacccagaacagccggcagctgagcctggtggcctctgtgctgctggcccagggcgacagaaatgaggaggtgcgggctgtgggccagggcgtgctgcgggccctggagagccggcagcctgagggccccagcctgcggcacctgctgcctgtgatggccaaggtggtggtgctgagccctggcaccctgcaggaggaccaggccaccctgctgagcaagaggctggtggactggctgcgctatgccagcctgcagcagggcctgccccacagcggcggcttcttcagcaccccccgggcccggcagcccggccctgtgacagaggtggatggagctgtggccacagacttcttcaccgtgctgagcagcggccaccgcttcacagatgaccagtggctgaatgtgcaggccttctccatgctgcgggcctggctgctgcacagcggccctgagggccctggcaccctggacacagatgacagaagtgagcaggagggcagcaccctgagcgtcatcagcgccaccagcagcgctggccgcctgctgcccccccgggagcggctgcgggaggtggcctttgagtactgccagaggctgattgagcagagcaacagaagagccctgaggaaaggagacagcgacctgcagaaggcctgcctggtggaggccgtgctggtgctggatgtgctgtgccggcaggaccccagcttcctgtaccgcagcctgagctgcctgaaggccctgcacggccgggtgcggggggaccctgcctctgtgcgggtgctgctgcccctggcccacttcttcctgagccatggagaggccgctgctgtggacagcgaggccgtgtaccagcacctgttcacccgcatccctgtggagcagttccacagccccatgctggcctttgagttcatccagttctgccgggacaacctgcacctgttcagcggccacctgagcaccctgcggctgtccttccccaacctcttcaagttcctggcctggaacagcccccccctgaccagcgagtttgtggccctgctgcctgccctggtggatgctggaacagccctggagatgctgcacgccctgctggacctgccctgcctgacagctgtgctggacctgcagctgcggagcgccccagctgccagcgagcggcccctgtgggacaccagcctgcgggcccccagctgcctggaggccttccgggacccccagttccagggcctcttccagtacctgctgcggcccaaggccagcggggccacagagcggctggcccccctgcaccagctgctgcagcccatggccggctgtgcccgggtggcccagtgtgcccaggccgtgcccaccctgctgcaggccttcttctctgctgtgacccaggtggctgatggcagcctcatcaaccagctggccctgctgctgctgggccgcagtgacagcctgtacccagcccctggctatgctgctggggtgcacaggccagatgcctgccggcccatcctggtgcccctgtag

SEQ ID NO: 182640 - DNA, 2424 bp, Artificial Sequence
  derived and/or modified sequence
atgttcagcgccggcgccgagagcctgctgcaccaggcccgggagattcaggacgaagagcttaaaaaattttgttcccgaatttgtaagctgctgcaggcagaggacctagggcctgacacactcgacagtctccagcgactgttcctaatcatctctgccacaaagtattcgagaagattggagaagacctgtgtggacctgctgcaggccaccttgggactgcccgcatgtcccgagcagctgcaagttctctgtgctgcgatcttgcgggagatgtccccaagtgactccctctcccttgcttgggaccacacccagaattcgcgacagctgtcactggtggcaagtgttttgttggcccagggggatagaaacgaagaagttcgggctgtgggacaaggcgtgctacgggctttagaaagcagacaacctgaaggccccagcctccgccacttactgccggtgatggctaaggtcgtagtcctctcccccggcacgcttcaggaggaccaagcgacactcctaagcaaacgtttggtcgattggttaagatacgcctctctgcagcaagggcttccacacagcggagggttcttcagcactcccagagccaggcagccgggacctgttaccgaagtggacggcgctgtagcaactgacttcttcactgtcctgtcctccggccatcgttttactgacgaccaatggctgaatgtgcaggctttctcgatgttgcgtgcatggctactgcacagtggacccgaaggtcccggtacactggatacagacgaccgctctgaacaagaggggagcacactctcagtcatttccgcaacttcgagcgccggcaggctgttgcctcctcgggagaggttaagagaggttgcatttgagtattgccagaggttaattgaacagagtaaccgtagagccctccgaaagggcgactctgatttgcaaaaggcttgcctggtggaagctgtgctagtgctcgatgtgctgtgccgccaggatccaagttttctgtacaggtctctgtcctgcctgaaagctctccacggacgggtaaggggcgaccccgcttccgtcagggttctccttcctcttgcccatttcttcctttcccatggcgaggcggctgccgtcgacagcgaggccgtgtaccagcacctgtttaccagaatacccgtggaacagttccatagccccatgttagcttttgagttcatccagttctgccgcgacaacctgcacctgttttcgggtcacctttccaccctgcggctgagttttccaaatctattcaaatttttggcctggaacagcccacctctaacatccgagttcgtcgcactcctgcccgctctggttgatgccggtaccgctctggagatgttgcatgcactcctcgacttgccttgcctgaccgccgtgctggaccttcagttacgatcagccccggccgcttcggaaaggcctctttgggatacgtccctgcgggcaccttcatgcctggaggcttttcgtgatcctcagttccaagggctgtttcagtatctgctcaggcccaaggcaagtggcgccactgaacgacttgctcctttgcaccaattactgcaaccaatggctggatgcgcgagagttgctcaatgtgcccaggccgtgcccacactgcttcaggcatttttcagcgccgtgacacaggtcgctgatggatctctgattaaccagctggccctactgctgctggggcggtcagatagcctttaccccgcccctggctacgcggcgggggtgcactcagtcttatctagccagttcctggccctttgcactttaaagcctagcctcgtagtggagctcgctcgggatctgcttgaattcctgggtagcgtgaacggcctgtgcagccgggcgagtctggtgacgagcgtagtttgggcgatcggtgaatatctgagcgtgacctacgacaggaggtgcaccgtcgaacaaatcaacaagttctttgaggccctggaagcattactgtttgaggtgacccaatgccgaccaagcgccgcgcttcctcgatgtccccctcaggtggtgacggtgctgatgactacactgaccaaactggcctccagaagtcaagacctgatccccagagcaagcttgttactgtccaagatgcgcacactggcccatagccctgctacttccagcacccactctgaggagggggccgaggcgatcaggacaagagctacggagttattgaccctcctgaagatgccgagtgtggcccagttcgtactgacgccatccacagaagtgtgcagtccgagataccatagggacgccaacactgccttacccctggcccttcggaccgtgtcccgccttgtggaaagagaggccgggctgatgcccggctag

SEQ ID NO: 182641 - DNA, 1842 bp, Artificial Sequence
  derived and/or modified sequence
atgttcagcgccggcgccgagagcctgctgcaccaggcccgggagattcaggatgaagaactgaaaaaattttgtagcagaatttgtaagttactgcaagccgaggatctgggccccgacactttggacagcctccagaggctcttcttgataatcagcgccactaaatatagtagaaggcttgaaaaaacctgcgtcgatcttctccaggcaacattaggattgcctgcttgtcccgagcagctgcaggtcctttgtgcagcaattttgagagaaatgtcgccttcagatagcctatctctcgcctgggatcatacccaaaattcgcggcagttgtctctggtcgcttcggtcctcctcgcccaaggagacaggaatgaggaggtgcgtgctgttggacagggcgtgctgcgcgctctcgaatcccggcagcccgaaggccctagcctgcgccaccttcttcctgttatggccaaagttgtggtgctttctcctggtacactacaagaagaccaagcaaccctgctgtctaaacgtttggtcgactggctacggtatgcctcactgcaacaggggttaccacactcagggggctttttcagcacgccgcgcgcgcgacagcctggaccagtgactgaagtggacggcgcggtcgccactgacttcttcaccgtattgtcgagtggtcaccggttcacagatgatcagtggctgaatgtgcaggccttttcgatgttgagggcctggctgctccattccggcccagagggacccggaacactcgacactgacgatcgctcagagcaagagggttctacactgtcagtaatcagcgctacatcaagtgcaggaagattactgcctccaagagagcggctgcgggaggtcgccttcgagtattgtcagaggcttatagagcaatccaatagacgcgcgctccggaaaggagattctgacctgcagaaggcttgcctggtggaggcagtgctcgtgctggatgttctgtgtcgccaggatccgtctttcctatacagaagcctgtcgtgtctgaaggcattacacggtagggtgcgtggtgatcctgcgagcgtccgagtgcttttacctctcgctcacttttttctgagccacggagaggccgcagccgtcgattctgaggctgtgtatcagcatctcttcacaaggatcccagtggaacagttccacagccccatgctcgccttcgagttcatccagttttgtcgggacaatctgcacctttttagcggacacttatccacgttaagactgtccttcccgaatctatttaaattcctagcatggaatagcccgcctttgacttccgaattcgtcgccctgttgccggcgctggtcgacgcaggtacagccctggaaatgcttcatgcccttctggacctgccctgtctgaccgcagtgcttgacctgcagctgcgctccgcaccagccgcctcagaacgcccactatgggatacgagcttgagggccccgtcctgcctggaagcattcagagacccccagtttcagggactctttcagtatctgctccgccctaaagcatctggcgctaccgaaaggctcgctcctctgcaccagctgctccaacctatggctggctgcgcaagagtcgcacagtgtgcccaggccgtccctacgctactgcaggcctttttctctgccgtaacacaagtcgcggatggaagcctgataaaccaactggccctgctactgctgggaagatccgactccctctacccggcccctggatacgccgcgggcgtgcaccgacccgatgcctgcagaccaatactcgttcctttatag

SEQ ID NO: 182642 - DNA, 2424 bp, Artificial Sequence
  derived and/or modified sequence
atgttctccgccggtgctgagtccctgctgcaccaggcgagggagattcaagatgaggagttgaagaagttctgttcccgaatctgtaagttgcttcaggccgaagatctcggcccagataccttagatagccttcagaggttgtttctgattatctccgccacgaaatatagccgtcggctcgagaagacatgtgtggacctgctgcaagcaacactggggctccctgcctgcccggaacagcttcaggtgctgtgtgcagccatcctccgcgaaatgagcccctctgattccctcagccttgcctgggatcacacccagaacagtcggcaactgagcctggtagctagtgtgctgctggcccagggcgatagaaatgaggaagtacgcgctgtgggacagggggtcctgcgcgctcttgaaagccggcaaccggaaggccctagcctacgccatctgctgcccgtgatggccaaggtggtggtcctgagtccaggaaccctgcaggaagaccaggcaacactgctgtcaaaacgcctggtggattggttgcgctacgcctcacttcagcagggattacctcactccgggggatttttttctacccctcgcgcacgccagcccggaccagttaccgaggttgatggtgctgttgccaccgatttctttacagtgcttagcagcgggcatcgcttcaccgatgaccagtggcttaacgtacaggctttttctatgctcagagcctggctcctgcactcgggtccagagggaccaggaactctggataccgacgaccggagcgagcaggagggcagtacgctcagcgtcattagcgctacatctagcgctggccgtctgctccccccacgagagaggctgcgggaagtggcctttgagtattgccaaaggttaatagagcagagtaaccgccgagccctccgtaaaggggactccgacttgcagaaggcgtgcctggttgaggctgtgttggttcttgatgtgctatgcaggcaagatccttcattcctgtatagatcgcttagttgcctgaaggccctccacggcagagtgcgcggtgatccagcttctgtaagggtgttactacccctggcccacttttttctgtctcacggcgaagctgcggcagtcgattccgaggctgtatatcagcacctctttacaagaatccccgtcgagcagttccactctccaatgctcgcattcgaattcattcagttttgccgcgacaacttgcacctgttctcaggacacctttccacactgaggctgagcttccccaacctatttaaatttctggcctggaacagcccaccactgacttctgaattcgtggctctgctgccagccctggttgacgcaggaactgcccttgaaatgttgcatgccctgctcgacctgccgtgcttgacggctgtcctagatctgcagctgcgtagcgctccagcagcctcagagaggcctctatgggacacttcgttgcgtgccccttcatgtctggaggcttttcgggatccacagttccagggactgttccagtatttgctccggcctaaggctagtggcgcaaccgaaagactggcccctctgcatcagttgctgcagcccatggccggatgcgctagggttgcccagtgcgcacaggctgtacccactctgttacaggcgttttttagcgctgtgacacaggttgcggacggctcgctaatcaaccaactggccttgctccttctcggccgtagcgattccctgtaccctgcccctggctacgccgctggggtccatagcgtgctctcttcgcagttcctcgctctttgcacgctcaagccatcactggtggtcgagctggcacgagatcttcttgagttcctggggagcgtgaatggtctttgcagccgggcaagcctggtgaccagtgtagtctgggccataggagagtacctctccgtgacatacgatagacgatgcactgtggagcagatcaacaagttttttgaagcgctcgaggccctgctattcgaagtgactcagtgtaggccgtcggctgccctcccacgctgtcccccacaggttgtcactgttctcatgacaacattaacgaagctggcttccagatcccaggatttgatacccagggcgtctttactgctttctaagatgaggaccctggcacacagtccggcaacttcgtctactcactccgaagaaggcgcagaggccattaggacaagagccacagaattgctgaccctgttgaagatgccctcagtggcccaattcgttctaaccccctcaacagaagtttgctcacctagataccatcgtgatgcgaatacagccctgccccttgccttgcggacagtgtcacgtctggtggagagagaagcgggactgatgccaggctag

SEQ ID NO: 182643 - DNA, 1842 bp, Artificial Sequence
  derived and/or modified sequence
atgttttcagctggggctgaatcccttttacaccaggctcgggaaattcaggatgaagagctgaaaaagttctgttctagaatctgtaaattacttcaagccgaggatcttggccctgatactttggactctctgcagaggctcttcttgatcatcagcgcaaccaaatattctcgcaggttggagaaaacttgtgtggatctactgcaggcaactctcggtctgcccgcatgccccgaacaattgcaggtcctgtgtgcggctatcctgagagagatgtccccatcagactcgctgtcccttgcatgggaccacactcagaactccagacaattgagcttggttgccagcgtgctgctggcccaaggggatcggaacgaagaggtccgggcagtggggcagggggtgctccgggctttagagtctcgacagcctgaaggaccctctctgcgtcacctcctgcccgtgatggcaaaggtggttgtgctttctcccggaaccctccaggaggatcaagctacgctgttgagcaaacggctcgttgattggttgcgttatgcttccctgcagcagggtctgccccactccggaggattcttctccacccccagagccaggcagcctgggccagtcacagaggtggatggggctgtagccacagatttcttcaccgtcctgagctccggtcatcggttcacagatgatcagtggctcaatgtccaagcattcagtatgttgcgcgcttggcttctgcactctgggccagaaggtcccggaactctggataccgacgaccggtcagagcaagaggggagcaccctgtccgtgatatcagccacgtcatcagccggaagactccttcctccaagagagcgcctcagagaggtggcctttgaatactgccagagactgatcgagcagtccaaccgaagagcgctgcggaagggagattctgaccttcagaaagcttgcctggtggaagcagttcttgtacttgatgtgctctgccgtcaagatccctcgttcctgtacaggtccctctcctgcttgaaggctctgcacggacgggttcgcggagaccctgcatctgttcgagtcctgttgcccctagcccatttttttctgagtcacggggaggccgctgctgttgacagcgaggctgtgtatcagcacctgttcactagaattccagtggaacaatttcactcccccatgctggcgtttgagttcatccaattctgtagggacaatctacaccttttcagtggccatctgagcacccttcgtcttagtttcccaaatctgttcaaattcctggcgtggaatagtccaccgttaacatcggaattcgtggctctcctgcctgcgctggttgatgcagggacagctcttgagatgcttcacgcccttctcgaccttccgtgcctgaccgccgtcctcgacctacaactgcggagtgcacccgctgcgagcgagcgcccactgtgggacaccagcttacgcgctccttcatgccttgaggctttccgcgacccacaatttcaagggctgtttcagtacctgttgcgccctaaagcatcgggagcaactgaacggctggcgcctcttcatcaactactccagcctatggccggatgtgcgagagtggcacagtgcgcacaggccgtcccaactcttctccaggcatttttctctgccgttactcaagtcgcggacggttccctcatcaaccagctggccttgcttctgttggggcgatctgactccctataccctgcgccaggatacgctgccggagtacataggccagatgcctgccgccctatcttggtgcctctatag

SEQ ID NO: 182644 - DNA, 2901 bp, Artificial Sequence
  derived and/or modified sequence
tgacgcggtcccggaagttgaccggggtgcggagctcctgggctgcagctcctggagtttccgaggttcgtgcgcgtctggtggcggcggcgtgatgttctcggcaggagcggagagtttgctccaccaggccagggagatccaggacgaggagctgaagaagttctgttcccggatctgtaaactgctgcaggcggaggacttggggccggacaccctcgactccctgcagaggctcttcctcatcatctcagccacgaagtacagccggaggctggagaagacatgcgtagacctgctgcaggccaccctcggcctgcctgcatgccccgagcagctccaggtgctttgcgccgccatcctgcgagagatgtccccctctgacagcctcagcctggcctgggaccacacgcagaacagccggcagctgagcctggtggcctccgttctcttggcccagggtgacagaaacgaggaggtcagagccgtgggccagggcgtgctacgagcgctggagagccggcagcctgagggacccagcctcagacacctcctccccgtcatggccaaggtcgtggtcctcagcccgggcaccctccaggaggaccaggccaccctgctcagcaagcggctggtcgactggctgcgctacgccagcctccagcaagggctcccacactccggcggcttcttctccacgcccagggcccggcagccgggccccgtcaccgaggtggacggggcggtagccacagacttcttcacggtgctctccagcggccaccgcttcacagacgaccagtggctgaacgtgcaggccttctctatgctgcgggcgtggctgctgcacagcggccccgagggcccgggcaccctggacacagatgacaggtcagagcaggagggctccactctgtcggtgatctccgccacctcctctgccggccgcctgctgccgccccgggagcggcttcgggaggtggccttcgagtactgccagcgcctcattgagcaaagtaaccgacgagccctgaggaagggggactccgacctgcagaaagcttgcctggtggaggccgtgctggtgctggacgtgctgtgccggcaggacccgtccttcctgtaccgaagtctctcctgcctgaaggccctgcacgggcgggtgcgcggggacccggcctctgtgcgggtgctgctgcccctcgcccacttcttcctgagccacggggaagcggctgcagtggactcggaagccgtctaccagcacctgttcaccaggatcccggtggagcagttccacagccccatgctggcctttgaattcatccagttctgcagggacaacctccacctgttcagcgggcacctcagcaccctcagattgagcttccccaacctctttaagttcctggcctggaacagcccacccctcacctccgagtttgtggcgctcctcccggccctggtggacgctggcacagccctggagatgctgcacgcgctgctggacctgccctgcttgacggcggtgctggacctgcagctcaggtcagcaccggctgcatccgagaggccactctgggacacctctctcagggcccccagctgcctggaggccttccgggacccgcagttccagggtcttttccaatacctgctgcgccccaaggccagtggcgccactgagaggttggcgccactccaccagctgctgcagcccatggccggctgtgcccgcgtggcccagtgtgcccaggccgtgcccacgctgctgcaggcattcttctcagcagtgacccaggtggctgacgggtccctgatcaaccagctggcgctgctgctcctgggcaggagcgactcgctctacccggccccagggtacgctgccggtgtgcacagtgtgctgagttctcagttcctggccctgtgtacgctgaaaccctccctggtggtggagctggcaagagacctgctggagttcctgggcagcgtgaatggtctctgcagcagggcgagcctcgtcaccagcgtggtgtgggccatcggcgagtacctgtcggtgacctacgatcggaggtgcaccgtggagcagatcaacaagttcttcgaagccctggaggctctgctattcgaggtcacccagtgccgcccctctgctgccctgcccaggtgtcccccccaggtggtcaccgtgctgatgaccacgctgacgaagctggcctcccggagccaagatctgatccccagggcctctttattgctgtcaaagatgaggaccctggctcacagtccagccaccagctccacgcacagcgaggagggcgcggaagccatccgtacccgggccacagagctgctgaccctgctgaagatgcctagcgtggcccagtttgtgctcacacccagcacggaggtgtgcagcccccgctatcaccgcgatgccaacacggccctgcccctggccctgcgcacggtcagccggctggtggagagggaggccggcctcatgccagggtgaagggacagtggccagggacttcggtgcagattaagagcctgggcagccagcttgctactgaggccaggctgataggagctcaggagggcgcgggagtcctgggagaggaggcaaggcccacggtgggcttggcaccctcacagacacgcggggctggcccccctgctcaccctctgggctttgtctccgagccttttgctcccaggcaacactgagctgagctgaggggtgccatggagcggctctgattggaggcttgaggccctgtggctgggtcgggtggaggctgctgggtctgtttcctagtcttttgtttttggacagttgatgggcaagaagagctgcagtaaaagtaaatctcctttaataagcgtctgtatgaa

SEQ ID NO: 182645 - DNA, 1925 bp, Artificial Sequence
  derived and/or modified sequence
cggaagttgaccggggtgcggagctcctgggctgcagctcctggagtttccgaggttcgtgcgcgtctggtggcggcggcgtgatgttctcggcaggagcggagagtttgctccaccaggccagggagatccaggacgaggagctgaagaagttctgttcccggatctgtaaactgctgcaggcggaggacttggggccggacaccctcgactccctgcagaggctcttcctcatcatctcagccacgaagtacagccggaggctggagaagacatgcgtagacctgctgcaggccaccctcggcctgcctgcatgccccgagcagctccaggtgctttgcgccgccatcctgcgagagatgtccccctctgacagcctcagcctggcctgggaccacacgcagaacagccggcagctgagcctggtggcctccgttctcttggcccagggtgacagaaacgaggaggtcagagccgtgggccagggcgtgctacgagcgctggagagccggcagcctgagggacccagcctcagacacctcctccccgtcatggccaaggtcgtggtcctcagcccgggcaccctccaggaggaccaggccaccctgctcagcaagcggctggtcgactggctgcgctacgccagcctccagcaagggctcccacactccggcggcttcttctccacgcccagggcccggcagccgggccccgtcaccgaggtggacggggcggtagccacagacttcttcacggtgctctccagcggccaccgcttcacagacgaccagtggctgaacgtgcaggccttctctatgctgcgggcgtggctgctgcacagcggccccgagggcccgggcaccctggacacagatgacaggtcagagcaggagggctccactctgtcggtgatctccgccacctcctctgccggccgcctgctgccgccccgggagcggcttcgggaggtggccttcgagtactgccagcgcctcattgagcaaagtaaccgacgagccctgaggaagggggactccgacctgcagaaagcttgcctggtggaggccgtgctggtgctggacgtgctgtgccggcaggacccgtccttcctgtaccgaagtctctcctgcctgaaggccctgcacgggcgggtgcgcggggacccggcctctgtgcgggtgctgctgcccctcgcccacttcttcctgagccacggggaagcggctgcagtggactcggaagccgtctaccagcacctgttcaccaggatcccggtggagcagttccacagccccatgctggcctttgaattcatccagttctgcagggacaacctccacctgttcagcgggcacctcagcaccctcagattgagcttccccaacctctttaagttcctggcctggaacagcccacccctcacctccgagtttgtggcgctcctcccggccctggtggacgctggcacagccctggagatgctgcacgcgctgctggacctgccctgcttgacggcggtgctggacctgcagctcaggtcagcaccggctgcatccgagaggccactctgggacacctctctcagggcccccagctgcctggaggccttccgggacccgcagttccagggtcttttccaatacctgctgcgccccaaggccagtggcgccactgagaggttggcgccactccaccagctgctgcagcccatggccggctgtgcccgcgtggcccagtgtgcccaggccgtgcccacgctgctgcaggcattcttctcagcagtgacccaggtggctgacgggtccctgatcaaccagctggcgctgctgctcctgggcaggagcgactcgctctacccggccccagggtacgctgccggtgtgcacaggcctgatgcatgcaggcccatcctggttccactctga

SEQ ID NO: 182646 - DNA, 2424 bp, Artificial Sequence
  derived and/or modified sequence
atgttcagcgccggcgccgagagcctgctgcaccaggccagagagatccaggacgaggagctgaagaagttctgcagcagaatctgcaagctgctgcaggccgaggacctgggccccgacaccctggacagcctgcagagactgttcctgatcatcagcgccaccaagtacagcagaagactggagaagacctgcgtggacctgctgcaggccaccctgggcctgcccgcctgccccgagcagctgcaggtgctgtgcgccgccatcctgagagagatgagccccagcgacagcctgagcctggcctgggaccacacccagaacagcagacagctgagcctggtggccagcgtgctgctggcccagggcgacagaaacgaggaggtgagagccgtgggccagggcgtgctgagagccctggagagcagacagcccgagggccccagcctgagacacctgctgcccgtgatggccaaggtggtggtgctgagccccggcaccctgcaggaggaccaggccaccctgctgagcaagagactggtggactggctgagatacgccagcctgcagcagggcctgccccacagcggcggcttcttcagcacccccagagccagacagcccggccccgtgaccgaggtggacggcgccgtggccaccgacttcttcaccgtgctgagcagcggccacagattcaccgacgaccagtggctgaacgtgcaggccttcagcatgctgagagcctggctgctgcacagcggccccgagggccccggcaccctggacaccgacgacagaagcgagcaggagggcagcaccctgagcgtgatcagcgccaccagcagcgccggcagactgctgccccccagagagagactgagagaggtggccttcgagtactgccagagactgatcgagcagagcaacagaagagccctgagaaagggcgacagcgacctgcagaaggcctgcctggtggaggccgtgctggtgctggacgtgctgtgcagacaggaccccagcttcctgtacagaagcctgagctgcctgaaggccctgcacggcagagtgagaggcgaccccgccagcgtgagagtgctgctgcccctggcccacttcttcctgagccacggcgaggccgccgccgtggacagcgaggccgtgtaccagcacctgttcaccagaatccccgtggagcagttccacagccccatgctggccttcgagttcatccagttctgcagagacaacctgcacctgttcagcggccacctgagcaccctgagactgagcttccccaacctgttcaagttcctggcctggaacagcccccccctgaccagcgagttcgtggccctgctgcccgccctggtggacgccggcaccgccctggagatgctgcacgccctgctggacctgccctgcctgaccgccgtgctggacctgcagctgagaagcgcccccgccgccagcgagagacccctgtgggacaccagcctgagagcccccagctgcctggaggccttcagagacccccagttccagggcctgttccagtacctgctgagacccaaggccagcggcgccaccgagagactggcccccctgcaccagctgctgcagcccatggccggctgcgccagagtggcccagtgcgcccaggccgtgcccaccctgctgcaggccttcttcagcgccgtgacccaggtggccgacggcagcctgatcaaccagctggccctgctgctgctgggcagaagcgacagcctgtaccccgcccccggctacgccgccggcgtgcacagcgtgctgagcagccagttcctggccctgtgcaccctgaagcccagcctggtggtggagctggccagagacctgctggagttcctgggcagcgtgaacggcctgtgcagcagagccagcctggtgaccagcgtggtgtgggccatcggcgagtacctgagcgtgacctacgacagaagatgcaccgtggagcagatcaacaagttcttcgaggccctggaggccctgctgttcgaggtgacccagtgcagacccagcgccgccctgcccagatgccccccccaggtggtgaccgtgctgatgaccaccctgaccaagctggccagcagaagccaggacctgatccccagagccagcctgctgctgagcaagatgagaaccctggcccacagccccgccaccagcagcacccacagcgaggagggcgccgaggccatcagaaccagagccaccgagctgctgaccctgctgaagatgcccagcgtggcccagttcgtgctgacccccagcaccgaggtgtgcagccccagataccacagagacgccaacaccgccctgcccctggccctgagaaccgtgagcagactggtggagagagaggccggcctgatgcccggctag

SEQ ID NO: 182647 - DNA, 1842 bp, Artificial Sequence
  derived and/or modified sequence
atgttcagcgccggcgccgagagcctgctgcaccaggccagagagatccaggacgaggagctgaagaagttctgcagcagaatctgcaagctgctgcaggccgaggacctgggccccgacaccctggacagcctgcagagactgttcctgatcatcagcgccaccaagtacagcagaagactggagaagacctgcgtggacctgctgcaggccaccctgggcctgcccgcctgccccgagcagctgcaggtgctgtgcgccgccatcctgagagagatgagccccagcgacagcctgagcctggcctgggaccacacccagaacagcagacagctgagcctggtggccagcgtgctgctggcccagggcgacagaaacgaggaggtgagagccgtgggccagggcgtgctgagagccctggagagcagacagcccgagggccccagcctgagacacctgctgcccgtgatggccaaggtggtggtgctgagccccggcaccctgcaggaggaccaggccaccctgctgagcaagagactggtggactggctgagatacgccagcctgcagcagggcctgccccacagcggcggcttcttcagcacccccagagccagacagcccggccccgtgaccgaggtggacggcgccgtggccaccgacttcttcaccgtgctgagcagcggccacagattcaccgacgaccagtggctgaacgtgcaggccttcagcatgctgagagcctggctgctgcacagcggccccgagggccccggcaccctggacaccgacgacagaagcgagcaggagggcagcaccctgagcgtgatcagcgccaccagcagcgccggcagactgctgccccccagagagagactgagagaggtggccttcgagtactgccagagactgatcgagcagagcaacagaagagccctgagaaagggcgacagcgacctgcagaaggcctgcctggtggaggccgtgctggtgctggacgtgctgtgcagacaggaccccagcttcctgtacagaagcctgagctgcctgaaggccctgcacggcagagtgagaggcgaccccgccagcgtgagagtgctgctgcccctggcccacttcttcctgagccacggcgaggccgccgccgtggacagcgaggccgtgtaccagcacctgttcaccagaatccccgtggagcagttccacagccccatgctggccttcgagttcatccagttctgcagagacaacctgcacctgttcagcggccacctgagcaccctgagactgagcttccccaacctgttcaagttcctggcctggaacagcccccccctgaccagcgagttcgtggccctgctgcccgccctggtggacgccggcaccgccctggagatgctgcacgccctgctggacctgccctgcctgaccgccgtgctggacctgcagctgagaagcgcccccgccgccagcgagagacccctgtgggacaccagcctgagagcccccagctgcctggaggccttcagagacccccagttccagggcctgttccagtacctgctgagacccaaggccagcggcgccaccgagagactggcccccctgcaccagctgctgcagcccatggccggctgcgccagagtggcccagtgcgcccaggccgtgcccaccctgctgcaggccttcttcagcgccgtgacccaggtggccgacggcagcctgatcaaccagctggccctgctgctgctgggcagaagcgacagcctgtaccccgcccccggctacgccgccggcgtgcacagacccgacgcctgcagacccatcctggtgcccctgtag

SEQ ID NO: 182648 - DNA, 759 bp, Artificial Sequence
  derived and/or modified sequence
atgggcaagagctacgacggcagagcctacgtgatcaccggcatgtggaaccccaacgcccccgtgttcctggccctgaacgaggagacccccaaggacaagcaggtgtacatgaccgtggccgtggacatggtggtgaccgaggtggtggagcccgtgagattcctgctggagaccgtggtgagagtgtaccccgccaacgagagattctggtacttcagcagaaagaccttcaccgagaccttcttcatgagactgaagcagagcgagggcaagggccacaccaacgccggcgacgccatctacgaggtggtgagcctgcagagagagagcgacaaggaggagcccgtgacccccaccagcggcggcggccccatgagcccccaggacgacgaggccgaggaggagagcgacaacgagctgagcagcggcaccggcgacgtgagcaaggactgccccgagaagatcctgtacagctggggcgagctgctgggcaagtggcacagcaacctgggcgccagacccaagggcctgagcaccctggtgaagagcggcgtgcccgaggccctgagagccgaggtgtggcagctgctggccggctgccacgacaaccaggccatgctggacagatacagaatcctgatcaccaaggtgtgctggagcctgctggaggtgcacagcagaccctgcctgcccggctaccaccagtggaagctgcagaacagcaagtactgcagaatggccaacgtggccgcctag

SEQ ID NO: 182649 - DNA, 2484 bp, Artificial Sequence
  derived and/or modified sequence
atggaggtgagagccagcctgcagaaggtgagcggcagcagcgacagcgtggccaccatgaacagcgaggagttcgtgctggtgccccagtacgccgacgacaacagcaccaagcacgaggagaagccccagctgaagatcgtgagcaacggcgacgagcagctggagaaggccatggaggagatcctgagagacagcgagaagagacccagcagcctgctggtggactgccagagcagcagcgagatcagcgaccacagcttcggcgacatccccgccagccagaccaacaagcccagcctgcagctgatcctggaccccagcaacaccgagatcagcacccccagacccagcagccccggcggcctgcccgaggaggacagcgtgctgttcaacaagctgacctacctgggctgcatgaaggtgagcagccccagaaacgaggtggaggccctgagagccatggccaccatgaagagcagcagccagtaccccttccccgtgaccctgtacgtgcccaacgtgcccgagggcagcgtgagaatcatcgaccagagcagcaacgtggagatcgccagcttccccatctacaaggtgctgttctgcgccagaggccacgacggcaccaccgagagcaactgcttcgccttcaccgagagcagccacggcagcgaggagttccagatccacgtgttcagctgcgagatcaaggaggccgtgagcagaatcctgtacagcttctgcaccgccttcaagagaagcagcagacaggtgagcgacgtgaaggacagcgtgatccccacccccgacagcgacgtgttcaccttcagcgtgagcctggaggtgaaggaggacgacggcaagggcaacttcagactgctggtgatccccatccccttcgagtacttcagccccgtgcccaaggacagagacaagttctacttcaagctgaagcagggcatcgagaagaaggtggtgatcaccgtgcagcagctgagcaacaaggagctggccatcgagagatgcttcggcatgctgctgagccccggcagaaacgtgaagaacagcgacatgcacctgctggacatggagagcatgggcaagagctacgacggcagagcctacgtgatcaccggcatgtggaaccccaacgcccccgtgttcctggccctgaacgaggagacccccaaggacaagcaggtgtacatgaccgtggccgtggacatggtggtgaccgaggtggtggagcccgtgagattcctgctggagaccgtggtgagagtgtaccccgccaacgagagattctggtacttcagcagaaagaccttcaccgagaccttcttcatgagactgaagcagagcgagggcaagggccacaccaacgccggcgacgccatctacgaggtggtgagcctgcagagagagagcgacaaggaggagcccgtgacccccaccagcggcggcggccccatgagcccccaggacgacgaggccgaggaggagagcgacaacgagctgagcagcggcaccggcgacgtgagcaaggactgccccgagaagatcctgtacagctggggcgagctgctgggcaagtggcacagcaacctgggcgccagacccaagggcctgagcaccctggtgaagagcggcgtgcccgaggccctgagagccgaggtgtggcagctgctggccggctgccacgacaaccaggccatgctggacagatacagaatcctgatcaccaaggacagcgcccaggagagcgtgatcaccagagacatccacagaaccttccccgcccacgactacttcaaggacaccggcggcgacggccaggagagcctgtacaagatctgcaaggcctacagcgtgtacgacgaggacatcggctactgccagggccagagcttcctggccgccgtgctgctgctgcacatgcccgaggagcaggccttctgcgtgctggtgaagatcatgtacgactacggcctgagagacctgtacagaaacaacttcgaggacctgcactgcaagttctaccagctggagagactgatgcaggagcagctgcccgacctgcacagccacttcagcgacctgaacctggaggcccacatgtacgccagccagtggttcctgaccctgttcaccgccaagttccccctgtgcatggtgttccacatcatcgacctgctgctgtgcgagggcctgaacatcatcttccacgtggccctggccctgctgaagaccagcaaggaggacctgctgcaggccgacttcgagggcgccctgaagttcttcagagtgcagctgcccaagagatacagagccgaggagaacgccagaagactgatggagcaggcctgcaacatcaaggtgcccaccaagaagctgaagaagtacgagaaggagtaccagaccatgagagagagccagctgcagcaggaggaccccatggacagatacaagttcttcttcctgtag

SEQ ID NO: 182650 - DNA, 1749 bp, Artificial Sequence
  derived and/or modified sequence
atggaggtgagagccagcctgcagaaggtgagcggcagcagcgacagcgtggccaccatgaacagcgaggagttcgtgctggtgccccagtacgccgacgacaacagcaccaagcacgaggagaagccccagctgaagatcgtgagcaacggcgacgagcagctggagaaggccatggaggagatcctgagagacagcgagaagagacccagcagcctgctggtggactgccagagcagcagcgagatcagcgaccacagcttcggcgacatccccgccagccagaccaacaagcccagcctgcagctgatcctggaccccagcaacaccgagatcagcacccccagacccagcagccccggcggcctgcccgaggaggacagcgtgctgttcaacaagctgacctacctgggctgcatgaaggtgagcagccccagaaacgaggtggaggccctgagagccatggccaccatgaagagcagcagccagtaccccttccccgtgaccctgtacgtgcccaacgtgcccgagggcagcgtgagaatcatcgaccagagcagcaacgtggagatcgccagcttccccatctacaaggtgctgttctgcgccagaggccacgacggcaccaccgagagcaactgcttcgccttcaccgagagcagccacggcagcgaggagttccagatccacgtgttcagctgcgagatcaaggaggccgtgagcagaatcctgtacagcttctgcaccgccttcaagagaagcagcagacaggtgagcgacgtgaaggacagcgtgatccccacccccgacagcgacgtgttcaccttcagcgtgagcctggaggtgaaggaggacgacggcaagggcaacttcagactgctggtgatccccatccccttcgagtacttcagccccgtgcccaaggacagagacaagttctacttcaagctgaagcagggcatcgagaagaaggtggtgatcaccgtgcagcagctgagcaacaaggagctggccatcgagagatgcttcggcatgctgctgagccccggcagaaacgtgaagaacagcgacatgcacctgctggacatggagagcatgggcaagagctacgacggcagagcctacgtgatcaccggcatgtggaaccccaacgcccccgtgttcctggccctgaacgaggagacccccaaggacaagcaggtgtacatgaccgtggccgtggacatggtggtgaccgaggtggtggagcccgtgagattcctgctggagaccgtggtgagagtgtaccccgccaacgagagattctggtacttcagcagaaagaccttcaccgagaccttcttcatgagactgaagcagagcgagggcaagggccacaccaacgccggcgacgccatctacgaggtggtgagcctgcagagagagagcgacaaggaggagcccgtgacccccaccagcggcggcggccccatgagcccccaggacgacgaggccgaggaggagagcgacaacgagctgagcagcggcaccggcgacgtgagcaaggactgccccgagaagatcctgtacagctggggcgagctgctgggcaagtggcacagcaacctgggcgccagacccaagggcctgagcaccctggtgaagagcggcgtgcccgaggccctgagagccgaggtgtggcagctgctggccggctgccacgacaaccaggccatgctggacagatacagaatcctgatcaccaagtag

SEQ ID NO: 182651 - DNA, 2448 bp, Artificial Sequence
  derived and/or modified sequence
atggaggtgcgggccagtcttcagaaggtatctggaagtagtgactccgttgcgactatgaactctgaggagtttgttctagtgcctcaatacgccgatgacaacagcacgaagcacgaagagaagccgcagttgaagatagtgtcaaacggggacgagcaattagagaaagcgatggaagagattttacgggattcagagaagcggccgtcatccttgctagtcgactgtcagtcaagcagtgaaatctcggatcattcgttcggcgatatcccggccagtcagaccaataagcccagcctgcagcttatcctggatccttcgaacactgaaatcagcacacctcggccctctagtcccggaggattgccggaagaggactccgtactgttcaataagctgacctaccttggatgcatgaaagtgagtagtcccaggaatgaggttgaagccttacgggctatggccactatgaaatcaagcagccagtatccattccctgtgaccctctatgtccctaacgtgcccgaggggagtgtgcgtatcatcgaccagtcaagcaatgtcgagatcgctagctttccaatttataaagtgctgttttgtgcccgaggacatgatggcactaccgagtcgaattgcttcgcattcacagaaagctcccacgggagcgaggagttccagattcatgtattttcctgtgagatcaaggaagccgtctcgcgaatactgtattctttctgcactgcttttaaacggtcaagccggcaggtgtccgatgtgaaggactctgttattcccactcctgacagcgacgttttcacgttctctgtttcactggaggtgaaagaggacgacggaaaggggaatttcagcccggtgcccaaagaccgtgataagttctatttcaagcttaaacaaggaatcgagaaaaaggtcgtaataaccgtgcagcagctttcaaacaaggagctggccatagaacgctgcttcgggatgttgctttcacccggacgcaacgtgaagaattccgacatgcacctgcttgacatggaatcgatgggaaagtcatacgatggccgggcctatgtcataaccggaatgtggaatcccaacgctcctgttttcttagctctgaacgaggaaactccaaaagataaacaggtgtatatgacagtcgccgtggacatggtagtgaccgaagtcgtcgaacccgttcgtttcctcctcgaaaccgttgtccgtgtgtatccggccaacgagaggttttggtacttctcacgaaagactttcacagagaccttctttatgcggctgaagcagagcgaagggaaagggcatacgaatgcgggagacgccatatatgaagtggtcagcctccagcgggagtctgacaaagaggagcccgtcactccaacttccggcggaggaccaatgagtcctcaggacgacgaggcagaagaggagtccgataacgaactgagcagcggcactggagatgtgagcaaggactgtcccgagaaaatcttgtactcctggggtgaactgttggggaaatggcactcaaaccttggagcgcgaccaaagggtcttagcacattggtgaagtccggggttcctgaagcgctgcgcgccgaggtgtggcagttgctggccggatgtcacgacaatcaggcaatgctggacagataccggatattgatcaccaaggacagtgcccaggagtccgtcattacccgcgacattcacagaactttccctgcccatgactactttaaggacacaggaggagatggccaggaaagtttatataagatctgcaaagcgtactctgtatacgacgaggacattgggtactgtcagggacagagtttcctggccgcggtgctgctgttgcatatgccagaggagcaagccttctgcgtccttgttaagattatgtatgactatggcctgcgtgacctgtatcggaataacttcgaggacttgcattgcaagttctaccagctcgagcgcctaatgcaggaacagctgcccgatctgcacagtcattttagtgatctgaatctggaagctcacatgtacgcgagccagtggttcctgacactctttacagctaagtttccattgtgcatggtgtttcatatcatcgacctgctcctatgtgaaggtctcaacattatctttcatgtcgctcttgctctgctgaagacctccaaggaggatcttctgcaggccgactttgagggcgctctgaaatttttccgagtgcaactccccaagaggtatagggccgaggagaatgctaggcgcctgatggaacaagcgtgcaatatcaaagtgcccacaaagaaactgaagaagtatgagaaagagtatcagactatgcgggagtcccagctgcagcaggaagaccccatggacagatataagtttgtgtacctgtag

SEQ ID NO: 182652 - DNA, 759 bp, Artificial Sequence
  derived and/or modified sequence
atgggtaaatcatacgacggacgcgcttacgtaataacaggaatgtggaaccctaacgcaccagttttccttgcactcaacgaagagactcctaaggataaacaggtgtacatgaccgtggctgtggacatggtcgttacagaggtcgtcgagcccgtcaggtttctgctcgagactgtggtacgggtgtatcccgccaacgaaaggttctggtatttttcccgcaagacgttcactgaaacctttttcatgaggctcaaacagtccgagggaaaggggcatacgaacgctggagatgctatctacgaagtcgttagcctgcagcgtgaatcggataaagaagagcccgtgactcccacgtccggcgggggccctatgtccccgcaggatgatgaggctgaagaggagtctgataacgaactcagcagcggcacaggagacgtttcaaaggactgtccagagaagattctgtactcctggggtgagctgctcggcaaatggcatagtaacctgggtgctcgccctaagggtcttagtacactcgtgaaatctggtgtgcccgaggctttgcgagccgaagtgtggcagctgttagccggctgccatgacaatcaggccatgctggaccggtatcgcatactcatcactaaggtctgctggtccctgctcgaggtgcacagccggccctgccttcctggatatcatcaatggaagctgcagaacagtaagtactgccggatggctaatgtggccgcttag

SEQ ID NO: 182653 - DNA, 2484 bp, Artificial Sequence
  derived and/or modified sequence
atggaagtacgagcctcactccagaaagtgtcgggcagctctgacagcgtggccactatgaacagtgaagagtttgtgttggttccccaatatgctgacgacaactcaacaaagcacgaagagaaacctcagctgaaaattgtgtcaaatggagacgaacagctcgagaaagctatggaagagatactccgggactcggaaaaaagaccatcctctctgctggtcgactgtcagtcaagcagtgagatttccgaccacagctttggcgatattcctgcctcccagactaataaaccgtccttgcagttgatattagatcctagcaataccgagatcagcaccccacgtcccagctcaccgggtgggctgcctgaggaagacagcgtgctcttcaacaaactgacctacctcggatgtatgaaagtgagcagtcctcggaatgaagttgaagcattacgtgcgatggctacaatgaagtcttcctcccagtacccattccccgtgaccttgtatgtgcccaatgtgccagagggctctgtgcggattatcgaccagtcgtctaatgtggaaatcgcatctttcccaatctacaaagtattattttgcgcaagagggcatgacggaactacggagagcaattgcttcgcattcaccgaatcttcccacggctctgaggaattccagattcacgtgttttcctgtgaaatcaaggaagccgtcagtagaatcctgtattctttctgcacagccttcaagaggagtagcaggcaagtctctgacgtgaaggactcagtcattcctacgcccgacagcgacgtatttactttcagcgtgtccctggaggttaaagaagatgacggtaagggcaattttagactgcttgtaattcctattcctttcgaatacttcagtccagtgcccaaagatagagataaattctactttaagcttaaacagggcattgagaagaaggtggtgatcacagtccaacagctctctaataaagaactcgccattgagcgctgtttcgggatgctgctgtcacccggtaggaatgtgaagaattcagatatgcatctgctggacatggagagcatgggcaaatcctacgacggtagggcgtatgtgattaccggaatgtggaatcctaacgctcccgtcttccttgccctgaacgaggagacccctaaggacaagcaggtgtacatgactgttgccgtggatatggtggtaaccgaggtggtagagccggtcaggtttctgctagagactgtcgttcgagtgtacccagccaacgagcggttctggtatttctccagaaaaactttcaccgagaccttctttatgcgcctgaaacagtcagagggtaaaggccatactaatgctggagacgcgatctatgaagtcgtaagtttgcagagggagtccgataaggaggagccagttacacccacttcaggcgggggccctatgtcaccccaagatgatgaagcagaggaagagtccgataacgagctgagctctgggacaggggacgttagcaaggactgccctgagaaaatcttgtattcctggggcgagttgctggggaagtggcactctaatcttggtgcgcgccccaagggcctttccaccttggtgaaatccggggtacctgaagcactgagggccgaagtctggcagcttttagccggctgccatgataatcaggccatgttggacaggtaccgcattctgataaccaaggactccgcccaggagtccgttattacacgggacattcatcgaacgttccccgcacatgattattttaaggacaccggtggagatggacaggaaagcctgtacaaaatttgcaaggcttattccgtttacgacgaggatatcggctactgccagggccagtcttttctggctgccgtactgttgttacatatgcctgaggagcaagccttttgtgtactggtcaagatcatgtatgattatggactgagggatctctatcggaacaactttgaggacctccactgcaagttttatcagctggaacgtctgatgcaggaacagctgccagatctgcactcccacttttccgatttgaatctcgaggcacatatgtatgcgagccagtggttcctcacgttgttcactgcaaaattcccactgtgcatggtctttcacattattgatttactcctctgcgaaggactgaatattatctttcatgtcgcactggcattactgaaaacatccaaggaagacctgctgcaggccgattttgagggagctctcaagttttttcgcgtgcagctacctaaaagatatagggcagaagagaatgccaggcgcttaatggaacaggcttgcaatattaaggttccaacaaagaagcttaaaaagtacgagaaggagtaccagactatgcgggaatcccaactgcagcaagaagacccaatggacaggtacaaattcttcttcctgtag

SEQ ID NO: 182654 - DNA, 2481 bp, Artificial Sequence
  derived and/or modified sequence
atggaggtcagagcttcattacagaaggttagtggatcatctgattctgtggctacaatgaacagtgaagaatttgttttggttcctcagtatgcagatgataattctacaaaacatgaagaaaaacctcaactgaagatagtttctaatggtgatgaacaattggaaaaagccatggaagagattttgagagattccgagaaaaggccaagcagtcttcttgttgattgtcaaagttccagtgagatttcagaccattcgtttggagatattccagccagccaaacaaataagccatctcttcagttaattttggatccgtctaacacagaaatttctacacccagaccatcttctccaggtggactacctgaagaagatagtgttttatttaataaactgacctacttaggatgtatgaaggtttcttccccacgtaatgaagtagaggctttacgggcaatggcaaccatgaaatcttccagtcaatacccctttcctgttaccctgtatgtaccaaatgttccagaaggttctgtgagaattatagaccaatccagcaatgtggagatagcatcttttccaatctataaggtgttattctgtgcacgtggacatgacggaacaacagagagcaattgctttgcatttacagagagttcccatggttcggaagaatttcagatacatgttttctcctgtgaaattaaagaggcagtaagcagaattttgtacagtttctgtacagcattcaaacgttcttccagacaagtgtctgatgttaaagactcagttattcctacccccgacagtgatgtgtttaccttcagtgtctccttggaggtaaaagaagacgatggaaaaggaaactttagattattggtaattcctattccttttgaatatttcagccctgtgcctaaggatagagataaattttatttcaaattaaagcaaggaatagagaagaaggttgtgattacagtgcagcaactttctaacaaagaattagctattgaaagatgttttggaatgttattaagcccaggtcgaaacgtgaagaacagtgacatgcatttactggatatggaatccatgggaaagagctatgatgggagagcttatgtcatcactggcatgtggaaccccaatgcaccagtatttctggcacttaacgaggaaaccccaaaagataagcaagtatacatgactgtggcagtggatatggtagtcacagaggtggtggagcctgttcgctttctcctggagacagtagtccgtgtgtaccctgcaaatgagcgattttggtatttcagcagaaagactttcacagagactttcttcatgagattgaaacagtctgagggaaaaggccataccaatgctggagatgcaatatatgaggtggtgagtctacagcgagagtctgacaaggaggaaccagtcactcctactagtggagggggtccaatgtcaccccaggatgatgaagcagaagaggagagtgataatgaactctcaagtggaacaggtgatgtgtctaaggattgtcctgagaagatcctgtattcttggggagagttgctaggaaaatggcacagtaaccttggtgcacgaccgaaagggctgtctactctggtgaagagtggtgtccctgaagcattgagggcagaggtatggcagttattggcaggctgccatgacaaccaggcaatgctggatagataccgaattcttatcacaaaggactcagcccaggagagtgttattactcgagatattcatcgtacatttcccgcacatgattactttaaagatactggaggagatggtcaagaatcgctctataagatctgcaaggcctactctgtgtatgatgaagacattgggtactgtcaagggcagtcttttcttgctgctgtattactgctgcatatgccagaggaacaagcattctgtgttttggtgaaaatcatgtacgactatggtttgagagacctctacagaaacaacttcgaagatcttcattgcaaattctaccagttggagagactaatgcaggaacagctaccggacctgcatagccatttttctgatctgaacctggaagctcatatgtatgcatcccagtggtttctcactctttttactgccaagttcccactctgcatggtgttccacatcattgacttactgctttgtgagggtttgaacataatctttcatgtagctttggctctcctaaagacctcaaaggaagaccttctgcaggctgattttgaaggtgctttaaagttctttagagttcagcttccaaagagatacagggcagaggaaaatgcaagaagactgatggagcaggcttgcaatattaaagtaccaaccaagaagctgaagaaatatgagaaagaatatcagacaatgcgagagagtcagctgcaacaggaagacccaatggatagatacaagtttttttttctt

SEQ ID NO: 182655 - DNA, 1749 bp, Artificial Sequence
  derived and/or modified sequence
atggaggtgcgcgcgtcccttcagaaggtgtcagggtcatccgactcagttgctactatgaactctgaagaattcgttctggtgcctcaatacgcagacgataacagcacaaaacacgaagaaaaaccacagctgaaaatcgtgtccaatggagacgaacaactggaaaaggctatggaggagatactccgagacagcgaaaagcgccctagctctctcctcgtcgactgccaaagctcatcagaaatatctgatcactctttcggagacatccccgcttctcagactaacaagccctcacttcagcttatcctggaccccagtaacacagagatcagcactcccaggccttcaagtccagggggcctgcccgaagaggacagtgtgttgtttaataagttgacttacctgggatgcatgaaagtgagttccccacgcaacgaagtggaggccttgagggcaatggccaccatgaagtcctcctcgcaatacccatttccagttacattatacgtacctaatgtgccagaaggctccgtcaggatcatagatcagtcgtctaatgtagaaatcgcaagtttccccatctacaaggtgcttttctgcgcacgcggccacgacggcactactgagagtaactgtttcgcttttactgagtcgtcccatggtagcgaagagtttcaaatccatgtgttctcctgcgaaatcaaagaggctgtgtcaaggatcctatactcgttctgtacagcctttaagagatcaagtcgtcaggtctcagacgtgaaagactccgtgattccaactcctgactctgacgtcttcacattttccgtgagcttggaggtgaaggaagatgatggcaagggcaatttccgactgctcgtaattcctatacctttcgagtatttctcacccgtccctaaggaccgggacaaattctatttcaaactcaaacagggtatagagaaaaaagtggttatcaccgtgcagcagctgagtaacaaagaactggcaatcgaaagatgttttggcatgctcctgagccctgggcgcaatgtgaagaatagcgacatgcacctcctcgacatggaaagcatggggaagtcctatgacggcagagcttacgttatcaccggtatgtggaaccccaacgcaccggtttttctggcactcaacgaagagacacccaaggacaaacaggtttacatgactgtggccgtggatatggtcgtcaccgaagtggtggaaccagtgagatttttgcttgaaactgtggtgcgggtataccccgctaatgaaaggttctggtattttagccgaaagaccttcactgaaacattttttatgcggctgaaacagagcgagggtaagggccataccaacgccggcgatgcaatctatgaggtcgtgtctctgcagagagaaagtgacaaagaagagcctgtaacaccgacttccggcggcgggcctatgagcccccaagacgatgaagctgaggaggaatccgacaatgaactgtcttctgggacgggagacgtctccaaagactgtccagaaaagatcctctactcctggggcgagctccttgggaagtggcatagcaacctaggcgctagacctaaaggtcttagcacactggtgaagtccggtgtacccgaggcactccgcgcagaagtctggcaactgctggcgggttgtcatgataatcaggctatgctggacaggtaccggatcctcataactaaatag

SEQ ID NO: 182656 - DNA, 2448 bp, Artificial Sequence
  derived and/or modified sequence
atggaggtgcgggccagcctgcagaaggtgtctggcagcagtgacagcgtggccaccatgaacagcgaggagtttgtgctggtgccccagtatgcagatgacaacagcaccaagcatgaggagaagccccagctgaagatcgtgtccaatggagatgagcagctggagaaggccatggaggagatcctgcgggacagcgagaagaggcccagcagcctgctggtggactgccagagcagcagcgagatcagtgaccacagctttggagacatcccagccagccagaccaacaagcccagcctgcagctgatcctggaccccagcaacacagagatcagcaccccccggcccagcagccctgggggcctgcctgaggaggacagcgtgctcttcaacaagctgacctacctgggctgcatgaaggtgagcagccccagaaatgaggtggaggccctgcgggccatggccaccatgaagagcagcagccagtaccccttccctgtgaccctgtatgtgcccaacgtgcctgagggctctgtgcgcatcatcgaccagagcagcaatgtggagatcgccagcttccccatctacaaggtgctcttctgtgcccggggccatgatggcaccacagagagcaactgctttgccttcacagagagcagccacggcagcgaggagttccagatccacgtgttcagctgtgagatcaaggaggccgtgagccgcatcctgtacagcttctgcacagccttcaagaggagcagccggcaggtgtctgatgtgaaggacagcgtcatccccaccccagacagtgatgtgttcaccttctctgtgtccctggaggtgaaggaggatgatggcaagggcaacttcagccctgtgcccaaggaccgggacaagttctacttcaagctgaagcagggcatcgagaagaaggtggtgatcaccgtgcagcagctgagcaacaaggagctggccatcgagcgctgcttcggcatgctgctgagccctggaagaaatgtgaagaacagcgacatgcacctgctggacatggagagcatgggcaagagctatgatggccgggcctacgtgatcaccggcatgtggaaccccaatgcccctgtgttcctggccctgaatgaggagacccccaaggacaagcaggtgtacatgacagtggccgtggacatggtggtgacagaggtggtggagcctgtgcgcttcctgctggagaccgtggtgcgggtgtacccagccaatgaacgcttctggtacttcagcaggaagaccttcacagagaccttcttcatgaggctgaagcagagcgagggcaagggccacaccaatgctggagatgccatctatgaggtggtgtccctgcagcgggagagtgacaaggaggagcctgtgacccccaccagcggcggcggccccatgagcccccaggatgatgaggccgaggaggagagtgacaatgagctgagcagcggcactggagatgtgtccaaggactgcccagagaagatcctgtacagctggggcgagctgctgggcaagtggcacagcaacctgggcgcccggcccaagggcctgagcaccctggtgaagtctggagtgcctgaggccctgcgggcagaggtgtggcagctgctggccggctgccacgacaaccaggccatgctggaccgctaccgcatcctgatcaccaaggacagcgcccaggagagcgtcatcacccgggacatccacaggaccttccctgcccatgactacttcaaggacacaggaggagatggccaggagagcctgtacaagatctgcaaggcctacagcgtgtatgatgaagatattggctactgccagggccagagcttcctggccgctgtgctgctgctgcacatgcctgaggagcaggccttctgtgtgctggtgaagatcatgtatgactatggcctgcgggacctgtacagaaacaactttgaggacctgcactgcaagttctaccagctggagcggctgatgcaggagcagctgcctgacctgcacagccacttcagtgacctgaacctggaggcccacatgtatgccagccagtggttcctgaccctcttcaccgccaagttccccctgtgcatggtgttccacatcatcgacctgctgctgtgtgagggcctgaacatcatcttccacgtggccctggccctgctgaagaccagcaaagaagacctgctgcaggccgactttgagggcgccctgaagttcttccgggtgcagctgcccaagcgctacagagcagaagaaaatgcccggcggctgatggagcaggcctgcaacatcaaggtgcccaccaagaagctgaagaagtatgagaaggagtaccagaccatgagggagagccagctgcagcaggaggaccccatggaccgctacaagtttgtgtacctgtag

SEQ ID NO: 182657 - DNA, 759 bp, Artificial Sequence
  derived and/or modified sequence
atgggcaagagctatgatggccgggcctacgtgatcaccggcatgtggaaccccaatgcccctgtgttcctggccctgaatgaggagacccccaaggacaagcaggtgtacatgacagtggccgtggacatggtggtgacagaggtggtggagcctgtgcgcttcctgctggagaccgtggtgcgggtgtacccagccaatgaacgcttctggtacttcagcaggaagaccttcacagagaccttcttcatgaggctgaagcagagcgagggcaagggccacaccaatgctggagatgccatctatgaggtggtgtccctgcagcgggagagtgacaaggaggagcctgtgacccccaccagcggcggcggccccatgagcccccaggatgatgaagctgaggaggagagtgacaatgagctgagcagcggcactggagatgtgtccaaggactgcccagagaagatcctgtacagctggggcgagctgctgggcaagtggcacagcaacctgggcgcccggcccaagggcctgagcaccctggtgaagagcggcgtgcctgaggccctgcgggcagaggtgtggcagctgctggccggctgccacgacaaccaggccatgctggaccgctaccgcatcctgatcaccaaggtgtgctggagcctgctggaggtgcacagccggccctgcctgcccggctaccaccagtggaagctgcagaacagcaagtactgcaggatggccaacgtggccgcctag

SEQ ID NO: 182658 - DNA, 2484 bp, Artificial Sequence
  derived and/or modified sequence
atggaggtgcgggccagcctgcagaaggtgtctggcagcagtgacagcgtggccaccatgaacagcgaggagtttgtgctggtgccccagtatgcagatgacaacagcaccaagcatgaggagaagccccagctgaagatcgtgtccaatggagatgagcagctggagaaggccatggaggagatcctgcgggacagcgagaagaggcccagcagcctgctggtggactgccagagcagcagcgagatcagtgaccacagctttggagacatcccagccagccagaccaacaagcccagcctgcagctgatcctggaccccagcaacacagagatcagcaccccccggcccagcagccctgggggcctgcctgaggaggacagcgtgctcttcaacaagctgacctacctgggctgcatgaaggtgagcagccccagaaatgaggtggaggccctgcgggccatggccaccatgaagagcagcagccagtaccccttccctgtgaccctgtatgtgcccaacgtgcctgagggctctgtgcgcatcatcgaccagagcagcaatgtggagatcgccagcttccccatctacaaggtgctcttctgtgcccggggccatgatggcaccacagagagcaactgctttgccttcacagagagcagccacggcagcgaggagttccagatccacgtgttcagctgtgagatcaaggaggccgtgagccgcatcctgtacagcttctgcacagccttcaagaggagcagccggcaggtgtctgatgtgaaggacagcgtcatccccaccccagacagtgatgtgttcaccttctctgtgtccctggaggtgaaggaggatgatggcaagggcaacttccggctgctggtgatccccatcccctttgagtacttcagccctgtgcccaaggaccgggacaagttctacttcaagctgaagcagggcatcgagaagaaggtggtgatcaccgtgcagcagctgagcaacaaggagctggccatcgagcgctgcttcggcatgctgctgagccctggaagaaatgtgaagaacagcgacatgcacctgctggacatggagagcatgggcaagagctatgatggccgggcctacgtgatcaccggcatgtggaaccccaatgcccctgtgttcctggccctgaatgaggagacccccaaggacaagcaggtgtacatgacagtggccgtggacatggtggtgacagaggtggtggagcctgtgcgcttcctgctggagaccgtggtgcgggtgtacccagccaatgaacgcttctggtacttcagcaggaagaccttcacagagaccttcttcatgaggctgaagcagagcgagggcaagggccacaccaatgctggagatgccatctatgaggtggtgtccctgcagcgggagagtgacaaggaggagcctgtgacccccaccagcggcggcggccccatgagcccccaggatgatgaggccgaggaggagagtgacaatgagctgagcagcggcactggagatgtgtccaaggactgcccagagaagatcctgtacagctggggcgagctgctgggcaagtggcacagcaacctgggcgcccggcccaagggcctgagcaccctggtgaagtctggagtgcctgaggccctgcgggcagaggtgtggcagctgctggccggctgccacgacaaccaggccatgctggaccgctaccgcatcctgatcaccaaggacagcgcccaggagagcgtcatcacccgggacatccacaggaccttccctgcccatgactacttcaaggacacaggaggagatggccaggagagcctgtacaagatctgcaaggcctacagcgtgtatgatgaagatattggctactgccagggccagagcttcctggccgctgtgctgctgctgcacatgcctgaggagcaggccttctgtgtgctggtgaagatcatgtatgactatggcctgcgggacctgtacagaaacaactttgaggacctgcactgcaagttctaccagctggagcggctgatgcaggagcagctgcctgacctgcacagccacttcagtgacctgaacctggaggcccacatgtatgccagccagtggttcctgaccctcttcaccgccaagttccccctgtgcatggtgttccacatcatcgacctgctgctgtgtgagggcctgaacatcatcttccacgtggccctggccctgctgaagaccagcaaagaagacctgctgcaggccgactttgagggcgccctgaagttcttccgggtgcagctgcccaagcgctacagagcagaagaaaatgcccggcggctgatggagcaggcctgcaacatcaaggtgcccaccaagaagctgaagaagtatgagaaggagtaccagaccatgagggagagccagctgcagcaggaggaccccatggaccgctacaagttcttcttcctgtag

SEQ ID NO: 182659 - DNA, 1749 bp, Artificial Sequence
  derived and/or modified sequence
atggaggtgcgggccagcctgcagaaggtgtctggcagcagtgacagcgtggccaccatgaacagcgaggagtttgtgctggtgccccagtatgcagatgacaacagcaccaagcatgaggagaagccccagctgaagatcgtgtccaatggagatgagcagctggagaaggccatggaggagatcctgcgggacagcgagaagaggcccagcagcctgctggtggactgccagagcagcagcgagatcagtgaccacagctttggagacatcccagccagccagaccaacaagcccagcctgcagctgatcctggaccccagcaacacagagatcagcaccccccggcccagcagccctgggggcctgcctgaggaggacagcgtgctcttcaacaagctgacctacctgggctgcatgaaggtgagcagccccagaaatgaggtggaggccctgcgggccatggccaccatgaagagcagcagccagtaccccttccctgtgaccctgtatgtgcccaacgtgcctgagggctctgtgcgcatcatcgaccagagcagcaatgtggagatcgccagcttccccatctacaaggtgctcttctgtgcccggggccatgatggcaccacagagagcaactgctttgccttcacagagagcagccacggcagcgaggagttccagatccacgtgttcagctgtgagatcaaggaggccgtgagccgcatcctgtacagcttctgcacagccttcaagaggagcagccggcaggtgtctgatgtgaaggacagcgtcatccccaccccagacagtgatgtgttcaccttctctgtgtccctggaggtgaaggaggatgatggcaagggcaacttccggctgctggtgatccccatcccctttgagtacttcagccctgtgcccaaggaccgggacaagttctacttcaagctgaagcagggcatcgagaagaaggtggtgatcaccgtgcagcagctgagcaacaaggagctggccatcgagcgctgcttcggcatgctgctgagccctggaagaaatgtgaagaacagcgacatgcacctgctggacatggagagcatgggcaagagctatgatggccgggcctacgtgatcaccggcatgtggaaccccaatgcccctgtgttcctggccctgaatgaggagacccccaaggacaagcaggtgtacatgacagtggccgtggacatggtggtgacagaggtggtggagcctgtgcgcttcctgctggagaccgtggtgcgggtgtacccagccaatgaacgcttctggtacttcagcaggaagaccttcacagagaccttcttcatgaggctgaagcagagcgagggcaagggccacaccaatgctggagatgccatctatgaggtggtgtccctgcagcgggagagtgacaaggaggagcctgtgacccccaccagcggcggcggccccatgagcccccaggatgatgaggccgaggaggagagtgacaatgagctgagcagcggcactggagatgtgtccaaggactgcccagagaagatcctgtacagctggggcgagctgctgggcaagtggcacagcaacctgggcgcccggcccaagggcctgagcaccctggtgaagtctggagtgcctgaggccctgcgggcagaggtgtggcagctgctggccggctgccacgacaaccaggccatgctggaccgctaccgcatcctgatcaccaagtag

SEQ ID NO: 182660 - DNA, 2448 bp, Artificial Sequence
  derived and/or modified sequence
atggaggtgcgggccagcctgcagaaggtgagcggcagcagcgacagcgtcgccacaatgaattcagaggagttcgtcctcgtgccgcagtacgccgatgacaacagtaccaaacacgaagagaagcctcagctgaagattgtaagtaatggtgatgagcagctggaaaaagctatggaagagatcctgagagattcagagaaacgaccatcttccctgctggttgattgtcagagttcatctgagatatctgaccactcctttggggacatacccgcaagccagacaaacaagcccagcctccagctgatcctggaccccagcaatacagagatcagcacaccccgaccaagcagtcccggaggtctgccagaggaggattctgtactattcaacaagctgacgtatcttggctgcatgaaagtcagctccccaagaaatgaagtggaggccttgagagccatggccactatgaagagctcatcccagtaccccttccccgttacactctatgtcccgaacgtccctgaaggttcagtgaggatcatcgaccagtcctccaatgttgaaatcgcctcttttcctatatataaggttctgttttgtgccaggggtcacgatggaaccactgagagtaactgctttgcgtttacagaatcctcccatggatcagaggaattccagattcacgtttttagttgtgagatcaaagaggctgtgtccaggatcctttactccttttgtacagcttttaagaggagctctagacaagtcagcgatgtgaaggactccgtcatacctacacccgactctgacgtgtttacgttctccgtttctctggaggtgaaggaggacgacggcaaggggaacttcagccccgttccgaaggacagagacaaattctacttcaaacttaagcagggtattgaaaagaaggtcgtgatcactgtccaacaactgtcaaacaaagaactagccatagagaggtgtttcgggatgcttctcagccccgggaggaatgtaaaaaattctgacatgcacttgctggacatggaaagcatgggaaaatcctacgacggacgagcgtacgtaatcacgggcatgtggaaccccaatgcaccagtgtttcttgccctcaatgaggagacccctaaagataagcaagtatacatgactgttgcagtcgacatggtcgtgacagaagtggtggagcctgtccgatttctgctcgaaactgtagtcagagtctatccagccaatgagcgattctggtatttctctcgcaaaacattcacagaaacattcttcatgaggctgaagcagagcgagggcaagggacatacaaacgccggcgatgccatctacgaggttgtgtccctccagcgggagtccgacaaagaggagcccgttacacctacctccggcgggggtccaatgtccccgcaggacgatgaggctgaggaagaaagcgacaacgagctcagttctggcacgggggatgtctctaaggattgtcccgagaagatactgtatagctggggtgaacttctaggcaagtggcactccaatctgggtgcccggcctaaagggctgtcgaccttggtgaaatccggcgtgccagaggcattgagggccgaagtctggcagttactcgccggctgccacgacaatcaggccatgttggataggtaccgcatcctaatcacaaaggactcagcccaagagtccgtaatcacgcgagacatccacagaacctttccagcacacgattatttcaaggatactgggggagatgggcaggagagcctgtataagatctgtaaggcgtacagcgtgtatgatgaagatatcggttactgccagggccaatcgttcctcgctgctgtgctgctgctccacatgcccgaggaacaggccttttgtgttctggtgaaaattatgtatgactacgggcttcgcgacctgtacaggaataactttgaggatctgcactgcaagttttatcagctggagcggctgatgcaagaacaactcccagatctgcactcccatttctcagacctgaacttggaggctcacatgtatgcaagtcaatggtttttgaccctgttcacggcaaagtttccactgtgcatggtgttccacattatcgatctactgctgtgcgaaggtctgaacattatttttcacgtagcattggcgttgctgaaaacatccaaagaggatctgctgcaggccgatttcgaaggagccctgaagttctttcgtgtacagcttcctaagcggtaccgggcagaagagaatgccaggcggctaatggaacaagcctgtaacataaaggtgcctacaaagaagctcaaaaagtatgagaaggagtatcaaacaatgcgcgagagccagctgcagcaagaagacccaatggaccgctataagtttgtgtatttatag

SEQ ID NO: 182661 - DNA, 759 bp, Artificial Sequence
  derived and/or modified sequence
atgggcaagagctacgacggccgggcctacgtgatcaccggcatgtggaatccaaatgccccagtgtttttggccttaaacgaggagacccccaaagataaacaagtgtatatgacggttgccgtggacatggtcgtcacggaggtagttgagccagtgcggtttctgcttgagacggtagtacgggtttaccccgccaatgaaaggttctggtatttctctcgcaagactttcacagagacgttctttatgcgccttaaacagtctgaaggaaagggccacacaaatgccggggacgcaatttacgaggtcgtcagtttgcagagggagagcgacaaagaggaacctgtcacccccacctccgggggtggcccaatgtcgccgcaggacgacgaagcagaagaagagtcagataatgagctgtcaagtggcacaggcgacgtgagtaaagactgcccagagaagattctgtacagctggggggaactcctcggcaaatggcactcaaatttaggggctagacctaagggtctttctactcttgtgaagtcaggagtccctgaggcgctcagggcggaggtgtggcagctattagcgggctgtcatgacaaccaggccatgttggacagatatcgcatcctgatcactaaggtgtgttggagcctgcttgaggttcacagtcgcccctgcctccctgggtaccaccagtggaagctgcagaatagcaagtattgcagaatggctaacgtcgcagcatag

SEQ ID NO: 182662 - DNA, 2484 bp, Artificial Sequence
  derived and/or modified sequence
atggaggtgcgggccagcctgcagaaggtgagcggcagcagcgactctgtcgccactatgaattccgaggagttcgtcctcgttccccagtacgctgatgacaacagcactaagcatgaagagaagccgcaactgaaaatcgtgtccaacggcgatgagcagttggaaaaggccatggaggagattctgcgtgattccgaaaagagaccctcatcacttctggtggactgtcagtcttctagcgagatatctgatcacagctttggtgacattcccgcaagccaaacaaataaaccctcgttacaactaattttagatcctagtaacaccgaaatttcaaccccccggccatcaagtcctggagggttgccagaagaggacagtgtgcttttcaataagttgacctacctcggatgtatgaaggtctcttccccccggaacgaggttgaagccctgcgggctatggccacaatgaagtccagtagccagtatccattcccagtcacactctatgtccccaatgtccccgaggggtctgttcgcatcatagatcagtctagtaatgtggagatcgcctcatttcctatctacaaagtgctgttttgtgcgagggggcatgatggcacgactgagagcaattgcttcgcattcacagagagttcccacggcagtgaggaattccagatccacgtgtttagctgcgaaataaaggaagcagtgtcgaggatcctgtatagcttttgcacggccttcaagcggtcttcccgtcaagtctccgacgtgaaagattcggttattcctaccccagacagtgacgtatttacgttcagtgtaagcctagaagtgaaagaagacgacggcaagggcaatttccgtctgcttgtgatcccaattcccttcgagtacttctcccccgtccctaaagaccgggacaagttttacttcaaactcaaacagggcattgagaagaaggtggtgataactgtgcagcagctctccaacaaagagcttgcaattgagagatgtttcggcatgctccttagtccgggccggaacgtgaaaaactctgacatgcacttactggatatggaatctatgggcaagagctacgatgggagggcttacgtgataaccggaatgtggaaccccaatgcccccgtgttcctggcactcaatgaagaaacacctaaggacaaacaggtgtacatgaccgtggcggtggatatggtggttacagaggttgttgaacctgtgcgcttcctgcttgagacagtcgtgcgcgtgtaccctgcaaacgaacgtttttggtattttagcaggaaaaccttcacagagaccttcttcatgagactgaagcagtctgaggggaaaggacataccaatgccggcgatgccatttatgaggtggtgtcactccagagggagtcggacaaggaagagccggtgactcctacatcaggcggaggaccaatgtccccccaggatgatgaagccgaggaagagagtgacaacgaactgtcttctggaacaggcgatgttagcaaagactgtcccgagaaaatcctttacagctggggcgaactgttaggcaaatggcattctaatctgggcgcacgcccaaagggcctgagtaccctcgtgaaatctggcgtgcccgaggccctgagagccgaagtttggcagctattggctggctgccatgataaccaggctatgttagataggtaccggatcttgataactaaagatagcgctcaggagtcagttattacaagggacatccaccggaccttccctgcccatgactatttcaaggataccgggggcgacggtcaggagagcctatacaagatctgtaaggcctattccgtttatgatgaggatattggatactgccagggacagtcttttctggctgcagtgcttctactccatatgcccgaggagcaggcattttgcgtcctggtgaagattatgtacgactacggtctgagggacctttatcgcaataatttcgaagacctgcactgcaagttttaccagctggagagactgatgcaggaacagctccctgacctgcacagtcacttctccgacttgaacttggaagcacacatgtatgcaagtcagtggttcctaactttgtttaccgctaaatttccactgtgcatggttttccatatcatcgatctcctactgtgtgaagggttgaacattatttttcatgtcgccttagcactgctgaagacatctaaggaggacttactgcaagcggactttgagggcgccttaaagttctttcgggtccagctacccaaaagataccgagcagaggaaaatgctagacgcctcatggagcaggcctgtaatatcaaggtgcctaccaagaaactgaagaagtatgagaaggagtaccagacgatgcgggagtctcagttacagcaggaagaccctatggacagatacaagttctttttcctgtag

SEQ ID NO: 182663 - DNA, 1749 bp, Artificial Sequence
  derived and/or modified sequence
atggaggtgcgggccagcctgcagaaggtgagcggcagcagcgactcagtggcaactatgaactccgaagagttcgtcctggtgcctcagtacgcggatgacaactctactaaacacgaggaaaagccccagctgaagattgtgtcgaacggagacgaacagttagaaaaggccatggaagagattttgcgggactcagagaaacggccatcatctctgctcgtggactgccagagttctagtgagattagtgaccattcgttcggtgacatcccagcatcccaaaccaataagccgtctttgcaattaatactagaccccagtaataccgagatttcaacaccaaggcccagtagtcctggcggtctgcccgaagaagatagcgtgctgtttaataaattaacatacctgggatgtatgaaggtgagcagtcctaggaacgaagtggaggctttacgggccatggctacaatgaaatcgtcatcccagtatcccttccccgtgacgctctacgtgcctaacgtgccagaaggatctgtcaggatcatagatcagtccagtaatgtcgagatagcctcatttccgatctacaaagtgttgttttgcgcacgcggacacgacggaactaccgagtcaaactgttttgcattcacagagagttcacacgggtcagaggagttccaaattcatgttttttcctgcgaaattaaagaggcagtgtctaggattctgtactctttctgcactgccttcaagcggtccagcagacaggtctcagatgttaaagatagcgtgatcccgactccagactcagatgtcttcacattctcagtgagcctggaggtgaaggaggacgatgggaagggcaacttccgactgctggttataccaatcccttttgagtacttctcccctgttcccaaagacagagacaaattctatttcaagctgaaacagggcattgagaagaaagtcgtgatcaccgtccagcagctgtccaataaggaactggccattgaaagatgcttcggcatgctgctgtcgcccggaagaaatgtgaaaaactctgacatgcacctcctggatatggagtcaatgggtaaatcctacgatgggagagcgtacgtcatcaccgggatgtggaatccaaacgcccccgtgtttcttgcgctcaatgaagagactccgaaagataagcaggtatatatgactgtggccgtggacatggtcgtgaccgaggtggttgaaccggtcagatttctgcttgagacagtggtcagggtctatcctgccaacgaaagattctggtacttttccaggaaaaccttcacggagacattcttcatgagactgaagcagtccgaagggaaaggacacactaacgccggagatgccatatacgaagtggtgagtctgcaacgggagtccgacaaggaagaaccagtgactccaacatcaggtgggggaccaatgagcccacaggacgatgaggcagaggaggagagcgacaatgaactttctagtggaacaggagacgtgtccaaggactgtcccgagaagattctgtacagttggggggaactcctggggaaatggcatagtaatctgggcgcccgccccaagggactgtctaccctggtgaaatccggcgtgcccgaggcccttcgcgccgaggtctggcaacttctggctggttgtcacgacaatcaagcaatgctggatcgttatcgtatcctcattactaaatag

SEQ ID NO: 182664 - DNA, 2448 bp, Artificial Sequence
  derived and/or modified sequence
atggaggtgcgagcttccttacagaaagtttcaggttcttccgatagtgttgctactatgaactcagaagaattcgtgctggtgccgcagtacgccgatgataatagtaccaagcacgaagagaagcctcaacttaaaatcgtgagcaatggcgacgagcagttggaaaaggccatggaggagatcctgcgcgatagcgaaaagcgcccttcttcactgttagtcgactgtcaatcatcctccgagatctctgaccatagttttggcgacattcccgcttcccaaaccaataaaccctcattgcaactcatcctggacccctctaatactgagatctctacccctagaccaagtagtccgggtgggttaccagaagaggatagtgtcctgtttaataagctgacctatcttggctgtatgaaggttagcagccctagaaacgaagtcgaggctctgagagctatggccacgatgaagtcatcctcacaataccccttcccagtgacactctatgtgcccaacgtgcctgagggcagcgtgcgaatcattgatcagtcttctaatgtggagattgctagcttccctatctataaggtgctgttttgcgcccgaggtcacgacggaaccacagagtccaactgttttgcttttacagaatcctctcacggctctgaagagttccagatccatgtatttagctgcgaaattaaggaggcagtaagtaggatcttgtactcattctgcacagctttcaagcgaagtagcagacaagtcagcgatgtaaaggacagcgtcatcccgacaccagattctgatgtttttacattttctgttagcctggaagtgaaagaagatgacggtaaagggaattttagtccagttccaaaggaccgcgacaaattttacttcaaactgaagcagggcattgagaaaaaagtggtaattaccgtgcagcagctctctaataaagaactcgctattgagagatgcttcgggatgctcctaagccccggtcggaacgtaaagaattcagacatgcacctactggacatggaatcaatgggaaagagctatgatgggagagcctacgtgataacgggcatgtggaaccccaacgctccagtttttttggccctgaacgaagaaacgcccaaggacaagcaggtctatatgaccgtagcagtggatatggtggtgaccgaggtggtggagccggtcaggttcttgcttgagactgtggttcgggtgtacccggcaaacgagcgtttctggtacttctctagaaagacatttacagagacatttttcatgcgtctcaagcagagtgaaggtaaaggccacacaaatgccggtgacgctatttacgaggtggtgagcctccaacgtgagagtgataaagaggagccagtcacccctactagcggaggcggacccatgtcaccccaggacgacgaggcagaagaagagtcagacaacgaactttcttcaggcacgggggacgtgagtaaagattgtccagaaaaaattctctactcatggggagagctgttaggtaagtggcattccaacctgggagccaggcccaaagggttatcgaccctcgtaaagagtggcgtgcccgaggccctgagggcggaggtctggcaattgctcgccggatgccatgataaccaggcaatgctggatcggtatcggatcctgataaccaaggacagcgcgcaggaatccgtgattactcgagatatccacagaacatttcccgctcacgattatttcaaagacaccggcggtgacggacaggagagcttgtataaaatctgtaaggcgtactccgtgtacgacgaggacattggttactgtcagggccagagctttcttgcagcagtcctgctgttgcacatgccagaagagcaggctttttgcgtgcttgtaaaaatcatgtacgactatggacttcgtgatctgtacaggaataacttcgaggacctgcattgcaagttctaccaactcgaaaggctcatgcaggaacagttgcccgacctccatagccatttttcggacttgaacctagaggcccatatgtacgcttcacagtggttcctgaccttgttcactgctaagttccccctgtgtatggtgttccacattatcgacctcctgctgtgtgagggtctcaatatcattttccacgtggccctggcattgctcaagacaagtaaagaagatctcttgcaggctgattttgagggtgctttgaagttctttagggtgcaactgccgaaacgttaccgggcagaggaaaatgcccgtcggctgatggagcaagcgtgcaatatcaaggtgcccaccaagaagcttaagaaatacgagaaggagtatcagactatgcgcgagtctcagctgcagcaagaggatcctatggaccgatacaaattcgtctacctttag

SEQ ID NO: 182665 - DNA, 759 bp, Artificial Sequence
  derived and/or modified sequence
atgggcaagtcttatgatggtcgggcatatgtgatcactgggatgtggaatccaaacgctcctgtgttcttggctttgaacgaggagactcccaaggataaacaggtatatatgacagtagcggtggatatggtggtcaccgaggtagtggaacctgttcgctttctcttggaaaccgttgtgcgcgtgtatcccgcaaatgagcgcttctggtatttcagcaggaagacattcactgagaccttctttatgcgcctcaaacagtcagagggaaagggtcacacgaatgctggcgatgctatctacgaggtagtcagcttacagagagaatccgataaggaagagccagttacgccgaccagtggcggagggcctatgtctcctcaggatgacgaggctgaagaggaatctgataacgagctgtcaagcggaactggagatgtgtccaaagactgtcccgaaaaaatcctgtatagctggggagagttgctgggaaaatggcacagtaacctaggcgctcgccctaaaggactctcaactctcgtgaaatcaggcgtacctgaggcactcagggcagaagtttggcaactgctcgccggatgtcacgacaaccaggccatgctggatcggtaccgtatacttattacaaaggtttgttggtccttactggaggtgcacagtcgaccatgtctgcccggatatcaccaatggaagctgcagaattcaaaatattgtaggatggccaatgttgctgcctag

SEQ ID NO: 182666 - DNA, 2484 bp, Artificial Sequence
  derived and/or modified sequence
atggaagttcgtgcatctctccaaaaagtgagtgggtcgagcgattcggttgcaaccatgaattcagaagaatttgtgctcgtcccccagtatgccgatgataattcaaccaagcacgaggagaaaccccagctgaaaatcgtcagcaacggtgatgagcagctcgaaaaggccatggaagaaatcctccgggactctgagaagcggccatcctccctgttggtcgattgtcaatcttcaagtgagataagcgaccattcatttggcgacattcctgctagccaaacaaacaagccgtcacttcaactaatccttgatccgagcaatacagagatctcaacccctcgcccttcatcccctgggggactcccagaggaggattctgtgctctttaacaagttgacttacttgggctgtatgaaggttagctctccaagaaacgaagtggaggccttgagggccatggcaaccatgaaatcctcctcacagtacccattcccggtgactctgtatgtgcccaacgtgccagaaggctcagtgcgtattatcgatcagtccagtaatgtggagatcgcttccttccctatttacaaagtcttattctgcgcccgaggccatgacgggacaacggaatctaactgcttcgccttcacagagtcatcccatggatcagaagagttccagatccacgtgttttcctgcgaaatcaaagaggccgtctcgcgaattctctattctttctgcactgcctttaagaggagttcaaggcaggtgtccgacgtgaaggattccgtgatcccaactcccgatagtgatgtgttcactttttctgtgtccctggaagtcaaagaggatgacggaaaggggaacttccggttgttagtgatacctatcccatttgaatatttctcccctgtgcccaaggaccgagacaagttctacttcaaactgaaacagggaatcgaaaagaaggtggtgattacagtgcagcaactatccaacaaagaacttgccatcgaacgctgttttgggatgctcctgagtccaggtagaaatgtcaaaaattctgatatgcatcttttggatatggaaagcatgggcaagtcgtatgacggcagagcctacgtgattacgggaatgtggaaccccaatgcaccggtgtttttagcgttgaacgaggagacccctaaggacaaacaagtgtacatgactgtggcagtagacatggtggtgaccgaagtagtggagcctgtaagattcctcctggagactgtggttcgggtatatcctgcaaacgagcgcttctggtacttctctagaaaaacctttacagaaacattctttatgagacttaagcaatccgagggtaaaggtcacaccaacgccggtgatgccatatatgaagtcgtaagcctacagagggagagcgataaggaagaaccagtgactcccaccagcggcggagggcctatgtcaccccaggatgacgaggccgaagaagaaagcgataatgaactgagtagcggaacgggcgatgtgagtaaagattgccccgagaagattctctattcttggggagagctgcttgggaagtggcactccaacctgggcgcacggccaaaaggcttgagtacactggtgaaaagtggggtgcccgaggctctgagggcagaagtgtggcagctcctggcgggatgtcatgacaaccaagctatgctagaccgctatcgtattctcattactaaagattccgcccaggaaagtgtgatcacccgagatatccatcgaacattcccagcccatgactactttaaggacactgggggagatggacaggagagtctgtacaagatttgtaaagcgtatagtgtttacgatgaagacatcggctactgccagggccagtccttcctggctgctgtgctgctcttacacatgcccgaagagcaggccttttgtgttctcgtgaagattatgtacgattacggcttgcgcgatctgtaccggaacaacttcgaggacctacactgcaaattctatcagctcgagagactgatgcaggagcagctccccgacttacacagtcactttagcgatttaaatctcgaggcccatatgtacgcttcccagtggtttctcaccctcttcacagctaaatttccgctgtgcatggtgtttcacatcatagacctcctgctctgcgaaggcttaaacattatctttcacgtcgccctggcgttactgaagacgtctaaggaagatctgttacaggccgatttcgagggcgcattgaagttctttcgggtgcagcttcccaaaaggtaccgggcagaagaaaatgccaggaggctcatggagcaggcctgcaacatcaaggtgcccactaagaaactcaagaagtatgagaaggagtaccagaccatgcgagagtcacagctgcagcaggaagatccaatggaccggtataaattcttctttctatag

SEQ ID NO: 182667 - DNA, 2899 bp, Artificial Sequence
  derived and/or modified sequence
ctcagttccctccgccctcctcgggctccagcggtggcggagcgaacgggaccggcccggcttcagagcgcgaggtggagggtggaacgcgggcgcctgaaggagttgttgtctcggcagcgcccgcggagacgtgaagaggtggttgtgggaagagaagtttgcagaactgaaatggaggtcagagcttcattacagaaggttagtggatcatctgattctgtggctacaatgaacagtgaagaatttgttttggttcctcagtatgcagatgataattctacaaaacatgaagaaaaacctcaactgaagatagtttctaatggtgatgaacaattggaaaaagccatggaagagattttgagagattccgagaaaaggccaagcagtcttcttgttgattgtcaaagttccagtgagatttcagaccattcgtttggagatattccagccagccaaacaaataagccatctcttcagttaattttggatccgtctaacacagaaatttctacacccagaccatcttctccaggtggactacctgaagaagatagtgttttatttaataaactgacctacttaggatgtatgaaggtttcttccccacgtaatgaagtagaggctttacgggcaatggcaaccatgaaatcttccagtcaatacccctttcctgttaccctgtatgtaccaaatgttccagaaggttctgtgagaattatagaccaatccagcaatgtggagatagcatcttttccaatctataaggtgttattctgtgcacgtggacatgacggaacaacagagagcaattgctttgcatttacagagagttcccatggttcggaagaatttcagatacatgttttctcctgtgaaattaaagaggcagtaagcagaattttgtacagtttctgtacagcattcaaacgttcttccagacaagtgtctgatgttaaagactcagttattcctacccccgacagtgatgtgtttaccttcagtgtctccttggaggtaaaagaagacgatggaaaaggaaactttagccctgtgcctaaggatagagataaattttatttcaaattaaagcaaggaatagagaagaaggttgtgattacagtgcagcaactttctaacaaagaattagctattgaaagatgttttggaatgttattaagcccaggtcgaaacgtgaagaacagtgacatgcatttactggatatggaatccatgggaaagagctatgatgggagagcttatgtcatcactggcatgtggaaccccaatgcaccagtatttctggcacttaacgaggaaaccccaaaagataagcaagtatacatgactgtggcagtggatatggtagtcacagaggtggtggagcctgttcgctttctcctggagacagtagtccgtgtgtaccctgcaaatgagcgattttggtatttcagcagaaagactttcacagagactttcttcatgagattgaaacagtctgagggaaaaggccataccaatgctggagatgcaatatatgaggtggtgagtctacagcgagagtctgacaaggaggaaccagtcactcctactagtggagggggtccaatgtcaccccaggatgatgaagcagaagaggagagtgataatgaactctcaagtggaacaggtgatgtgtctaaggattgtcctgagaagatcctgtattcttggggagagttgctaggaaaatggcacagtaaccttggtgcacgaccgaaagggctgtctactctggtgaagagtggtgtccctgaagcattgagggcagaggtatggcagttattggcaggctgccatgacaaccaggcaatgctggatagataccgaattcttatcacaaaggactcagcccaggagagtgttattactcgagatattcatcgtacatttcccgcacatgattactttaaagatactggaggagatggtcaagaatcgctctataagatctgcaaggcctactctgtgtatgatgaagacattgggtactgtcaagggcagtcttttcttgctgctgtattactgctgcatatgccagaggaacaagcattctgtgttttggtgaaaatcatgtacgactatggtttgagagacctctacagaaacaacttcgaagatcttcattgcaaattctaccagttggagagactaatgcaggaacagctaccggacctgcatagccatttttctgatctgaacctggaagctcatatgtatgcatcccagtggtttctcactctttttactgccaagttcccactctgcatggtgttccacatcattgacttactgctttgtgagggtttgaacataatctttcatgtagctttggctctcctaaagacctcaaaggaagaccttctgcaggctgattttgaaggtgctttaaagttctttagagttcagcttccaaagagatacagggcagaggaaaatgcaagaagactgatggagcaggcttgcaatattaaagtaccaaccaagaagctgaagaaatatgagaaagaatatcagacaatgcgagagagtcagctgcaacaggaagacccaatggatagatacaagtttgtatatttgtaggtaactccagctgttgcatttatactgggaatcttcataagaagctgagagaaagagaggggaaaaagaaagtggctttctactttcaaaaatgaaacaaaaaggaaaaatggcaaagtactgttttagctgtgcatgtcatatccacaaagacttttagcaggtgaactgttccaagactgacacaaggatgtttcaaacttgcctctgtctgtagaaaatgttaaaaataccaactcacttggaaggaaaaataaaaatcacaaaggtatattga

SEQ ID NO: 182668 - DNA, 1749 bp, Artificial Sequence
  derived and/or modified sequence
atggaggtgcgggctagtctgcagaaggtgtccggaagcagcgactcagtggcaaccatgaactctgaggagttcgttcttgtccctcagtatgcggacgacaacagcaccaagcacgaggaaaaaccacaacttaaaatagtgtccaatggagatgagcagctcgaaaaagcaatggaggagatcttgcgggactccgagaagagaccttctagtctcctggtggattgtcaatctagcagcgaaataagcgaccattcctttggggacatccccgcatcccagaccaataagccctccctccagttaatactggacccatccaatactgaaatcagtactccacgcccaagcagccccggaggtcttcctgaggaagatagcgtgctgttcaataagctgacttacttaggatgtatgaaagtgtccagcccaaggaatgaggtcgaggccctccgcgcaatggccactatgaagtccagtagccagtaccccttccctgttacgctgtacgtgcctaatgtccctgaggggagcgtgaggattatcgatcagagctccaacgtggagatcgcctcattccctatttacaaggtgcttttttgcgcaagaggccacgacggtacgacagaatcaaactgctttgcctttacagagtcgagccatggttccgaggaattccagatacacgtattcagttgcgagattaaagaagccgtctcacgcatactgtattcattctgtacggcttttaagcggtcctctagacaggtctctgacgtgaaagattcagttataccaacgcccgattccgatgtgtttaccttttctgtcagcttagaagtgaaagaagacgatggaaaagggaacttcagacttctggtcattcctataccttttgagtatttcagcccagtgcccaaagacagagataaattctatttcaaactcaagcagggaatcgagaaaaaggtggtgatcactgtacagcaactatcaaataaagaactagccattgaaagatgctttggaatgctactttccccagggcgtaacgttaagaacagcgacatgcatctgttagatatggagtctatgggcaaaagctatgacgggcgagcttatgtcatcaccggtatgtggaacccaaacgcaccagtttttctggcattgaatgaagagacacctaaagacaaacaagtctacatgactgtagcagtggatatggtggttaccgaagtcgtcgaacccgtgaggtttctcctggaaaccgtggtgcgtgtgtaccctgccaatgagaggttctggtatttcagccgaaagacctttactgaaacttttttcatgagattgaagcagagcgaaggaaaaggacacactaatgcaggagatgctatttatgaagttgtaagcctgcagagggaatcagacaaggaggaacccgtgacacccactagtggagggggtcctatgagcccccaggacgacgaggctgaggaagaaagcgacaacgaattatcctccggcaccggtgacgtctctaaagattgtccggagaaaatactatattcctggggtgagctgctgggtaaatggcactctaatctgggagctcggcctaaaggcttgtcaacgctggtgaaaagcggggtccctgaggcattacgggctgaggtgtggcagcttttggccggttgtcatgataatcaggcgatgctcgatcgatataggatccttattaccaaatag

SEQ ID NO: 182669 - DNA, 1847 bp, Artificial Sequence
  derived and/or modified sequence
ggtggagggtggaacgcgggcgcctgaaggagttgttgtctcggcagcgcccgcggagacgtgaagaggtggttgtgggaagagaagtttgcagaactgaaatggaggtcagagcttcattacagaaggttagtggatcatctgattctgtggctacaatgaacagtgaagaatttgttttggttcctcagtatgcagatgataattctacaaaacatgaagaaaaacctcaactgaagatagtttctaatggtgatgaacaattggaaaaagccatggaagagattttgagagattccgagaaaaggccaagcagtcttcttgttgattgtcaaagttccagtgagatttcagaccattcgtttggagatattccagccagccaaacaaataagccatctcttcagttaattttggatccgtctaacacagaaatttctacacccagaccatcttctccaggtggactacctgaagaagatagtgttttatttaataaactgacctacttaggatgtatgaaggtttcttccccacgtaatgaagtagaggctttacgggcaatggcaaccatgaaatcttccagtcaatacccctttcctgttaccctgtatgtaccaaatgttccagaaggttctgtgagaattatagaccaatccagcaatgtggagatagcatcttttccaatctataaggtgttattctgtgcacgtggacatgacggaacaacagagagcaattgctttgcatttacagagagttcccatggttcggaagaatttcagatacatgttttctcctgtgaaattaaagaggcagtaagcagaattttgtacagtttctgtacagcattcaaacgttcttccagacaagtgtctgatgttaaagactcagttattcctacccccgacagtgatgtgtttaccttcagtgtctccttggaggtaaaagaagacgatggaaaaggaaactttagattattggtaattcctattccttttgaatatttcagccctgtgcctaaggatagagataaattttatttcaaattaaagcaaggaatagagaagaaggttgtgattacagtgcagcaactttctaacaaagaattagctattgaaagatgttttggaatgttattaagcccaggtcgaaacgtgaagaacagtgacatgcatttactggatatggaatccatgggaaagagctatgatgggagagcttatgtcatcactggcatgtggaaccccaatgcaccagtatttctggcacttaacgaggaaaccccaaaagataagcaagtatacatgactgtggcagtggatatggtagtcacagaggtggtggagcctgttcgctttctcctggagacagtagtccgtgtgtaccctgcaaatgagcgattttggtatttcagcagaaagactttcacagagactttcttcatgagattgaaacagtctgagggaaaaggccataccaatgctggagatgcaatatatgaggtggtgagtctacagcgagagtctgacaaggaggaaccagtcactcctactagtggagggggtccaatgtcaccccaggatgatgaagcagaagaggagagtgataatgaactctcaagtggaacaggtgatgtgtctaaggattgtcctgagaagatcctgtattcttggggagagttgctaggaaaatggcacagtaaccttggtgcacgaccgaaagggctgtctactctggtgaagagtggtgtccctgaagcattgagggcagaggtatggcagttattggcaggctgccatgacaaccaggcaatgctggatagataccgaattcttatcacaaag

SEQ ID NO: 182670 - DNA, 2448 bp, Artificial Sequence
  derived and/or modified sequence
atggaggtgagagccagcctgcagaaggtgagcggcagcagcgacagcgtggccaccatgaacagcgaggagttcgtgctggtgccccagtacgccgacgacaacagcaccaagcacgaggagaagccccagctgaagatcgtgagcaacggcgacgagcagctggagaaggccatggaggagatcctgagagacagcgagaagagacccagcagcctgctggtggactgccagagcagcagcgagatcagcgaccacagcttcggcgacatccccgccagccagaccaacaagcccagcctgcagctgatcctggaccccagcaacaccgagatcagcacccccagacccagcagccccggcggcctgcccgaggaggacagcgtgctgttcaacaagctgacctacctgggctgcatgaaggtgagcagccccagaaacgaggtggaggccctgagagccatggccaccatgaagagcagcagccagtaccccttccccgtgaccctgtacgtgcccaacgtgcccgagggcagcgtgagaatcatcgaccagagcagcaacgtggagatcgccagcttccccatctacaaggtgctgttctgcgccagaggccacgacggcaccaccgagagcaactgcttcgccttcaccgagagcagccacggcagcgaggagttccagatccacgtgttcagctgcgagatcaaggaggccgtgagcagaatcctgtacagcttctgcaccgccttcaagagaagcagcagacaggtgagcgacgtgaaggacagcgtgatccccacccccgacagcgacgtgttcaccttcagcgtgagcctggaggtgaaggaggacgacggcaagggcaacttcagccccgtgcccaaggacagagacaagttctacttcaagctgaagcagggcatcgagaagaaggtggtgatcaccgtgcagcagctgagcaacaaggagctggccatcgagagatgcttcggcatgctgctgagccccggcagaaacgtgaagaacagcgacatgcacctgctggacatggagagcatgggcaagagctacgacggcagagcctacgtgatcaccggcatgtggaaccccaacgcccccgtgttcctggccctgaacgaggagacccccaaggacaagcaggtgtacatgaccgtggccgtggacatggtggtgaccgaggtggtggagcccgtgagattcctgctggagaccgtggtgagagtgtaccccgccaacgagagattctggtacttcagcagaaagaccttcaccgagaccttcttcatgagactgaagcagagcgagggcaagggccacaccaacgccggcgacgccatctacgaggtggtgagcctgcagagagagagcgacaaggaggagcccgtgacccccaccagcggcggcggccccatgagcccccaggacgacgaggccgaggaggagagcgacaacgagctgagcagcggcaccggcgacgtgagcaaggactgccccgagaagatcctgtacagctggggcgagctgctgggcaagtggcacagcaacctgggcgccagacccaagggcctgagcaccctggtgaagagcggcgtgcccgaggccctgagagccgaggtgtggcagctgctggccggctgccacgacaaccaggccatgctggacagatacagaatcctgatcaccaaggacagcgcccaggagagcgtgatcaccagagacatccacagaaccttccccgcccacgactacttcaaggacaccggcggcgacggccaggagagcctgtacaagatctgcaaggcctacagcgtgtacgacgaggacatcggctactgccagggccagagcttcctggccgccgtgctgctgctgcacatgcccgaggagcaggccttctgcgtgctggtgaagatcatgtacgactacggcctgagagacctgtacagaaacaacttcgaggacctgcactgcaagttctaccagctggagagactgatgcaggagcagctgcccgacctgcacagccacttcagcgacctgaacctggaggcccacatgtacgccagccagtggttcctgaccctgttcaccgccaagttccccctgtgcatggtgttccacatcatcgacctgctgctgtgcgagggcctgaacatcatcttccacgtggccctggccctgctgaagaccagcaaggaggacctgctgcaggccgacttcgagggcgccctgaagttcttcagagtgcagctgcccaagagatacagagccgaggagaacgccagaagactgatggagcaggcctgcaacatcaaggtgcccaccaagaagctgaagaagtacgagaaggagtaccagaccatgagagagagccagctgcagcaggaggaccccatggacagatacaagttcgtgtacctgtag

SEQ ID NO: 182671 - protein, 709 aa, Artificial Sequence
  derived and/or modified sequence
MKRCRSDELQQQQGEEDGAGLEDAASHLPGADLRPGETTGANSAGGPTSDAGAAAAPNPGPRSKPPDLKKIQQLSEGSMFGHGLKHLFHSRRRSREREHQTSQDSQQHQQQQGMSDHDSPDEKERSPEMHRVSYAMSLHDLPARPTAFNRVLQQIRSRPSIKRGASLHSSSGGGSSGSSSRRTKSSSLEPQRGSPHLLRKAPQDSSLAAILHQHQCRPRSSSTTDTALLLADGSNVYLLAEEAEGIGDKVDKGDLVALSLPAGHGDTDGPISLDVPDGAPDPQRTKAAIDHLHQKILKITEQIKIEQEARDDNVAEYLKLANNADKQQVSRIKQVFEKKNQKSAQTIAQLHKKLEHYRRRLKEIEQNGPSRQPKDVLRDMQQGLKDVGANVRAGISGFGGGVVEGVKGSLSGLSQATHTAVVSKPREFASLIRNKFGSADNIAHLKDPLEDGPPEEAARALSGSATLVSSPKYGSDDECSSASASSAGAGSNSGAGPGGALGSPKSNALYGAPGNLDALLEELREIKEGQSHLEDSMEDLKTQLQRDYTYMTQCLQEERYRYERLEEQLNDLTELHQNEMTNLKQELASMEEKVAYQSYERARDIQEAVESCLTRVTKLELQQQQQQVVQLEGVENANARALLGKFINVILALMAVLLVFVSTIANFITPLMKTRLRITSTTLLVLVLFLLWKHWDSLTYLLEHVLLPS

SEQ ID NO: 182672 - DNA, 2130 bp, Artificial Sequence
  derived and/or modified sequence
atgaagagatgcagaagcgacgagctgcagcagcagcagggcgaggaggacggcgccggcctggaggacgccgccagccacctgcccggcgccgacctgagacccggcgagaccaccggcgccaacagcgccggcggccccaccagcgacgccggcgccgccgccgcccccaaccccggccccagaagcaagccccccgacctgaagaagatccagcagctgagcgagggcagcatgttcggccacggcctgaagcacctgttccacagcagaagaagaagcagagagagagagcaccagaccagccaggacagccagcagcaccagcagcagcagggcatgagcgaccacgacagccccgacgagaaggagagaagccccgagatgcacagagtgagctacgccatgagcctgcacgacctgcccgccagacccaccgccttcaacagagtgctgcagcagatcagaagcagacccagcatcaagagaggcgccagcctgcacagcagcagcggcggcggcagcagcggcagcagcagcagaagaaccaagagcagcagcctggagccccagagaggcagcccccacctgctgagaaaggccccccaggacagcagcctggccgccatcctgcaccagcaccagtgcagacccagaagcagcagcaccaccgacaccgccctgctgctggccgacggcagcaacgtgtacctgctggccgaggaggccgagggcatcggcgacaaggtggacaagggcgacctggtggccctgagcctgcccgccggccacggcgacaccgacggccccatcagcctggacgtgcccgacggcgcccccgacccccagagaaccaaggccgccatcgaccacctgcaccagaagatcctgaagatcaccgagcagatcaagatcgagcaggaggccagagacgacaacgtggccgagtacctgaagctggccaacaacgccgacaagcagcaggtgagcagaatcaagcaggtgttcgagaagaagaaccagaagagcgcccagaccatcgcccagctgcacaagaagctggagcactacagaagaagactgaaggagatcgagcagaacggccccagcagacagcccaaggacgtgctgagagacatgcagcagggcctgaaggacgtgggcgccaacgtgagagccggcatcagcggcttcggcggcggcgtggtggagggcgtgaagggcagcctgagcggcctgagccaggccacccacaccgccgtggtgagcaagcccagagagttcgccagcctgatcagaaacaagttcggcagcgccgacaacatcgcccacctgaaggaccccctggaggacggcccccccgaggaggccgccagagccctgagcggcagcgccaccctggtgagcagccccaagtacggcagcgacgacgagtgcagcagcgccagcgccagcagcgccggcgccggcagcaacagcggcgccggccccggcggcgccctgggcagccccaagagcaacgccctgtacggcgcccccggcaacctggacgccctgctggaggagctgagagagatcaaggagggccagagccacctggaggacagcatggaggacctgaagacccagctgcagagagactacacctacatgacccagtgcctgcaggaggagagatacagatacgagagactggaggagcagctgaacgacctgaccgagctgcaccagaacgagatgaccaacctgaagcaggagctggccagcatggaggagaaggtggcctaccagagctacgagagagccagagacatccaggaggccgtggagagctgcctgaccagagtgaccaagctggagctgcagcagcagcagcagcaggtggtgcagctggagggcgtggagaacgccaacgccagagccctgctgggcaagttcatcaacgtgatcctggccctgatggccgtgctgctggtgttcgtgagcaccatcgccaacttcatcacccccctgatgaagaccagactgagaatcaccagcaccaccctgctggtgctggtgctgttcctgctgtggaagcactgggacagcctgacctacctgctggagcacgtgctgctgcccagctag

SEQ ID NO: 182673 - DNA, 2130 bp, Artificial Sequence
  derived and/or modified sequence
atgaagagatgtaggtcagatgagctccagcagcagcaaggggaggaggacggagcagggcttgaggacgccgcaagtcacctgccaggagccgacctgcgtcctggagagacaactggggctaactccgcaggaggcccgacatctgacgcaggggcggctgctgcccccaaccccggccctaggtccaaacccccggaccttaaaaaaatccagcagctgtctgaaggaagtatgtttggacacggcctaaagcatctgttccatagcaggcgcaggagtagagaaagggaacatcagacctcacaggacagtcaacaacaccagcaacagcaggggatgagcgatcacgactcccccgacgaaaaggaacggagccctgaaatgcatcgggtatcttatgccatgtcattacacgacctgcctgctaggcccactgctttcaatcgtgttctccagcagataaggtcccgccccagtatcaagaggggcgcttctctgcactcctcctcaggcggcggaagctccggttctagctcccgtagaaccaaaagcagcagcctggagccccagcggggatctccccacctgctgagaaaagcaccccaagattcttccctcgctgccatcctgcaccagcaccagtgcagaccccgttcttcctcaacgaccgacaccgctctgctgttggccgatggatctaacgtctacctactggctgaggaagctgaagggattggggacaaggtcgacaaaggcgacttggttgctctgtctctgcccgctggtcacggggatactgatgggcctattagcctggacgtgcccgatggggcccctgatccgcagcgaaccaaagcagccatcgatcatctccaccaaaagatacttaagattactgaacagattaaaattgagcaggaagcccgggacgataacgtagcagaatatcttaaacttgcgaacaacgctgataagcagcaagtttcccgaattaagcaggttttcgaaaagaagaaccagaagagcgctcagaccattgcgcagctgcataagaagcttgagcattatcggcgccgattaaaagagattgaacagaatggcccatcaaggcagcctaaggacgtcctcagagacatgcagcagggtctcaaggatgttggtgctaacgtgcgcgccgggatttctggttttggcggcggcgtcgtggagggagtgaagggatccctgagcggtctaagtcaagccacccacactgcagtcgtgagcaagcctcgggaatttgcgagtctaatccggaataagtttggctcagctgataatatagcacacctgaaggatccgctggaagacggacctccagaagaagctgcccgcgcattgagcgggtccgctacgctggtgagctcaccaaagtacggcagtgatgacgaatgcagcagtgcctccgcgagttcagccggagcaggcagcaattcgggcgctggccctggaggagcgcttgggtccccaaaatccaacgctttatacggcgctcccggaaacctggatgctctcctcgaggagctgagagagattaaggagggccagtctcacctcgaagattcgatggaggacctgaagacacaattgcagagagactatacctatatgacccagtgcctgcaggaggaacgctacaggtatgagcgcctcgaagagcaactcaacgatttaacagagctgcatcagaacgaaatgactaacctgaaacaggaattggcgagcatggaggagaaggtggcttaccaatcttacgaacgcgcacgagacattcaggaggccgtcgaatcatgtttaactagagtgaccaagctggagctgcagcaacagcagcagcaggtggtgcagctggaaggtgtcgagaacgccaacgcccgtgctttactggggaaatttatcaatgtcatcctggcactcatggcggtcctgctggtattcgtctctacaattgctaacttcataacacctctaatgaagaccaggctgcgcatcacttcaaccactctcctggtcctggtgttattcctcctatggaaacattgggactcccttacttacttgctggagcacgtccttctgccttcatag

SEQ ID NO: 182674 - DNA, 2130 bp, Artificial Sequence
  derived and/or modified sequence
atgaagcgctgccgcagtgatgagctgcagcagcagcagggcgaggaggatggagctggcctggaggatgctgccagccacctgcctggagctgacctgcggcctggagagaccactggagccaacagcgctgggggccccaccagtgatgctggagctgctgctgcccccaaccctggccccaggagcaagcccccagacctgaagaagatccagcagctgtctgagggctccatgtttggccacggcctgaagcacctgttccacagcagaagaagaagccgggagcgggagcaccagaccagccaggacagccagcagcaccagcagcagcagggcatgtctgaccatgacagcccagatgagaaggagaggagccctgagatgcaccgggtgtcctatgccatgagcctgcatgacctgcctgcccggcccacagccttcaacagagtgctgcagcagatccgcagccggcccagcatcaagagaggagccagcctgcacagcagcagcggcggcggcagcagcggcagcagcagcaggaggaccaagagcagcagcctggagccccagaggggcagcccccacctgctgaggaaggccccccaggacagcagcctggccgccatcctgcaccagcaccagtgccggcccaggagcagcagcaccacagacacagccctgctgctggctgatggcagcaatgtgtacctgctggccgaggaggccgagggcatcggggacaaggtggacaagggggacctggtggccctgagcctgcctgctggccacggggacacagatggccccatcagcctggatgtgcctgatggagccccagacccccagaggaccaaggccgccatcgaccacctgcaccagaagatcctgaagatcacagagcagatcaagattgagcaggaggccagagatgacaacgtggccgagtacctgaagctggccaacaatgctgacaagcagcaggtgagccgcatcaagcaggtgtttgagaagaagaaccagaagagcgcccagaccatcgcccagctgcacaagaagctggagcactacagaagaaggctgaaggagattgagcagaatggccccagccggcagcccaaggatgtgctgcgggacatgcagcagggcctgaaggatgtgggcgccaacgtgcgggccggcatcagcggctttggaggaggagtggtggagggcgtgaagggcagcctgagcggcctgagccaggccacccacacagctgtggtgtccaagccccgggagtttgccagcctcatccggaacaagtttggcagcgctgacaacatcgcccacctgaaggaccccctggaggatggccccccagaggaggccgcccgggccctgagcggcagcgccaccctggtgagcagccccaagtatggcagtgatgatgagtgcagcagcgccagcgccagcagcgctggagctggcagcaacagcggggccggccctggaggagccctgggcagccccaagagcaatgccctgtatggagcccctggcaacctggatgccctgctggaggagctgcgggagatcaaggagggccagagccacctggaggacagcatggaggacctgaagacccagctgcagagggactacacctacatgacccagtgcctgcaggaggagcgctaccgctatgaaaggctggaggagcagctgaatgacctgacagagctgcaccagaatgagatgaccaacctgaagcaggagctggcctccatggaggagaaggtggcctaccagagctatgagcgggcccgggacatccaggaggccgtggagagctgcctgaccagggtgaccaagctggagctgcagcagcagcagcagcaggtggtgcagctggagggcgtggagaatgccaatgcccgggccctgctgggcaagttcatcaacgtcatcctggccctgatggctgtgctgctggtgtttgtgtccaccatcgccaacttcatcacccccctgatgaagacccggctgcgcatcaccagcaccaccctgctggtgctggtgctcttcctgctgtggaagcactgggacagcctgacctacctgctggagcacgtgctgctgcccagctag

SEQ ID NO: 182675 - DNA, 2130 bp, Artificial Sequence
  derived and/or modified sequence
atgaagcggtgccggagcgacgagctgcagcagcagcagggcgaggaggacggagctggcctggaggatgccgctagccatctgccaggcgccgatctaaggccaggagaaaccactggggccaattccgcgggcggaccaacttcggacgctggggcagctgcagctcctaatcctggaccacgcagcaagccccctgatctgaaaaagatacagcaattatctgaaggcagtatgtttggccacggtcttaaacatctctttcattccagacgacggtccagggagagggaacatcagactagccaggattcacagcagcatcagcaacagcagggcatgagcgatcatgactcccctgacgaaaaagaacggtcccctgagatgcatcgcgtcagctacgctatgtcattacatgatttgccggcccgccccacagcgttcaacagagtgctacagcagattcggagtagaccttctattaagagaggcgccagtctccattcttcttcagggggcggaagctcgggatcatcttccaggcgcaccaagagctccagtcttgaacctcagcgtgggagccctcacctgctccggaaagccccccaagattctagcctggctgctattttacaccagcaccaatgtcgaccaagatcctctagtacaaccgacaccgcgttgcttctagcagacggaagcaacgtgtatctgctcgccgaggaagcggaagggattggcgacaaggttgacaagggtgacttagtggctctgtctctccccgccggccacggtgataccgatggccctatttctctggacgtaccagacggcgctccagatccacagcgcaccaaggcggccatcgatcacctgcatcagaagattctgaagattacagaacagatcaaaattgagcaggaggctcgggatgacaatgtcgccgagtacctcaagctggccaacaatgcagacaaacagcaggttagccgaataaagcaagtttttgagaagaaaaatcagaagtcagcccagactatcgcacagctccacaaaaagcttgaacactatcgcaggcggctgaaagagattgagcagaacggaccctcacgccagcctaaggatgttctgcgcgacatgcaacaggggcttaaagacgtgggggcaaacgtgagagccggaatcagtggttttggcgggggcgtcgtggaaggagtaaaggggagcctgtctgggctctctcaagccacccatactgctgtggtcagcaagccgagggaattcgcatctctcatccgaaataaatttggaagtgcagacaatattgcccatctcaaggatccattggaagacgggccccccgaggaggcagccagagcactgtccgggtcggccactctcgtctcaagtcccaagtacgggagtgacgatgagtgtagttcggcaagcgcaagttcagccggggctgggtcgaattccggggccgggcctggcggggcactggggagtccaaaatcaaatgctctttacggcgcccccggcaacctggacgcactgctggaagagctgagagagatcaaagaagggcagagtcatctggaagacagcatggaagacctcaaaacgcaactccagagagactacacctacatgacgcaatgtctccaggaggagcgttacagatatgaacgcctagaggagcagctgaacgatttgactgagttacatcagaacgagatgacaaacctaaagcaggagttagcgagcatggaggaaaaggtggcctatcagtcctatgagagagccagagacattcaggaggccgttgagagctgcttaacgagagtgacaaagctggagttgcagcagcagcagcagcaagtggtccagctggagggcgtagagaatgcaaacgcacgtgctttactggggaagtttatcaacgtgatcttggccctgatggccgtgctgctcgttttcgtcagcactattgctaatttcattacacctttaatgaagactagactacggataacatcaaccactcttctggtactggtcctgtttctcctgtggaaacactgggattctcttacctatttgctggagcacgtcctgttacctagctag

SEQ ID NO: 182676 - DNA, 2130 bp, Artificial Sequence
  derived and/or modified sequence
atgaaacgatgccggagcgacgagctccagcagcagcaaggggaggaagacggagcaggcctggaggatgcggcttctcatctacctggtgccgatctccgccctggagaaaccacgggagccaactctgccggaggtccgacaagcgatgcaggcgcagcggctgcccctaaccccggacccagatcaaagcctcccgacctgaagaaaattcaacagttatccgagggctcaatgtttgggcacgggttgaaacacctgttccattcacgacggagatcacgagagagagaacatcagacctctcaggattcacaacagcatcaacagcagcaaggaatgagcgatcatgacagtccagacgaaaaggagaggtccccggagatgcacagggtgagctatgccatgtcgctacatgacttgccggcaaggccaacagcctttaaccgcgtgctgcagcagattcgtagccggccatccataaagcgcggtgcatccctccattcctccagcgggggaggctcttcaggctcctcttcccggaggacgaaaagttctagccttgaaccacagagggggtctccccacttgcttaggaaggcaccccaagacagcagcctggcagcgatcctgcatcagcatcagtgccgccctcgttcaagttccacgactgatactgcccttctgctggccgacggcagcaatgtgtacttactcgccgaagaggccgagggaataggggacaaagtggataagggagacctggtcgctctgtcactcccagctggacacggcgacacagacgggcctatctctctcgacgtaccagacggggctcccgacccacaaagaacgaaggctgcgatcgaccacctccatcagaaaatcctgaaaatcacggagcagattaaaatagagcaggaggctagggacgataatgtggcagaatacctcaaattagccaacaacgctgacaagcagcaggtttcaaggattaagcaggtgttcgaaaagaagaatcagaaatctgcacagaccatcgctcagctgcacaaaaaattggaacattaccggcgaaggctcaaagaaatcgaacagaatggccctagtaggcagcccaaagacgttctgagagatatgcagcagggcctgaaggacgttggcgctaacgtgcgggcaggcattagcggtttcggcggaggggtcgtggagggtgtgaaaggaagtctttccggactgtcccaagcaacccacactgctgtggtgtcaaaacccagagaattcgcctccctgatacgcaacaagtttggctccgccgacaacatcgcccatctgaaggaccccctggaggatgggccacctgaagaggctgccagggctcttagcggatccgcgaccttggtttcttcgcccaagtatggatccgacgatgaatgttccagcgcctcggcttcatcagctggtgcaggaagtaatagcggcgctggccctggtggagctctaggaagccccaaatcaaacgccttgtacggagcccctggaaatctggatgcgctgctagaggagctccgcgagatcaaagaaggccaatcacatctggaggatagcatggaggacttgaagacgcaacttcaacgcgactacacttatatgactcagtgcctccaagaggagcgctatcgctacgagcgcctcgaggaacagctgaatgacttaacagaactccaccagaatgagatgacaaaccttaagcaagagttggcaagtatggaagagaaggtagcctatcaatcttacgagagggctcgggacattcaagaggctgtagaaagttgcttgacgcgggtgacaaagttagagcttcagcagcaacagcagcaggtggtgcagttagagggcgttgagaatgctaatgcacgcgctctgctgggcaagttcattaatgtaattctggcgctcatggccgtactcttagtattcgtcagcacgatcgctaatttcatcacgccgctgatgaaaacacgtctgcgcataacaagcacaacgttgttggtgttagtcctgttcctgctgtggaagcactgggatagtcttacttacctcttggagcacgtgcttttgccctcctag

SEQ ID NO: 182677 - DNA, 3738 bp, Artificial Sequence
  derived and/or modified sequence
ggccggccgggagggatgcgctgtgccgcccagctcctctccgtcctgcccatgccctgaagcagaaagtttgggggccgggggttgtctcccttctccctcctgcaatgactgcccaaggactcttgctgcccagcctcgactgtgacctgtcttcgctccccaggtcgaaatgaactattccaagctataaccaaggctcccccttctcgcccctccctcacccgcctttaagaattttttttttaattcaagaaattgtggtctgccatctcccctccttgttaataatttagaccccaggcctcatatgaatataagagggggtgcggtcttccccaagacggcgcgctggaaggacagattccccttgccgacccacatacaccatgaagaggtgcagatcggacgagctgcagcaacaacagggcgaggaggatggagctgggctggaagatgccgcttcccacctgccgggcgcggacctccggcctggggagaccacgggtgctaactctgctggcgggccaacttcagacgccggcgctgccgcggcgcccaacccaggtccccgaagcaagcctcctgatttaaagaaaatccagcagctgtcagagggctccatgtttggccacggtctgaagcacctgttccacagccgccgtcggtctcgggaaagggagcaccagacgtctcaggattcccagcagcatcagcagcagcagggtatgtccgaccatgactccccagatgagaaggagcgctctccggagatgcatcgcgtctcctacgccatgtccctgcacgacctgcccgcccggcccaccgccttcaaccgcgtgctgcagcagatccgctcccggccctccatcaagcggggcgccagcctgcacagcagcagtgggggcggcagcagcgggagcagcagccggcgcaccaagagtagctccctggagccccagcgtggcagccctcacctgctgcgcaaggccccccaggacagcagcctggccgccatcctgcaccagcaccagtgccgtccccgctcttcctccaccaccgacactgctctgctgctggccgacggcagcaacgtgtacctcctggctgaggaggccgaaggcatcggggacaaggtcgataagggagacctggtggccctgagcctccccgccggccatggtgacaccgacggccccatcagcctggacgtgcccgatggggcaccggacccccagcggaccaaggccgccattgaccacctgcaccagaagatcctgaagatcaccgagcagatcaagattgagcaggaggctcgcgacgacaatgtggcagagtatctgaaactggccaacaacgcggacaagcagcaggtgtcacgcatcaagcaagtgttcgagaagaagaaccagaagtcagcccagaccatcgcccagctgcacaagaagctggagcactaccgccggcgcctgaaggagattgagcagaacgggccctcgcggcagcccaaggacgtgctgcgggacatgcagcaggggctgaaggacgtgggcgccaacgtgcgcgcaggcatcagcggctttgggggcggcgtggtggagggcgtcaagggcagcctctctggcctctcacaggccacccacaccgccgtggtgtccaagccccgggagtttgccagcctcatccgcaacaagtttggcagtgctgacaacatcgcccacctgaaggaccccctggaagatgggccccctgaggaggcagcccgggcactgagcggcagtgccacactcgtctccagccccaagtatggcagcgatgatgagtgctccagcgccagcgccagctcagccggggcaggcagcaactctggggctgggcctggtggggcgctggggagccctaagtccaatgcactgtatggtgctcctggaaacctggatgctctgctggaagagctacgggagatcaaggagggacagtctcacctggaggactccatggaagacctgaagactcagctgcagagggactacacctacatgacccagtgcctgcaggaggagcgctacaggtacgagcggctggaggagcagctcaacgacctgactgagcttcatcagaacgagatgacgaacctgaagcaggagctggccagcatggaggagaaggtggcctaccagtcctatgagagggcacgggacatccaggaggccgtggagtcctgcctgacccgggtcaccaagctggagctgcagcagcaacagcagcaggtggtacagctggagggcgtggagaatgccaacgcgcgggcgctgctgggcaagttcatcaacgtgatcctggcgctcatggccgtgctgctggtgttcgtgtccaccatcgccaacttcatcacgcccctcatgaagacacgcctgcgcatcaccagcaccaccctcctggtcctcgtcctgttcctcctctggaagcactgggactccctcacctacctcctggagcacgtgttgctgcccagctgagtggccagccacaccaaccctgtgctctctggcccccagctggccacacttctccaggagggacccttggacttctttgtgtgtccagtttggcctcctgcccaaactgtccattccagcagctcctgcccccttctctgtacttgcttctgtctgacaccttctccctgttggcctgaagggagcttagaatgcagccctacctggagatagtgcgggcacctgtggccaagtggagcagaggtggacatggggttggattgttttgattatttatagttacacaaggacttctcccagctgaccctcaggatgccccaagtcaggaagaccattaagaataggaggagagggctctgcctcaactttcctaggaaagagcccacctcggagatagctacggttttctctggtggagatggtgaggatgaaggctggagagtgagggaggaggctctgctggccgcagagaacacagggatgggagggtccctagccttcgggcacctccagggccagagagcaggctcagagcagctagtgtggagctcagcatccccaccccacccctcctccctgtagagctgatttgaggcctccttctggggctgggctctgcaggccaggtgggtgtggcctgtgttttcccttctgttctttctgcctgtactggatctgttattttcagggaaacaggccccagggcccccctgagcctcaccctaagcccttaggcctctgagagtgctgttgggttctatttatttatttatttgttcctttgttccctacccgtgcccccagtgtcttccctgctgagtaccaggagaggtcctgccccatcctctctctgaagccagggcccttccattccatttagcctttggatcatcctggctgggagaagtgggaccgagccacccagccccactatccccaagcagccctacagccgggatgggaggcacgtggcctctcttttatccgtctatttattttgtaagtgtattcgtgtggaggaggttgttgctttatttttttaaggctctggagtgttgtgtatggtttcttttcacatcccagcctcccatgggcacttctaagaagagaggggatttcttggaaaaggagagaggaatcccctagagcagggaaagcagtgcctgccagctgttgtgcaccttcctgagaaataaatatcctctaaattttcaaacca

SEQ ID NO: 182678 - DNA, 2300 bp, Artificial Sequence
  derived and/or modified sequence
accatttatgcctctgtctttcagctccgtgtcaggtctctgtgtttgttccccattattcagcaagcgttttagtgactcacccatccgagattgtttgaataatgtgtgaagtgttattcgcagacaaagggctggagaaatccaagatgctaaccaaaaagtggacagcaggtgaccattagttttccttgctgaaaaatccagcagctgtcagagggctccatgtttggccacggtctgaagcacctgttccacagccgccgtcggtctcgggaaagggagcaccagacgtctcaggattcccagcagcatcagcagcagcagggtatgtccgaccatgactccccagatgagaaggagcgctctccggagatgcatcgcgtctcctacgccatgtccctgcacgacctgcccgcccggcccaccgccttcaaccgcgtgctgcagcagatccgctcccggccctccatcaagcggggcgccagcctgcacagcagcagtgggggcggcagcagcgggagcagcagccggcgcaccaagagtagctccctggagccccagcgtggcagccctcacctgctgcgcaaggccccccaggacagcagcctggccgccatcctgcaccagcaccagtgccgtccccgctcttcctccaccaccgacactgctctgctgctggccgacggcagcaacgtgtacctcctggctgaggaggccgaaggcatcggggacaaggtcgataagggagacctggtggccctgagcctccccgccggccatggtgacaccgacggccccatcagcctggacgtgcccgatggggcaccggacccccagcggaccaaggccgccattgaccacctgcaccagaagatcctgaagatcaccgagcagatcaagattgagcaggaggctcgcgacgacaatgtggcagagtatctgaaactggccaacaacgcggacaagcagcaggtgtcacgcatcaagcaagtgttcgagaagaagaaccagaagtcagcccagaccatcgcccagctgcacaagaagctggagcactaccgccggcgcctgaaggagattgagcagaacgggccctcgcggcagcccaaggacgtgctgcgggacatgcagcaggggctgaaggacgtgggcgccaacgtgcgcgcaggcatcagcggctttgggggcggcgtggtggagggcgtcaagggcagcctctctggcctctcacaggccacccacaccgccgtggtgtccaagccccgggagtttgccagcctcatccgcaacaagtttggcagtgctgacaacatcgcccacctgaaggaccccctggaagatgggccccctgaggaggcagcccgggcactgagcggcagtgccacactcgtctccagccccaagtatggcagcgatgatgagtgctccagcgccagcgccagctcagccggggcaggcagcaactctggggctgggcctggtggggcgctggggagccctaagtccaatgcactgtatggtgctcctggaaacctggatgctctgctggaagagctacgggagatcaaggagggacagtctcacctggaggactccatggaagacctgaagactcagctgcagagggactacacctacatgacccagtgcctgcaggaggagcgctacaggtacgagcggctggaggagcagctcaacgacctgactgagcttcatcagaacgagatgacgaacctgaagcaggagctggccagcatggaggagaaggtggcctaccagtcctatgagagggcacgggacatccaggaggccgtggagtcctgcctgacccgggtcaccaagctggagctgcagcagcaacagcagcaggtggtacagctggagggcgtggagaatgccaacgcgcgggcgctgctgggcaagttcatcaacgtgatcctggcgctcatggccgtgctgctggtgttcgtgtccaccatcgccaacttcatcacgcccctcatgaagacacgcctgcgcatcaccagcaccaccctcctggtcctcgtcctgttcctcctctggaagcactgggactccctcacctacctcctggagcacgtgttgctgcccagctgagtggccagccacaccaaccctgtgctctctggcccccagctggccacacttctccaggagggacccttggacttctttgtgtgtccagtttggcctcctgcccaaactgtccattccagcagctcctgcccccttctctgtacttgcttctgtctgacaccttctccctgttggcctga

SEQ ID NO: 182679 - protein, 946 aa, Artificial Sequence
  derived and/or modified sequence
MVEGRVSEFLKKLGFSGGGRQYQALEKDEEEALIDEQSELKAIEKEKKVTALPPKEACKCQKEDLARAFCVDLHTGLSEFSVTQRRLAHGWNEFVADNSEPVWKKYLDQFKNPLILLLLGSALVSVLTKEYEDAVSIATAVLVVVTVAFIQEYRSEKSLEELTKMVPPECNCLREGKLQHLLARELVPGDVVSLSIGDRIPADIRLTEVTDLLVDESSFTGEAEPCSKTDSPLTGGGDLTTLSNIVFMGTLVQYGRGQGVVIGTGESSQFGEVFKMMQAEETPKTPLQKSMDRLGKQLTLFSFGIIGLIMLIGWSQGKQLLSMFTIGVSLAVAAIPEGLPIVVMVTLVLGVLRMAKKRVIVKKLPIVETLGCCSVLCSDKTGTLTANEMTVTQLVTSDGLRAEVSGVGYDGQGTVCLLPSKEVIKEFSNVSVGKLVEAGCVANNAVIRKNAVMGQPTEGALMALAMKMDLSDIKNSYIRKKEIPFSSEQKWMAVKCSLKTEDQEDIYFMKGALEEVIRYCTMYNNGGIPLPLTPQQRSFCLQEEKRMGSLGLRVLALASGPELGRLTFLGLVGIIDPPRVGVKEAVQVLSESGVSVKMITGDALETALAIGRNIGLCNGKLQAMSGEEVDSVEKGELADRVGKVSVFFRTSPKHKLKIIKALQESGAIVAMTGDGVNDAVALKSADIGIAMGQTGTDVSKEAANMILVDDDFSAIMNAVEEGKGIFYNIKNFVRFQLSTSISALSLITLSTVFNLPSPLNAMQILWINIIMDGPPAQSLGVEPVDKDAFRQPPRSVRDTILSRALILKILMSAAIIISGTLFIFWKEMPEDRASTPRTTTMTFTCFVFFDLFNALTCRSQTKLIFEIGFLRNHMFLYSVLGSILGQLAVIYIPPLQRVFQTENLGALDLLFLTGLASSVFILSELLKLCEKYCCSPKRVQMHPEDV

SEQ ID NO: 182680 - DNA, 2841 bp, Artificial Sequence
  derived and/or modified sequence
atggtcgaggggagagtgtctgagtttctcaagaaactgggctttagcggtggcggccggcaatatcaggcgctagagaaggatgaagaagaagcgcttattgatgagcagtctgagctcaaggccatagaaaaagagaagaaggtcacagccctcccccccaaagaggcctgcaagtgccaaaaagaagacctcgcccgcgccttctgcgtggatctccacactggcctatctgagttttcagttactcagcggcggttggcccatggctggaatgagtttgtcgccgataacagtgagccagtctggaagaagtatttagatcagtttaagaaccccctgattctgctactgttggggtcagccctcgtctccgtactgacaaaggagtatgaagatgcggtttccatcgccactgcagtactggtggtagtgactgttgcattcatacaggaataccggtccgaaaagtctctggaggaactgacaaaaatggtgcctccagaatgcaattgcctgagggaaggaaagctccaacacttactagcaagagaacttgtgcccggggacgtagtgtcactcagtataggcgacagaatacccgctgatataaggctcactgaggttaccgacctgctcgtggacgaaagctctttcaccggggaggccgagccatgcagtaaaactgatagccccctcaccggaggtggagatctgacgacgctttctaacatcgtgttcatgggcaccctggttcagtatggtcggggccagggggttgtgatcggtacaggggagtcttctcagttcggagaggtctttaagatgatgcaggctgaagagacaccaaagacacccctacagaaatcaatggaccggctaggtaagcagctcacgctattctccttcggcatcattgggctgatcatgctcataggctggagccaggggaagcagctgctgtctatgtttaccattggagtaagtcttgcggtcgccgctatacccgagggactgcccatcgtagtgatggtcacgctcgttctcggcgttctgagaatggccaaaaaacgcgtgattgtcaaaaagctcccaatagttgaaaccctaggttgttgcagtgtcctttgcagtgataagaccggcactctgactgcgaatgagatgactgtaacacagttggtcacttcagacgggctaagggcggaagtgtctggcgtgggatatgatgggcagggtacagtctgcctcctgccaagcaaggaagtgattaaagaatttagcaatgtgagtgtgggcaaactcgtagaagccggttgtgtggccaataacgccgtgatcagaaaaaacgctgttatgggccagcctaccgagggcgcattgatggctttggccatgaagatggatctctctgacattaagaattcctatatcagaaagaaggagataccattctccagcgagcagaaatggatggcagtgaagtgttccttaaaaacggaggatcaagaagatatctactttatgaagggcgccctggaggaggtcatccggtattgtacgatgtacaataatggggggatccccctcccgctgaccccacagcaacggtctttttgcctccaagaagaaaagagaatgggctcgttggggctcagggtgctcgccctggcttctgggcccgagcttggccggctgacctttctgggcctggtcggaatcatcgatcctcctcgcgtgggagtgaaagaggccgttcaggttctctctgaatcaggtgtatcagtgaaaatgattacaggagatgcattagaaaccgcacttgccatcggccgcaatataggtctctgtaatgggaaactgcaggccatgagcggagaggaggttgatagtgtagaaaaaggtgagctggcagacagagtggggaaggtctccgtcttctttaggacttctcccaaacacaagttgaagatcattaaagcattgcaggagagtggcgcaatcgtagcgatgacaggcgatggggtaaatgacgccgtggcgttgaaatccgcagacattggtattgccatgggacaaacaggaaccgacgtcagcaaagaggctgccaatatgatccttgtggacgacgatttttcggcgatcatgaatgccgtggaagagggcaaggggatattctataatatcaagaactttgtcagatttcagctgtctaccagcatctctgctttaagcctgattacattgagcacagtctttaatttacccagtccactcaacgccatgcaaattctttggattaacatcataatggacggtcccccagctcagtcactcggcgtcgaaccagtggataaggatgcttttcggcagcccccaaggtccgtgcgggatactatactgtccagggctctgattctgaaaatcctgatgagtgcagccatcataatctcaggcaccctgttcattttttggaaggagatgcctgaggatcgagcttccaccccgagaacaaccacgatgacctttacatgcttcgtgttctttgacctcttcaatgcgctgacatgcagatcccaaactaaactcatattcgagatcggattcctccgaaaccatatgttcctttactctgtgctcgggtctatcctcggccaattggccgttatctatatacctcccttgcagagagtattccagaccgagaacttaggcgccctcgatttgctgttcctgaccggactggcctcttccgtttttatcctttcagagttactgaagctctgtgagaaatactgctgcagtccaaagagggttcagatgcatcccgaagacgtctag

SEQ ID NO: 182681 - DNA, 2841 bp, Artificial Sequence
  derived and/or modified sequence
atggtggagggccgggtgtctgagttcctgaagaagctgggcttcagcggcggcggccggcagtaccaggccctggagaaggatgaggaggaggccctgattgatgagcagagcgagctgaaggccatcgagaaggagaagaaggtgacagccctgccccccaaggaggcctgcaagtgccagaaggaggacctggcccgggccttctgtgtggacctgcacacaggcctgtctgagttctctgtgacccagaggcggctggcccacggctggaatgaatttgtggccgacaacagcgagcctgtgtggaagaagtacctggaccagttcaagaaccccctcatcctgctgctgctgggcagcgccctggtgtctgtgctgaccaaggagtatgaagatgctgtgtccatcgccacagctgtgctggtggtggtgacagtggccttcatccaggagtacagaagtgagaagagcctggaggagctgaccaagatggtgcccccagagtgcaactgcctgcgggagggcaagctgcagcacctgctggcccgggagctggtgcctggagatgtggtgtccctgagcatcggggaccgcatcccagctgacatccggctgacagaggtgacagacctgctggtggatgagagcagcttcaccggggaggccgagccctgcagcaagacagacagccccctgaccggcggcggggacctgaccaccctgagcaacatcgtgttcatgggcaccctggtgcagtatggccggggccagggcgtggtgattggcaccggggagagcagccagtttggagaggtgttcaagatgatgcaggccgaggagacccccaagacccccctgcagaagtccatggaccggctgggcaagcagctgaccctcttctcctttggcatcatcggcctcatcatgctgattggctggagccagggcaagcagctgctgtccatgttcaccatcggcgtgtccctggccgtggccgccatccctgagggcctgcccatcgtggtgatggtgaccctggtgctgggcgtgctgaggatggccaagaagagggtcatcgtgaagaagctgcccatcgtggagaccctgggctgctgcagcgtgctgtgcagcgacaagacaggcaccctgacagccaatgagatgacagtgacccagctggtgaccagtgatggcctgcgggcagaggtgtctggagtgggctatgatggccagggcaccgtgtgcctgctgcccagcaaggaggtgatcaaggagttcagcaatgtgtctgtgggcaagctggtggaggccggctgtgtggccaacaatgctgtgatcaggaagaatgctgtgatgggccagcccacagaaggagccctgatggccctggccatgaagatggacctgagtgacatcaagaacagctacatcaggaagaaggagatccccttcagcagcgagcagaagtggatggctgtgaagtgcagcctgaagacagaggaccaggaggacatctacttcatgaagggggccctggaggaggtgatccgctactgcaccatgtacaacaatggaggcatccccctgcccctgaccccccagcagaggagcttctgcctgcaggaggagaagaggatgggcagcctgggcctgcgggtgctggccctggccagcggccctgagctgggccgcctgaccttcctgggcctggtgggcatcattgatcctccccgggtgggcgtgaaggaggccgtgcaggtgctgtctgagagcggcgtgtctgtgaagatgatcactggagatgccctggagacagccctggccatcggcaggaacatcggcctgtgcaatggcaagctgcaggccatgtctggagaggaggtggacagcgtggagaagggggagctggccgacagagtgggcaaggtgtctgtgttcttccgcaccagccccaagcacaagctgaagatcatcaaggccctgcaggagagcggggccatcgtggccatgactggagatggagtgaatgatgctgtggccctgaagtctgctgacattggaattgccatgggccagacaggaacagatgtgtccaaggaggccgccaacatgatcctggtggatgatgacttcagcgccatcatgaatgctgtggaggagggcaagggcatcttctacaacatcaagaactttgtgcgcttccagctgagcaccagcatcagcgccctgagcctcatcaccctgagcacagtgttcaacctgcccagccccctgaatgccatgcagatcctgtggatcaacatcatcatggatggccccccagcccagagcctgggcgtggagcctgtggacaaggatgccttccggcagccccccaggtctgtgcgggacaccatcctgagccgggccctgatcctgaagatcctgatgtctgctgccatcatcatcagcggcaccctcttcatcttctggaaggagatgcctgaggaccgggccagcacccccaggaccaccaccatgaccttcacctgctttgtgttctttgacctcttcaatgccctgacctgccgcagccagaccaagctgatctttgaaattggcttcctgaggaaccacatgttcctgtacagcgtgctgggcagcatcctgggccagctggccgtcatctacatcccccccctgcagagggtcttccagacagagaacctgggcgccctggacctgctcttcctgaccggcctggccagcagcgtcttcatcctgtctgagctgctgaagctgtgtgagaagtactgctgcagccccaagagggtgcagatgcacccagaagatgtgtag

SEQ ID NO: 182682 - DNA, 2841 bp, Artificial Sequence
  derived and/or modified sequence
atggtggagggccgggtgagcgagttcctgaagaagctgggcttctccgggggtggccgccagtatcaggctctcgaaaaagatgaggaggaggcgctcatcgacgagcagagtgagctcaaagccattgaaaaagagaagaaggtaacagccctccctccgaaggaggcctgtaaatgtcaaaaagaagacctggcgcgggcattctgtgtagatctgcatactggattatccgagttttctgttactcagcggaggctcgcccacggctggaatgaatttgtcgccgacaattccgagcctgtttggaagaagtaccttgaccagttcaaaaatccgttaattttgctgctcctgggaagtgccctagtctcagtgctcactaaagagtacgaggatgccgtgagtatcgccaccgctgtgctggtggtggttacggtggcttttattcaggaatacaggtccgaaaagtcactggaggaattaaccaaaatggtgcctcccgagtgcaactgcctgagagagggaaaactgcagcatctcctagctcgtgagcttgtacctggtgacgtagtatctctcagtattggcgacagaattcccgcagatatccggctgacagaggtcaccgatctcctggtggatgaatcctctttcactggtgaagctgaaccctgcagcaagacagactcaccccttacaggggggggagaccttactacattgtcaaacatagtgttcatgggaacactggtgcagtacgggagggggcagggcgtcgtgattggaacaggggaaagcagtcagttcggagaagtgtttaagatgatgcaggccgaggaaactcctaaaacccctcttcagaagagcatggatcggcttggtaagcagctgacactgttctcttttggcatcattggcctcattatgctgataggatggagccagggtaagcagctgctgtctatgttcacgatcggggtgtccctagcagtggccgctatccctgaagggttgcctatcgttgtgatggtgacactagtgctgggagtgctgcgtatggcaaagaaacgcgtgatcgtcaagaaactgcccatagtagaaacactggggtgctgttccgtcctgtgcagcgacaaaaccggcactctgactgctaatgagatgaccgttacccaactagtgacttccgacggcctgcgggcagaggtgtccggcgtgggctacgacggccaggggacggtctgtcttttgccatccaaagaggtaatcaaagagtttagtaacgtgtcagtgggaaaattggtagaagctggctgtgtggccaataacgccgttatacggaaaaatgcagttatggggcagcccactgagggtgctctgatggcactcgcaatgaagatggatttatccgacataaagaatagctatatcagaaaaaaagagataccatttagttccgaacagaagtggatggcagtgaagtgctcgttgaagaccgaagaccaggaggatatctactttatgaaaggagctctcgaagaggttatcaggtactgtactatgtataataatggaggaatccccttgcccctcacaccccagcagcgtagcttctgcttgcaagaggagaaaaggatgggctccctaggactgcgcgttcttgccctggcttccggtcccgagctggggaggcttactttcctggggcttgtggggataatagacccccccagggtgggagtcaaagaagccgtgcaggtgctgtccgaaagtggcgtctcggtgaaaatgatcacaggggatgccctggagactgccctcgctataggtcgcaatatcgggctgtgtaacgggaaactgcaagccatgagtggggaagaagtggatagtgtggaaaaaggtgagctggctgatcgggtggggaaggtgtccgtctttttccgcaccagcccaaaacacaagttaaagattattaaggcactgcaggagagcggcgcgatcgtagccatgaccggggacggcgtcaacgatgctgttgccctgaagtctgctgatattggcattgcaatgggacaaacaggaacagatgtgagcaaggaagccgcaaacatgatcctcgtggacgacgacttcagcgcaatcatgaacgcagttgaggaaggaaaaggaatcttttataatatcaaaaacttcgttaggttccagctctctacttctattagtgccctctcactgataaccttgtcaactgtcttcaatctgccttctcccctgaatgccatgcagatcctgtggattaacatcatcatggatgggccacccgcacaaagtctgggggtagagccagtggataaagacgcattccgacaaccaccgagatcagttcgggacaccatcctatccagggccctcatcctgaaaatattgatgagcgccgcgattattatttctgggacattgtttatattctggaaagaaatgcctgaggatagggctagcaccccgcggactaccacaatgacctttacttgtttcgtcttttttgacctctttaatgccctcacgtgtaggagtcagacaaaactcatctttgaaattggattcttgagaaaccatatgtttctgtacagcgtgctcggcagtattctcggtcagctggcagttatttatattcctcccctgcaacgggtcttccagacagaaaatttgggcgctttggaccttctgttccttacagggttggcttcaagcgtctttatcttatccgaattattgaagctctgtgagaagtattgttgttcccctaagcgcgtccaaatgcatcccgaagacgtgtag

SEQ ID NO: 182683 - DNA, 2841 bp, Artificial Sequence
  derived and/or modified sequence
atggtcgagggtcgggtgtccgaattcctcaagaaactgggcttctctggcggtggtcgccagtaccaggccctcgagaaggacgaagaggaagccttgatagacgagcagagcgagctaaaagctattgaaaaagagaaaaaagtgaccgccctccctcctaaggaagcctgtaagtgccagaaggaggacctggcaagagcgttttgtgtcgacctgcacaccggactgtctgaattctctgttacgcagcggaggttggcccacggatggaacgagtttgtcgcggataacagcgagcctgtttggaaaaagtatttagatcagtttaaaaatccgctgattttgctgctgttgggatcagcgctggtatctgttctgactaaagagtatgaagacgctgtgtctattgccactgctgtgctagttgtcgtaaccgtggcgttcatccaggaataccgtagcgaaaagagccttgaggaattaactaaaatggtcccccctgaatgcaactgcctgagggagggaaaattacagcatctcctggcgagggagctggttcccggagatgttgtgagccttagcattggcgaccgtatacccgctgacatcagactgaccgaggttacggatcttctggtggacgagagtagtttcactggagaggccgagccttgctcaaaaaccgactcgcccttaactggagggggtgatctaaccacactatccaacattgtctttatggggacattggtgcagtacggccgtggacagggagttgtaatcgggacaggagagtcatctcagttcggcgaagtgtttaagatgatgcaggctgaggaaactccaaagacaccactgcagaaatctatggatagactggggaaacagcttacgctattttcttttgggataatcggtctcataatgctcattggatggtctcagggaaagcagctgctgtctatgttcactattggggtgtctttggccgttgccgcaattcccgagggactccctattgtggttatggtgaccctcgtcctcggagttttgagaatggctaagaagagggtgatcgtcaagaaactgcccatagtcgagacgctggggtgctgcagcgtgctgtgtagtgataagactggcaccctgacggccaacgaaatgacggtgacccagctagtgacctccgatggccttagagccgaggtcagcggtgtgggctatgacgggcagggcacagtctgtctgctccctagtaaagaagtgattaaggagttctcaaatgtgtctgtcggcaagctagtggaagctggctgtgtggcaaacaacgcggttattcggaaaaacgctgtcatggggcaaccgaccgagggggctctcatggcgctggctatgaagatggatctcagtgatataaaaaatagttacattagaaaaaaggaaatcccctttagcagtgagcagaagtggatggctgttaagtgcagccttaaaacagaagaccaggaagatatctactttatgaagggggctctcgaggaagttatccgctactgcactatgtataataacggcggaatccctctgcctttgaccccccagcaaaggagtttttgtctacaggaagagaagcgcatggggagccttggcctcagagtgctggcactcgcctccgggccagagcttgggcgtctcacatttctgggattggttgggattatcgatccacccagagtaggtgtaaaggaagccgtgcaggtgctttcagaatcaggggtttccgtgaaaatgatcacgggcgacgcactcgagacagccttagcaatcggcagaaatataggtctatgtaacggcaaactgcaggctatgagtggagaggaggtcgacagcgtcgaaaaaggagagcttgccgacagggtcggtaaagtttccgtgttcttccgaactagcccaaaacacaagctgaaaatcattaaagctctccaagaaagtggcgcaattgtggccatgactggagatggagtcaatgacgctgtggcactgaaaagcgcggacatcggcatagctatggggcaaaccggaaccgacgtgtcaaaagaggctgccaacatgatcttggtagacgacgacttctcagcaataatgaatgctgttgaggagggaaaggggatcttttataatatcaaaaacttcgtgcgtttccaactgagcactagcatttctgcacttagtctgataacactctcaaccgtctttaacctcccatccccactcaacgccatgcagatcctgtggatcaacattatcatggacggaccacccgcacagagcctgggcgtggaaccagtggacaaggacgccttcagacagcccccacgctccgtgcgcgataccatcctgtctcgcgcactgattttaaaaatcctaatgagcgctgccattatcatcagcggaacattatttatcttctggaaggagatgccagaggacagagcctccaccccaaggactactaccatgacttttacctgtttcgtgttctttgacctgttcaacgcactgacatgcaggtctcaaaccaaacttatctttgaaatcgggtttctgcgcaaccacatgttcctatacagcgtgctgggctcaattttgggccaactggcagtgatttatatccccccactgcagagggtgttccagaccgagaatctgggagcacttgacctgctctttctgaccgggctggcatcgagcgtttttattctttcagaattattgaaactgtgcgagaaatactgctgttcccccaaaagagtacagatgcaccccgaagatgtgtag

SEQ ID NO: 182684 - DNA, 3384 bp, Artificial Sequence
  derived and/or modified sequence
gggtccggcccaggaggcttgggcgcgcgcagccatcccgggcctcgccggggacctagggacgcaggcaacgcctgcgcccgctcaccatggtcgagggacgcgtctccgagttcctgaagaaactcggcttctcgggcgggggccgccagtaccaggcgctggagaaggacgaagaggaagccttgattgatgaacagagtgagctgaaagccatcgagaaagagaagaaggtgacagccctgccccccaaggaagcgtgcaaatgccagaaagaggatttggccagagcgttttgtgtggacttacacactgggctgtcggagttctcggtgacgcagcgccggctggcccatggctggaatgagtttgttgctgacaacagcgaacctgtgtggaagaaatacctggatcagtttaagaaccccctgatcctgctgctgctgggctctgccctggtgagtgtcctcaccaaggagtatgaggacgccgtcagcatcgccacggcagtgcttgtcgtggtcactgtcgccttcatccaggagtacaggtcggagaaatctctggaagagctgaccaagatggttcctccagaatgtaactgcctaagagaaggaaaactccagcacctgcttgctcgagaactggttcctggtgatgtcgtatctctctcgatcggagaccggatccctgcagacatccgactcactgaggtcacggacctcttggtggatgaatccagtttcaccggggaagccgagccatgtagtaaaacagacagccccttgacaggcggtggggacctcaccaccctcagcaacatcgtcttcatggggaccctggtgcagtatgggaggggccagggggtcgtgattggaacaggggaaagctctcagttcggagaagtgtttaagatgatgcaggctgaagagacacctaaaactcctttgcagaaaagcatggacaggctaggaaagcaactgacactcttctcctttggcataatcggtctcatcatgctcattggctggtcgcaagggaaacaactcctgagtatgttcacgatcggggtcagcctggctgtggcggccattccagagggtctgcccatcgtcgtcatggtgacgctggtcctgggagtgctgcggatggccaagaagcgggtcatcgtgaagaagttacccatcgtggagactttaggttgctgcagcgttctctgttctgacaagacggggactctgactgccaatgaaatgacagtgacccagcttgtaacgtcagatgggcttcgtgccgaggtcagcggagttgggtatgacggtcaagggactgtgtgtcttctaccatccaaggaagtcattaaggaattttccaatgtctcagtgggaaagttagtggaggcgggctgtgttgccaacaatgcggtcatcagaaagaacgccgtgatggggcagcccaccgagggtgcattgatggccctggcgatgaagatggacttaagtgatattaaaaattcatatataagaaaaaaagagattccattcagttcagagcagaagtggatggcggtgaaatgcagtctgaagactgaggatcaggaagacatttacttcatgaaaggggccttggaagaggtgatccgctactgcaccatgtacaacaacgggggcatccccctgccgctgacgccccagcagaggtcattctgcctgcaggaagagaagaggatggggtcgctcggtttgcgggtgctggccctggcttctgggcccgagctggggcggctgacgtttctcggtcttgtgggcatcattgaccccccgagagttggcgtgaaggaagcagtccaggttctctccgagtctggtgtgtctgtgaagatgataacgggggatgccctggagacggccttggccataggaagaaacatcggcctgtgcaacgggaagctgcaagccatgtccggggaggaggtggacagcgtggagaagggcgagctggccgaccgcgtggggaaggtgtccgtgttcttcaggaccagcccaaagcacaagctcaaaatcatcaaggctctgcaggagtcaggggcgatcgtggccatgactggggatggggtgaacgacgcagtggccctgaagtctgcagacattgggatcgccatggggcagacagggacggacgtcagcaaagaggccgccaacatgatcctggtggatgatgacttctcagccatcatgaatgcagtggaggaaggcaagggtattttttacaacatcaaaaactttgtccgattccagctgagcacgagcatctccgccctgagtctcatcactctgtccaccgtgttcaacctgcccagccccctcaacgccatgcagatcctatggatcaacatcatcatggatgggccaccggcgcagagcttgggggtagagcccgttgacaaagacgccttcaggcagccaccacggagtgtgcgggacaccatcctcagcagagccctcatcctgaagatcctcatgtccgcggccatcatcatcagcgggaccctctttatcttctggaaggagatgcctgaagacagagcaagcactccccgcaccacgacgatgacgttcacttgttttgtgtttttcgatctcttcaacgccttgacctgccgctctcagaccaagctgatatttgagatcggctttctcaggaaccacatgttcctctactccgtcctggggtccatcctggggcagctggcggtcatttacatccccccgctgcagagggtcttccagacggagaacctgggagcgcttgatttgctgtttttaactggattggcctcatccgtcttcattttgtcagagctcctcaaactatgtgaaaaatactgttgcagccccaagagagtccagatgcaccctgaagatgtgtagtggaccgcactccgcggcaccttccctaatcatctcgatctggttgtgactgtggcccctgccgtgtctcctcgtcaggggagacttttaggaggccgcagccttccatcaccggatcagtttttcctcttaggaaagctgcaggaacctcgtgggctccagggacccaggcccacatccatccagcgttcccgctggctgtgggacagacagggaggggcctgtacagaaacaccacactgtttattaaatcacaatgatttttattaaccatgtctaactacgtatctgtgccacagcttgcagtgaggcaggccactcgtggcagatacaaggggctcctgagaggcagtgggtaggatggtcacactctgcccattgccctcctggaggccccatttcctcatcataaaatgagggacttttaaataaagtgctatgccgggggataatt

SEQ ID NO: 182685 - DNA, 2841 bp, Artificial Sequence
  derived and/or modified sequence
atggtggagggcagagtgagcgagttcctgaagaagctgggcttcagcggcggcggcagacagtaccaggccctggagaaggacgaggaggaggccctgatcgacgagcagagcgagctgaaggccatcgagaaggagaagaaggtgaccgccctgccccccaaggaggcctgcaagtgccagaaggaggacctggccagagccttctgcgtggacctgcacaccggcctgagcgagttcagcgtgacccagagaagactggcccacggctggaacgagttcgtggccgacaacagcgagcccgtgtggaagaagtacctggaccagttcaagaaccccctgatcctgctgctgctgggcagcgccctggtgagcgtgctgaccaaggagtacgaggacgccgtgagcatcgccaccgccgtgctggtggtggtgaccgtggccttcatccaggagtacagaagcgagaagagcctggaggagctgaccaagatggtgccccccgagtgcaactgcctgagagagggcaagctgcagcacctgctggccagagagctggtgcccggcgacgtggtgagcctgagcatcggcgacagaatccccgccgacatcagactgaccgaggtgaccgacctgctggtggacgagagcagcttcaccggcgaggccgagccctgcagcaagaccgacagccccctgaccggcggcggcgacctgaccaccctgagcaacatcgtgttcatgggcaccctggtgcagtacggcagaggccagggcgtggtgatcggcaccggcgagagcagccagttcggcgaggtgttcaagatgatgcaggccgaggagacccccaagacccccctgcagaagagcatggacagactgggcaagcagctgaccctgttcagcttcggcatcatcggcctgatcatgctgatcggctggagccagggcaagcagctgctgagcatgttcaccatcggcgtgagcctggccgtggccgccatccccgagggcctgcccatcgtggtgatggtgaccctggtgctgggcgtgctgagaatggccaagaagagagtgatcgtgaagaagctgcccatcgtggagaccctgggctgctgcagcgtgctgtgcagcgacaagaccggcaccctgaccgccaacgagatgaccgtgacccagctggtgaccagcgacggcctgagagccgaggtgagcggcgtgggctacgacggccagggcaccgtgtgcctgctgcccagcaaggaggtgatcaaggagttcagcaacgtgagcgtgggcaagctggtggaggccggctgcgtggccaacaacgccgtgatcagaaagaacgccgtgatgggccagcccaccgagggcgccctgatggccctggccatgaagatggacctgagcgacatcaagaacagctacatcagaaagaaggagatccccttcagcagcgagcagaagtggatggccgtgaagtgcagcctgaagaccgaggaccaggaggacatctacttcatgaagggcgccctggaggaggtgatcagatactgcaccatgtacaacaacggcggcatccccctgcccctgaccccccagcagagaagcttctgcctgcaggaggagaagagaatgggcagcctgggcctgagagtgctggccctggccagcggccccgagctgggcagactgaccttcctgggcctggtgggcatcatcgacccccccagagtgggcgtgaaggaggccgtgcaggtgctgagcgagagcggcgtgagcgtgaagatgatcaccggcgacgccctggagaccgccctggccatcggcagaaacatcggcctgtgcaacggcaagctgcaggccatgagcggcgaggaggtggacagcgtggagaagggcgagctggccgacagagtgggcaaggtgagcgtgttcttcagaaccagccccaagcacaagctgaagatcatcaaggccctgcaggagagcggcgccatcgtggccatgaccggcgacggcgtgaacgacgccgtggccctgaagagcgccgacatcggcatcgccatgggccagaccggcaccgacgtgagcaaggaggccgccaacatgatcctggtggacgacgacttcagcgccatcatgaacgccgtggaggagggcaagggcatcttctacaacatcaagaacttcgtgagattccagctgagcaccagcatcagcgccctgagcctgatcaccctgagcaccgtgttcaacctgcccagccccctgaacgccatgcagatcctgtggatcaacatcatcatggacggcccccccgcccagagcctgggcgtggagcccgtggacaaggacgccttcagacagccccccagaagcgtgagagacaccatcctgagcagagccctgatcctgaagatcctgatgagcgccgccatcatcatcagcggcaccctgttcatcttctggaaggagatgcccgaggacagagccagcacccccagaaccaccaccatgaccttcacctgcttcgtgttcttcgacctgttcaacgccctgacctgcagaagccagaccaagctgatcttcgagatcggcttcctgagaaaccacatgttcctgtacagcgtgctgggcagcatcctgggccagctggccgtgatctacatcccccccctgcagagagtgttccagaccgagaacctgggcgccctggacctgctgttcctgaccggcctggccagcagcgtgttcatcctgagcgagctgctgaagctgtgcgagaagtactgctgcagccccaagagagtgcagatgcaccccgaggacgtgtag

SEQ ID NO: 182686 - protein, 717 aa, Artificial Sequence
  derived and/or modified sequence
MATPAAVNPPEMASDIPGSVTLPVAPMAATGQVRMAGAMPARGGKRRSGMDFDDEDGEGPSKFSRENHSEIERRRRNKMTQYITELSDMVPTCSALARKPDKLTILRMAVSHMKSMRGTGNKSTDGAYKPSFLTEQELKHLILEAADGFLFVVAAETGRVIYVSDSVTPVLNQPQSEWFGSTLYEQVHPDDVEKLREQLCTSENSMTGRILDLKTGTVKKEGQQSSMRMCMGSRRSFICRMRCGNAPLDHLPLNRITTMRKRFRNGLGPVKEGEAQYAVVHCTGYIKAWPPAGMTIPEEDADVGQGSKYCLVAIGRLQVTSSPVCMDMNGMSVPTEFLSRHNSDGIITFVDPRCISVIGYQPQDLLGKDILEFCHPEDQSHLRESFQQVVKLKGQVLSVMYRFRTKNREWMLIRTSSFTFQNPYSDEIEYIICTNTNVKQLQQQQAELEVHQRDGLSSYDLSQVPVPNLPAGVHEAGKSVEKADAIFSQERDPRFAEMFAGISASEKKMMSSASAAGTQQIYSQGSPFPSGHSGKAFSSSVVHVPGVNDIQSSSSTGQNMSQISRQLNQSQVAWTGSRPPFPGQQIPSQSSKTQSSPFGIGTSHTYPADPSSYSPLSSPATSSPSGNAYSSLANRTPGFAESGQSSGQFQGRPSEVWSQWQSQHHGQQSGEQHSHQQPGQTEVFQDMLPMPGDPTQGTGNYNIEDFADLGMFPPFSE

SEQ ID NO: 182687 - protein, 705 aa, Artificial Sequence
  derived and/or modified sequence
MASDIPGSVTLPVAPMAATGQVRMAGAMPARGGKRRSGMDFDDEDGEGPSKFSRENHSEIERRRRNKMTQYITELSDMVPTCSALARKPDKLTILRMAVSHMKSMRGTGNKSTDGAYKPSFLTEQELKHLILEAADGFLFVVAAETGRVIYVSDSVTPVLNQPQSEWFGSTLYEQVHPDDVEKLREQLCTSENSMTGRILDLKTGTVKKEGQQSSMRMCMGSRRSFICRMRCGNAPLDHLPLNRITTMRKRFRNGLGPVKEGEAQYAVVHCTGYIKAWPPAGMTIPEEDADVGQGSKYCLVAIGRLQVTSSPVCMDMNGMSVPTEFLSRHNSDGIITFVDPRCISVIGYQPQDLLGKDILEFCHPEDQSHLRESFQQVVKLKGQVLSVMYRFRTKNREWMLIRTSSFTFQNPYSDEIEYIICTNTNVKQLQQQQAELEVHQRDGLSSYDLSQVPVPNLPAGVHEAGKSVEKADAIFSQERDPRFAEMFAGISASEKKMMSSASAAGTQQIYSQGSPFPSGHSGKAFSSSVVHVPGVNDIQSSSSTGQNMSQISRQLNQSQVAWTGSRPPFPGQQIPSQSSKTQSSPFGIGTSHTYPADPSSYSPLSSPATSSPSGNAYSSLANRTPGFAESGQSSGQFQGRPSEVWSQWQSQHHGQQSGEQHSHQQPGQTEVFQDMLPMPGDPRNEWWSPHSRQHFRQPISYARM

SEQ ID NO: 182688 - protein, 706 aa, Artificial Sequence
  derived and/or modified sequence
MASDIPGSVTLPVAPMAATGQVRMAGAMPARGGKRRSGMDFDDEDGEGPSKFSRENHSEIERRRRNKMTQYITELSDMVPTCSALARKPDKLTILRMAVSHMKSMRGTGNKSTDGAYKPSFLTEQELKHLILEAADGFLFVVAAETGRVIYVSDSVTPVLNQPQSEWFGSTLYEQVHPDDVEKLREQLCTSENSMTGRILDLKTGTVKKEGQQSSMRMCMGSRRSFICRMRCGNAPLDHLPLNRITTMRKRFRNGLGPVKEGEAQYAVVHCTGYIKAWPPAGMTIPEEDADVGQGSKYCLVAIGRLQVTSSPVCMDMNGMSVPTEFLSRHNSDGIITFVDPRCISVIGYQPQDLLGKDILEFCHPEDQSHLRESFQQVVKLKGQVLSVMYRFRTKNREWMLIRTSSFTFQNPYSDEIEYIICTNTNVKQLQQQQAELEVHQRDGLSSYDLSQVPVPNLPAGVHEAGKSVEKADAIFSQERDPRFAEMFAGISASEKKMMSSASAAGTQQIYSQGSPFPSGHSGKAFSSSVVHVPGVNDIQSSSSTGQNMSQISRQLNQSQVAWTGSRPPFPGQQIPSQSSKTQSSPFGIGTSHTYPADPSSYSPLSSPATSSPSGNAYSSLANRTPGFAESGQSSGQFQGRPSEVWSQWQSQHHGQQSGEQHSHQQPGQTEVFQDMLPMPGDPTQGTGNYNIEDFADLGMFPPFSE

SEQ ID NO: 182689 - protein, 566 aa, Artificial Sequence
  derived and/or modified sequence
MATPAAVNPPEMASDIPGSVTLPVAPMAATGQVRMAGAMPARGGKRRSGMDFDDEDGEGPSKFSRENHSEIERRRRNKMTQYITELSDMVPTCSALARKPDKLTILRMAVSHMKSMRGTGNKSTDGAYKPSFLTEQELKHLILEAADGFLFVVAAETGRVIYVSDSVTPVLNQPQSEWFGSTLYEQVHPDDVEKLREQLCTSENSMTGRILDLKTGTVKKEGQQSSMRMCMGSRRSFICRMRCGNAPLDHLPLNRITTMRKRFRNGLGPVKEGEAQYAVVHCTGYIKAWPPAGMTIPEEDADVGQGSKYCLVAIGRLQVTSSPVCMDMNGMSVPTEFLSRHNSDGIITFVDPRCISVIGYQPQDLLGKDILEFCHPEDQSHLRESFQQVVKLKGQVLSVMYRFRTKNREWMLIRTSSFTFQNPYSDEIEYIICTNTNVKQLQQQQAELEVHQRDGLSSYDLSQVPVPNLPAGVHEAGKSVEKADAIFSQERDPRFAEMFAGISASEKKMMSSASAAGTQQIYSQGSPFPSGHSGKAFSSSVVHVPGVNDIQSSSSTGQNMSQISGS

SEQ ID NO: 182690 - DNA, 6576 bp, Artificial Sequence
  derived and/or modified sequence
gcggccgcggcggcggggagagcggagggagcgccgcccgcccgcgccgtcctttgtgtggcggcggcggcgcctgggcctgaccgggtccccggggctgagcgccgggctccgcgccgcccctcccgcgcccctgccaagcgggcgcctatcctctccgagcaagatggcaaccccggcggcggtcaaccctccggaaatggcttcagacatacctggatctgtgacgttgcccgttgcccccatggcggccaccggacaggtgaggatggcgggggccatgcctgcccgtggaggaaagcggcgttccggaatggacttcgatgatgaagatggtgaaggccccagtaaattttcaagagagaatcatagtgaaatcgaaaggcgcagacggaacaagatgactcagtacatcacggagctctccgacatggtccccacatgcagcgcactggctcggaagccagacaagctcaccatcctccgcatggccgtctcgcacatgaagtccatgaggggtacagggaacaagtccaccgatggcgcgtacaagccttccttcctcacagagcaggaactgaagcatctcatccttgaagcagctgatggatttctgtttgtggtggctgctgagacagggcgagtgatttatgtgtctgactccgtcacccctgttctgaaccagccccagtcagagtggtttgggagcacactgtatgaacaggtgcatcctgatgacgtggagaagctgagagagcaactgtgcacctcagaaaactcaatgacaggccggatcttggacctgaagactgggacggtcaagaaagaagggcagcagtcatccatgaggatgtgcatgggctcgcggcggtctttcatctgcaggatgaggtgtggaaatgctcctttggaccaccttcctctaaacagaataaccaccatgaggaaaaggttcaggaatggccttggccctgtgaaagaaggagaagcccaatatgctgtggtccactgtacaggatacatcaaggcctggccaccagcaggaatgaccatacctgaagaagacgctgatgtgggacaaggcagtaaatattgcctcgtggcaattgggagactccaggtgaccagctctcctgtatgcatggacatgaatgggatgtcggtgcccacagagttcttatcccggcataactccgatggaatcatcacatttgtggatccaagatgtatcagtgtgattggctaccaaccccaggatcttctgggaaaggacattttggaattctgccaccctgaggatcaaagccatctgcgtgagagcttccagcaggtggttaagctgaaaggccaagtcctgtcggtcatgtatcgatttcgcaccaagaaccgggagtggatgttgatccgcaccagcagcttcacattccagaatccctattctgatgagattgagtacatcatctgcaccaacaccaacgtcaagcaacttcagcaacagcaggcagaattggaagtgcaccagagagatggattgtcatcgtatgacttatcccaggtccccgtccccaacctaccagccggtgttcatgaggccgggaagtccgtggaaaaggcggatgcaatcttctcccaggaaagagatcctcggtttgctgaaatgtttgcaggaattagtgcatcggagaagaagatgatgagctcagcctctgcagcaggaacccagcagatctactcccaaggaagcccatttccctctggacactccgggaaggccttcagctcttcagtggttcatgtgcctggagtgaatgatattcagtcctcttcttccacgggccagaacatgtcccaaatctcccggcagctaaaccagagtcaggtggcatggacagggagtcgtccgccctttccgggacagcaaatcccatctcagtccagcaagactcagtcatctccctttgggattggaacgagccacacctacccggcagacccctcttcctacagccccctctccagcccagctacctcctcgccaagtgggaatgcctactccagtcttgccaacaggactccagggttcgctgaaagtggacaaagtagcgggcagttccaagggcggccctcggaagtctggtcgcagtggcaaagccagcaccatggccagcagagcggtgagcagcactcccaccagcagcccggtcagactgaagtgttccaggacatgctgcccatgccaggagatccaacccaggggactggcaactataacatcgaagactttgccgacctgggcatgtttccaccgttttctgagtagctgcggccagagtgaggctcctgctgtacagtgccacccatactgtgatgtcgatgcccatgtgaatgaggcccaccctcgccctgcttgccctgccgcaggccccccaccagaagccatctcccccgctgtgtgtccccaggcgcatcattgctccactctcccctgcagccgcggctgctcggccactgaccaggggccctggcagacattaggggatcagttgtatttattgtattttatctgtgtgtgctcaggaggtgagcctagtgggtccttaagtttggttgtgaataatctcttgatagacaatttatacccatgaaagttcagccaatgcccagagtgaccaagcagcaccagcaggcctgcccaggatgctgaaagcagatttcttcttgatttcacttctgatggatgcatggggctctgggggaatgctgggaaaatgggcaagcagagtgcacagccctcgttctgccagctggagccaagaagcacagagacacagaggcgcctgcccctcagctccgctggtctgtctgtgcatccactgtgccgtgggacatatgtaatttgtgcagtgtgacatggacttgctgtcctaatggatgtgttgtgccttgtgtctgtcatgtgtggccagcgtgattgtatagaatccagagtatgtagagagccaaaatgtgtggccctgtccccaagctcagcaccaccggccatgaccagaggttgctcggcccagggtctgggagctgggctaacaggctgacacttcggcagggtcaccaggaggcacagctaggggcatgctcacatgggtaggtcagttctttggtccaagcctctggtgcagattcaagctcctcctcttagaggaagcagctccttcctcccacaggagccccaagggagcactcaccctcctcccaattggatctgaatagctgtgttcctgatcccacataagcatgtctcatccttgccccactggtgagaggaggaccttgtgcctgcccagagcctgcaggacagcacgccttgaggtcagaggcctggcccttctttacagatgtagatagcagggtaggacgcccaggccttctcacatgggcaccatgaaacactttcttccaggccacctgagccttcgttcttcagcccgactggaggaacagcagctctgggaggcacagagtgcaggtctcaggggcagaagacatgggttccagttctggttctgccacacacccaccggccttgaatttctctggtggtctcaagacaagaacaagagctgactctagaatcttctgcctggctgacctctgagcccatgatccctggcttgctgtgcttctcttggatttgaggagagtttatgaatccatccccctgttttcagggacctctgccttctcccacaccccttacactagtgaggactccttcggcctcttgtgtttccttccttttgtgaccattacgccccctccctgtttcttatcaccagcccatcagcccactgactcccatatggtagaaaaggtaccgtggctgctgcagggcacatggagggacctaccctctgggaaagcccttgtgtccctcccagagtccttcaggtaggccctcgcagatgctgcttgctcagaaacaacccgtgcatccctgcccatggattctgcaggacctagaagagtggcattggttctaggaacctgagagtggagtgaggccagcatgcaggaaggagtttggagagagtgtttgctgtgatccattgaaagctccacattaaaccccagccctgtctggccagggagatccatgtgctcaatgttgctgggggacctacaaaagtcaaacattgctcagtaaaatgcctttggctggtcgccagctgtgcatgactgcagttcctagactctaacttaaccccaactttgcagtttctagagctttttgtctgtaatggtgattgggtctccactgtagatgcatgcagtgttcactccaacctcagaggctttcttgcttctggggaaatggcaggtggttgaaaccctgcacatcctcccagggccagccccagaatgggcctttctctgcctgccctgcccttggggccacctctgcctccagcaggcttgagcttgccccaggccttgggcataattatttccccccaaaaaaggcacaaaaataggttttggatcaaagaagtgtttctcagtgaaatgaaaacagtctttttatagcctttagcttgtgagtttggaagtttggggggtcttatgtttgttttgcctcttctgtttcttggaggagagttgaggcttttcttaggtgcatacacagacccaggtgaacacgctgactgtgaacctgccctgtatccggagctgtgctgggcactgaggggatgcaacaaaattaggagaggatccttgctcccaacgtctacttctcctacctcaacaggggtccagggtgcagtgaactcagttcttggcccttgggtgaggattcatggatgaatgaaagctagacctgatggggaggcattatgactaaataggcccagcctccttcccttccagctctgtcctaggagcataggcgggaaatctgagtagagtctgactgcagtttttgcttatgatttgtaaaagccgtcatggggtcaataagaaaataggggtgatggagggggagaagcccaggactgggagaatcgcacatgccccaggggttttcaccaaggattttcaagacaaactggagtaagaattaaagccccagaggatttaattatcctggtttgcaaaagagcctcccatgccagtaccgcccagccttggaggccggaatgctcatggcccctgtggtctgcttgtccttcagcccatgcccagcagatacctctctgactggagacgggctcaaagctggattagaaaggggagaggcacttgtgactttgtttgactctgtgactcacttcctcgctcacaccttgtttgaactactggactttcaactggctttccttaggtcaggcaagcagacagctccccactgaagaggtctgtacagtgacaacccgggccggcagcaaggacacagatgcagccacagtaaggctccatcaggactgggtcagtgatggcaacaggatggccaaggatggctctagaacactctgtccatgcgtcactccccccagttttatttttagctttggcttcagggagtgacagccatcacaaatagccacattctgctctactctccaacataccagattctacactgttgttatttcatgagacgtgaatgttgcagagagtggggggattctggttgttaaggaacttacactggggagctttactcttccgtgtcaacaatgtgactacatgttctccagattagccacacatgcaaacatcagtgtccttctagctttagccgagaaagaaaccagtcccagggaatgaatggtggtctccccactcccggcagcactttaggcagcccataagctatgcgagaatgtgaacgctcaccttgctccgtcacggttctgacctaccacataaacaggaagaagccagtgaccggaacagctctaggaataacaagtcagaatagaagtgtcctttatattaccagaaaatatgggcttggcctaagtcgctgtctcctaacctgccggggtcattccccaccaaacaccccatactaaggagccatgagccacctggacattcaccttttctttgaccatctggagtctggggcaacttaaggaggcaccacacagtggtgcaggcacatttccaagcgtaggtgtccctggcttttgtggccaaagctagtgttatggtcaacaacaggccagggtctgtggggcactgaccttgaaagtggcaaaatggaggtttcacaggctgtgcgggagcaggacggcttgcttcatctaacaatctcagtttcctttaaaaaaagaaagaaaggaaaagatttcataagcaggtgtcagtggacagtttaagtacttaaccatttctctttcttcttatggatgtgaactgtgctgtggataaatcatttgtatttcttgaatgttctctatgactaacagttattaagtcggttgtgtatatgtgtaactaatgtaactgccttttaaaatttcattacaataaaaatgactttgctctgaacaacaaaaaaaaaaaaaaaaaaaa

SEQ ID NO: 182691 - DNA, 2154 bp, Artificial Sequence
  derived and/or modified sequence
atggctacccctgccgccgtaaatcctcccgaaatggcatctgatatacctggatcagtcaccttacctgtagctccaatggctgctacaggccaggtgagaatggccggggccatgcccgctagagggggcaagagaaggtctgggatggactttgacgacgaggatggcgaagggcccagtaaattttcaagggaaaaccacagcgagatcgaacgtcgcagaagaaataagatgactcaatacatcaccgagctttcagacatggtgcctacatgttcggccctcgcgagaaagccagataagctaacaatcctgcggatggctgtgagccatatgaagagtatgcggggtaccggcaacaagtcgaccgatggtgcctataagcccagctttctcaccgagcaggagttgaaacacttaatactcgaggctgccgacggatttctgttcgtggtagctgcggagactggaagggtgatttacgtgagtgatagtgtgactcctgtgcttaaccagcctcagagtgagtggtttggatcgaccttatatgaacaggtgcaccctgatgatgtcgaaaagttacgggagcagttgtgcactagtgagaattctatgaccgggaggattctcgatctcaagacagggactgttaagaaagaagggcaacagtccagcatgaggatgtgcatgggctctcgccgcagttttatctgtagaatgcggtgtggcaacgctcccttggaccatctacccctgaatcgcataaccaccatgagaaagcgcttcaggaatgggctgggccctgttaaggaaggagaggctcagtatgcagtggttcattgcactggctatattaaggcctggccccccgccggtatgacaatcccagaggaagacgcagatgtgggccagggcagcaagtactgtctggtcgcgataggtcgactgcaagttacctcctcgcccgtgtgcatggacatgaatggcatgtcagtacccactgaattcctatctcggcacaacagtgacggaattatcacttttgtggatccccggtgtattagcgttatcgggtaccaaccacaagatctactagggaaggacattctcgagttttgccatccggaggatcagagccatttgagagaaagtttccagcaagtggtgaagctgaagggacaggtgttgtctgtcatgtacagattcagaacaaagaacagagagtggatgcttatcaggacctctagttttacgttccagaatccttatagcgatgaaatcgaatatataatctgtaccaacactaacgtgaagcagttgcagcaacaacaggccgaactagaggtgcaccagagggacgggctctcgagctacgatctgagccaggtgccggtgcccaatctgcctgcaggcgtccacgaagcaggtaaaagcgtggagaaggccgacgccatcttctcacaggaacgggacccacgtttcgctgagatgtttgccgggatctcggcctccgaaaaaaagatgatgtcttccgcctccgctgctggcacacagcagatctattctcaggggtccccctttccctcgggccacagcggcaaggctttttcatctagcgtggtgcatgtccccggcgtgaacgacattcaaagctcaagctccactgggcagaatatgagccagatttcacggcagctgaaccagtcccaggtcgcttggacggggtctcgccctccatttccggggcagcagataccttctcagagtagtaagacccagagtagtcctttcggaattggcacgagccacacctacccggccgaccccagcagctattccccacttagcagtccggctacttccagcccctcgggtaacgcatactctagccttgccaatcgaactccgggttttgcagagtcgggccagagcagtggacagttccaggggaggccttcagaagtatggtctcagtggcaatctcagcatcacgggcagcaaagcggagagcagcacagtcaccaacagcccggacagacagaggtgttccaggacatgcttcctatgcctggagacccaacccagggcactggcaactacaatatcgaggatttcgcggaccttggcatgtttccgcctttctcggaatag

SEQ ID NO: 182692 - DNA, 2118 bp, Artificial Sequence
  derived and/or modified sequence
atggccagcgacatcccaggaagcgtcacacttccagtggctcctatggcagccacagggcaggtgaggatggctggcgctatgcctgctaggggcgggaagcggaggagcggtatggactttgatgacgaggacggcgaaggccccagtaagttctcacgcgaaaaccactcagaaatcgaacgacggcggcgaaacaagatgacccagtatatcactgaactgtcagatatggttccgacctgcagtgctctcgctcgcaagcctgacaagctgaccatacttcgcatggccgtgtcccacatgaagtcgatgagggggacaggaaataagagtacagacggagcatacaaaccaagttttttgaccgaacaggagctgaagcatctgatcttagaagccgccgatggcttcctttttgtagtagccgccgagactggacgggttatctatgtatccgacagcgttaccccagtcctgaatcagccccagtccgaatggtttggaagcacactgtacgagcaggttcaccccgacgacgtggagaaattacgcgagcagctttgcacctccgagaactcaatgacaggtaggatcctcgacttaaagacggggacagtaaaaaaagagggacaacagagctcgatgcgcatgtgtatgggctctcgccgctcattcatatgtagaatgagatgtgggaatgctcctctagatcacctgccattgaaccgtataacgaccatgcggaagcgcttccgcaacgggttgggacctgtcaaggagggggaggcgcagtatgctgtggtgcattgtacgggatacattaaagcatggccgcccgccggaatgaccatacctgaagaggatgctgacgttgggcaggggagcaaatactgtctggtcgctattggccgacttcaggtgacatctagtcccgtctgtatggacatgaacgggatgtctgtgcccactgagtttctctccaggcacaactccgacgggattatcacgttcgtggacccgaggtgcattagcgtgattggctatcagccacaggatctgctcggcaaggatatcctggagttttgccatcccgaagaccagtcgcaccttagagaatcatttcagcaggttgttaaacttaaggggcaagttttaagtgttatgtatcgattccgaactaagaaccgggagtggatgctgatcaggacctcttcctttaccttccaaaacccttatagcgatgagatcgaatatatcatctgtaccaatacaaacgtgaaacagctgcagcagcagcaagccgagcttgaggtgcaccaacgcgacgggctgtcttcgtacgacctctcccaagtgcctgtgcctaatcttccggcgggagtacatgaggctggtaagagcgttgaaaaagccgacgccatcttcagccaggaacgggaccctagattcgctgagatgtttgcaggtattagcgctagtgagaaaaaaatgatgagcagcgctagtgccgccggtacacagcagatatactcccaaggctcaccctttcctagcgggcacagcgggaaggcattctcatcttcggttgttcatgtacctggcgtcaacgatattcagtcttcttccagcaccgggcaaaacatgtcccagatctctcgccagcttaaccagtcccaggtcgcctggaccgggtcgcggccaccgttccctgggcaacagattcctagccaaagtagcaagacccaatcttccccttttggaatcgggaccagccacacataccctgcagatccttcgagctactccccccttagctctccggccacatctagccccagtggtaatgcatacagttcattggctaacaggacaccagggtttgcagaatccgggcaaagttcgggccagtttcagggacgacctagtgaggtgtggtcacagtggcagagccagcatcacggccaacagtcgggcgaacagcattcccaccagcaacccggccagaccgaggtgtttcaagacatgctccctatgcctggtgatccccgtaatgaatggtggtccccgcacagccgccagcacttccgccaaccaatctcctacgcccggatgtag

SEQ ID NO: 182693 - DNA, 2121 bp, Artificial Sequence
  derived and/or modified sequence
atggcctccgatattccaggtagcgtcaccctccccgtcgcaccgatggcggccactgggcaagtacgaatggccggcgcaatgccagcaaggggaggcaagcgcaggagcggcatggacttcgatgatgaggatggggagggcccatccaaattttcacgcgaaaaccattcagaaatcgaacgacgcaggcgcaataagatgacccagtatatcaccgaattgtccgacatggtcccaacttgtagcgccctggctaggaagcccgacaagctcacaatcttgcgcatggccgtgtcgcacatgaagtccatgaggggtacgggaaacaagtccacagacggcgcttataagccctctttccttactgaacaggaactcaagcacctgatccttgaggccgcagatggctttctgtttgtggtcgccgcagagactggaagggtaatttacgtgtctgatagcgtaactcctgtactcaaccagcctcagtctgagtggtttggctcaacactttatgaacaggtgcatccagacgacgtggagaaactacgggagcaactttgcacatcagagaacagcatgacaggacggatcctagacttaaagaccggcacagttaaaaaagagggccagcagagttccatgcgcatgtgtatgggctcccggcgaagttttatctgcaggatgcgctgtgggaacgctccactagatcacctgcccctgaaccgaattactaccatgcgtaagcgattccgcaatgggctcggccctgttaaggagggggaagcacaatatgcggtcgtccactgcacgggatatatcaaggcctggcccccagccggcatgacaattcctgaggaagacgccgatgtcggccaagggtctaagtactgtcttgtggcaattggccggctgcaggtgacaagttctcccgtctgtatggatatgaacggaatgtccgtacccacagaattcctgagcagacataacagtgatgggataatcaccttcgttgatccgcgatgtattagtgtaatcggctaccaaccccaggacttgttaggtaaagatatccttgaattttgtcatccagaagaccaaagccacctgcgtgagagcttccagcaggtagtgaagctgaaaggccaggtcctgagtgtcatgtatcgctttcgcaccaaaaaccgggaatggatgttaatccggacttcttctttcacgttccagaacccttactctgatgagatcgagtatatcatttgcactaatactaatgtgaagcagttgcagcaacagcaggcggaactcgaagtacaccaacgggacggactctcttcatacgacctttcccaagtgccagtgcctaacttgcctgctggggtccatgaggcagggaaatcagtggaaaaggcagacgccatattctcccaggaacgtgacccccggttcgctgagatgttcgctgggattagtgcttctgaaaagaaaatgatgtcctcagccagtgctgctggaactcagcagatatacagccaggggtctcccttcccttccggacactccgggaaagcattcagtagcagcgtggtccatgtgcctggcgtgaatgacatccaatctagcagctcaactggccagaatatgtcacagatcagcaggcagctcaatcagtcacaggtggcctggacaggcagccgccccccatttccaggtcagcagatcccaagtcagagctccaaaactcagagcagcccatttgggattggcacctcccatacttaccctgccgatccatcgtcttatagtccactgtcatctcctgccacatcttcccccagtggcaacgcgtacagtagcctggctaaccggacccctgggtttgcagagtctggccaaagcagtgggcaatttcagggtcggccatcagaggtatggtcacagtggcagagccagcatcacggccagcagtccggcgagcagcacagccatcagcagcctgggcagacagaggtgtttcaggatatgttacctatgcctggagacccaactcagggtactggtaattacaacatcgaggactttgccgacctcggaatgtttcccccgttttccgagtag

SEQ ID NO: 182694 - DNA, 2121 bp, Artificial Sequence
  derived and/or modified sequence
atggctagcgatattcctggtagcgttacattgcccgtcgcgcctatggcggccaccgggcaggtgagaatggcaggcgccatgcctgcccgcgggggaaaacgcaggagcgggatggatttcgatgacgaggatggcgaagggcctagtaagttttcccgcgagaatcattccgaaatcgagcgtagaaggcgaaataaaatgactcagtacataacagaactgagcgacatggtgcctacctgcagcgctctggcccggaaaccggacaaattgacaatactgcgcatggcagtcagccatatgaaaagcatgcgggggaccggaaacaaatctactgacggcgcctataaacctagctttctgacagaacaggagctcaagcacctcatcctggaggctgcagatggatttttattcgtagtagccgctgagacagggagggttatttacgtgtcggactcagtgaccccagttttaaaccagcctcaaagcgaatggttcggctccaccctttatgagcaggtacaccctgacgacgtcgaaaagctgagagagcagctatgcacaagtgaaaattccatgactggcagaatcctggaccttaagaccggcaccgtaaagaaggaaggccagcagagttcaatgaggatgtgtatgggctcaagacgatctttcatatgcagaatgcgttgtggaaacgccccacttgatcatctgccactgaaccgtatcaccaccatgagaaaaagattcagaaatggcctgggccccgtcaaagagggagaggcccaatacgcggtcgtgcattgcacaggctatatcaaggcatggccgcccgccggcatgaccattcccgaggaggacgccgatgtgggtcaaggttccaagtattgcctggtagccatcggccgcttgcaggttacttccagccccgtctgtatggatatgaacggtatgagtgtaccaacagagtttctgagcagacataatagtgacggcatcatcacgttcgtggaccctagatgtatcagtgtgatcggctatcaaccccaagaccttctgggaaaagacatccttgagttttgccacccagaggaccagtctcacctgagggaatccttccagcaagtagtgaaactcaagggccaagttctctcggtgatgtatcgctttcgtactaaaaaccgagaatggatgttaatacggacgagctccttcacctttcagaatccatattccgatgagatcgaatatatcatctgcaccaatactaacgtgaaacagctccaacagcagcaggccgaactagaggtccaccagagagatgggctctcgtcttatgatcttagtcaggtacctgtgccaaacctgccggccggcgtgcacgaggctgggaagtccgtggaaaaggccgacgccattttctcccaggaacgcgatccaagatttgctgaaatgtttgcaggtataagcgcatcagaaaagaaaatgatgagctcagcatctgcagctggaacacaacagatctacagccaggggagtccatttccttcaggacactctgggaaagcgttcagctcctctgtggtccatgtacctggggttaatgacatccagagtagttcaagcaccggtcaaaatatgtcacagatttccagacagctaaaccagagccaggtggcctggaccggatctcgccccccgttcccaggacagcaaattccatcacagtccagtaaaacacagtctagtccttttggaatagggacgtcacacacctacccagctgatccttcttcatattccccactgtccagtcccgccacctctagcccctcaggtaatgcttatagttcgttggccaatcggactcctggttttgcggagtcgggccagtcttccggacagttccagggtcgaccatcagaggtgtggagccagtggcagtctcaacatcatggccagcaatccggggagcagcacagccatcaacagcccggacagacggaagtgttccaggatatgctgcctatgccaggcgaccctacccagggcaccggaaattataatatcgaagactttgcagatttgggaatgttcccgccattctcggagtag

SEQ ID NO: 182695 - DNA, 1701 bp, Artificial Sequence
  derived and/or modified sequence
atggccactcctgccgctgtaaatcctcccgagatggcgtctgatattcctggctctgtgaccctgccggtcgccccgatggcggccacaggacaggtgcgcatggctggggctatgcccgctcggggtgggaaacgccgatccggcatggacttcgatgacgaggatggcgagggaccaagcaaattctctcgagagaaccatagcgaaattgaacggaggcgcaggaacaaaatgactcagtacataactgagttgtccgatatggtgcctacatgctccgcacttgctcgtaagcccgataagctgaccattctgcgcatggcagtctctcatatgaaatccatgcgtgggactggaaataaaagtaccgatggagcctataaaccaagtttcttaaccgagcaggaacttaaacatctgattctcgaagcagccgatggcttcctgtttgtggtggctgcagaaacaggaagggtgatttacgtctcagactctgttacaccagttctgaatcagccccaatccgaatggtttggttcaactctctacgagcaggtgcatcctgacgatgtggaaaaactgagagaacagttatgcacatctgaaaactccatgacggggcggatcttagatctgaagaccggaacagtcaaaaaagaaggacagcagtcgagcatgagaatgtgcatgggctccaggcgtagctttatctgtcgcatgaggtgtggcaatgctcccttggaccacctgcccttgaatcggattaccactatgcgtaagcgctttaggaacggattggggcccgttaaagagggcgaggcccagtacgcggtcgtgcactgcacgggctacataaaagcttggcctccagcaggtatgacaattccagaggaggacgccgatgtcggtcagggcagtaaatattgtctggtagccatcggtaggttgcaggtaactagcagccccgtgtgcatggatatgaatggcatgtccgtgcctacagaattcctctcacgtcacaattcagatgggattatcacattcgtggatcctaggtgtatctccgtgattggctaccaacctcaggatcttttagggaaagacatcctggagttctgtcaccctgaagaccagagtcacctgagagagagttttcagcaggtcgtaaagctgaaggggcaggtgctcagcgtcatgtacagatttcgtactaagaacagagagtggatgttgatcaggacatcctcctttactttccaaaacccctattctgatgaaatcgagtatataatctgtactaatactaacgtgaagcagctgcagcaacagcaggccgagctggaagtgcaccagagagacgggttatcgagctacgatctctcccaggtgccggtcccaaatctgcccgccggggtgcacgaggctggcaaatccgttgaaaaagctgacgctatcttttcacaagagcgcgatcctcgcttcgccgagatgttcgctggcatctctgccagtgagaagaaaatgatgtcatccgcttccgcagccgggactcagcagatttacagccagggatcaccattcccgtcaggccattctggtaaagcgtttagctcctccgtcgttcacgtaccgggcgtgaatgatattcagagcagctcctcaacgggccagaacatgtcccaaatctccggatcctag

SEQ ID NO: 182696 - DNA, 2154 bp, Artificial Sequence
  derived and/or modified sequence
atggccaccccagctgctgtgaaccccccagagatggccagtgacatccctggctctgtgaccctgcctgtggcccccatggccgccaccggccaggtgaggatggccggggccatgcctgcccggggcggcaagaggaggagcggcatggactttgatgatgaagatggagagggccccagcaagttcagccgggagaaccacagcgagattgaaagaagaagaagaaacaagatgacccagtacatcacagagctgagtgacatggtgcccacctgcagcgccctggccaggaagccagacaagctgaccatcctgaggatggctgtgagccacatgaagtccatgaggggcactggaaacaagagcacagatggagcctacaagcccagcttcctgacagagcaggagctgaagcacctgatcctggaggccgcagatggcttcctgtttgtggtggccgctgagaccggccgggtcatctacgtgtctgacagcgtgacccctgtgctgaaccagccccagagcgagtggtttggcagcaccctgtatgagcaggtgcacccagatgatgtggagaagctgcgggagcagctgtgcaccagtgaaaattccatgacaggccgcatcctggacctgaagacaggaacagtgaagaaggagggccagcagagctccatgaggatgtgcatgggcagccgccgctccttcatctgcaggatgagatgtggaaatgcccccctggaccacctgcccctgaaccgcatcaccaccatgaggaagcgcttcagaaatggcctgggccctgtgaaggagggggaggcccagtatgctgtggtgcactgcaccggctacatcaaggcctggcccccagctggcatgaccatcccagaagaagatgctgatgtgggccagggcagcaagtactgcctggtggccatcggccgcctgcaggtgaccagcagccctgtgtgcatggacatgaatggcatgtctgtgcccacagagttcctgagccgccacaacagtgatggcatcatcacctttgtggacccccgctgcatcagcgtcatcggctaccagccccaggacctgctgggcaaggacatcctggagttctgccaccctgaggaccagagccacctgcgggagagcttccagcaggtggtgaagctgaagggccaggtgctgtctgtgatgtaccgcttccgcaccaagaaccgggagtggatgctgatccgcaccagcagcttcaccttccagaacccctacagtgatgaaattgagtacatcatctgcaccaacaccaacgtgaagcagctgcagcagcagcaggccgagctggaggtgcaccagagagatggcctgagcagctatgacctgagccaggtgcctgtgcccaacctgcctgctggggtgcatgaggccggcaagtctgtggagaaggcagatgccatcttcagccaggagcgggaccccaggtttgctgagatgtttgctggcatcagcgccagcgagaagaagatgatgagcagcgccagcgctgctggcacccagcagatctacagccagggcagccccttccccagcggccacagcggcaaggccttcagcagctctgtggtgcacgtgcctggggtgaatgacatccagagcagcagcagcacaggccagaacatgagccagatcagccggcagctgaaccagagccaggtggcctggacaggcagcaggcctcccttccctggccagcagatccccagccagagcagcaagacccagagcagccccttcggcatcggcaccagccacacctacccagctgaccccagcagctacagccccctgagcagccctgccaccagcagccccagcggaaatgcctacagcagcctggccaacagaacacctggctttgctgagagcggccagagcagcggccagttccagggccggcccagcgaggtgtggagccagtggcagagccagcaccacggccagcagagcggggagcagcacagccaccagcagcccggccagacagaggtgttccaggacatgctgcccatgcctggggaccccacccagggcaccggcaactacaacatcgaggactttgctgacctgggcatgtttcctcccttcagcgagtag

SEQ ID NO: 182697 - DNA, 2118 bp, Artificial Sequence
  derived and/or modified sequence
atggccagtgacatccctggctctgtgaccctgcctgtggcccccatggccgccaccggccaggtgaggatggccggggccatgcctgcccggggcggcaagagaagaagtggcatggactttgatgatgaagatggagagggccccagcaagttcagccgggagaaccacagcgagattgaaagaagaagaagaaacaagatgacccagtacatcacagagctgagtgacatggtgcccacctgcagcgccctggccaggaagccagacaagctgaccatcctgaggatggctgtgagccacatgaagtccatgaggggcaccggcaacaagagcacagatggagcctacaagcccagcttcctgacagagcaggagctgaagcacctgatcctggaggccgcagatggcttcctgtttgtggtggccgctgagaccggccgggtcatctacgtgtctgattctgtgacccctgtgctgaaccagccccagagcgagtggtttggcagcaccctgtatgagcaggtgcacccagatgatgtggagaagctgcgggagcagctgtgcaccagcgagaacagcatgacaggccgcatcctggacctgaagacaggcaccgtgaagaaggagggccagcagagctccatgaggatgtgcatgggcagcagaagaagcttcatctgcaggatgagatgtggaaatgcccccctggaccacctgcccctgaaccgcatcaccaccatgaggaagcgcttcagaaatggcctgggccctgtgaaggagggggaggcccagtatgctgtggtgcactgcaccggctacatcaaggcctggcccccagctggcatgaccatccctgaggaggatgctgatgtgggccagggcagcaagtactgcctggtggccatcggccgcctgcaggtgaccagcagccctgtgtgcatggacatgaatggcatgtctgtgcccacagagttcctgagccgccacaacagtgatggcatcatcacctttgtggacccccgctgcatctctgtgattggctaccagccccaggacctgctgggcaaggacatcctggagttctgccaccctgaggaccagagccacctgcgggagagcttccagcaggtggtgaagctgaagggccaggtgctgtctgtgatgtaccgcttccgcaccaagaaccgggagtggatgctgatccgcaccagcagcttcaccttccagaacccctacagtgatgaaattgagtacatcatctgcaccaacaccaacgtgaagcagctgcagcagcagcaggccgagctggaggtgcaccagagagatggcctgagcagctatgacctgagccaggtgcctgtgcccaacctgcctgctggggtgcatgaagctgggaagtctgtggagaaggcagatgccatcttcagccaggagcgggaccccaggtttgctgagatgtttgctggcatcagcgccagcgagaagaagatgatgagcagcgccagcgctgctggcacccagcagatctacagccagggcagccccttccccagcggccacagcggcaaggccttcagcagctctgtggtgcacgtgcctggggtgaatgacatccagagcagcagcagcacaggccagaacatgagccagatcagccggcagctgaaccagagccaggtggcctggacaggcagccggccccccttccctggccagcagatccccagccagagcagcaagacccagagcagcccctttggaattggcaccagccacacctacccagctgaccccagcagctacagccccctgagcagccctgccaccagcagccccagcggaaatgcctacagcagcctggccaacagaacacctggctttgctgagagcggccagagcagcggccagttccagggccggcccagcgaggtgtggagccagtggcagagccagcaccacggccagcagagcggggagcagcacagccaccagcagcccggccagacagaggtgttccaggacatgctgcccatgcctggggaccccagaaatgagtggtggagcccccacagccggcagcacttccggcagcccatctcctatgccaggatgtag

SEQ ID NO: 182698 - DNA, 2121 bp, Artificial Sequence
  derived and/or modified sequence
atggccagtgacatccctggctctgtgaccctgcctgtggcccccatggccgccaccggccaggtgaggatggccggggccatgcctgcccggggcggcaagagaagaagtggcatggactttgatgatgaagatggagagggccccagcaagttcagccgggagaaccacagcgagattgaaagaagaagaagaaacaagatgacccagtacatcacagagctgagtgacatggtgcccacctgcagcgccctggccaggaagccagacaagctgaccatcctgaggatggctgtgagccacatgaagtccatgaggggcaccggcaacaagagcacagatggagcctacaagcccagcttcctgacagagcaggagctgaagcacctgatcctggaggccgcagatggcttcctgtttgtggtggccgctgagaccggccgggtcatctacgtgtctgattctgtgacccctgtgctgaaccagccccagagcgagtggtttggcagcaccctgtatgagcaggtgcacccagatgatgtggagaagctgcgggagcagctgtgcaccagcgagaacagcatgacaggccgcatcctggacctgaagacaggcaccgtgaagaaggagggccagcagagctccatgaggatgtgcatgggcagcagaagaagcttcatctgcaggatgagatgtggaaatgcccccctggaccacctgcccctgaaccgcatcaccaccatgaggaagcgcttcagaaatggcctgggccctgtgaaggagggggaggcccagtatgctgtggtgcactgcaccggctacatcaaggcctggcccccagctggcatgaccatccctgaggaggatgctgatgtgggccagggcagcaagtactgcctggtggccatcggccgcctgcaggtgaccagcagccctgtgtgcatggacatgaatggcatgtctgtgcccacagagttcctgagccgccacaacagtgatggcatcatcacctttgtggacccccgctgcatctctgtgattggctaccagccccaggacctgctgggcaaggacatcctggagttctgccaccctgaggaccagagccacctgcgggagagcttccagcaggtggtgaagctgaagggccaggtgctgtctgtgatgtaccgcttccgcaccaagaaccgggagtggatgctgatccgcaccagcagcttcaccttccagaacccctacagtgatgaaattgagtacatcatctgcaccaacaccaacgtgaagcagctgcagcagcagcaggccgagctggaggtgcaccagagagatggcctgagcagctatgacctgagccaggtgcctgtgcccaacctgcctgctggggtgcatgaagctgggaagtctgtggagaaggcagatgccatcttcagccaggagcgggaccccaggtttgctgagatgtttgctggcatcagcgccagcgagaagaagatgatgagcagcgccagcgctgctggcacccagcagatctacagccagggcagccccttccccagcggccacagcggcaaggccttcagcagctctgtggtgcacgtgcctggggtgaatgacatccagagcagcagcagcacaggccagaacatgagccagatcagccggcagctgaaccagagccaggtggcctggacaggcagccggccccccttccctggccagcagatccccagccagagcagcaagacccagagcagcccctttggaattggcaccagccacacctacccagctgaccccagcagctacagccccctgagcagccctgccaccagcagccccagcggaaatgcctacagcagcctggccaacagaacacctggctttgctgagagcggccagagcagcggccagttccagggccggcccagcgaggtgtggagccagtggcagagccagcaccacggccagcagagcggggagcagcacagccaccagcagcccggccagacagaggtgttccaggacatgctgcccatgcctggggaccccacccagggcactggaaactacaacattgaagattttgctgacctgggcatgttcccccccttcagcgagtag

SEQ ID NO: 182699 - DNA, 1701 bp, Artificial Sequence
  derived and/or modified sequence
atggccaccccagctgctgtgaaccccccagagatggccagtgacatccctggctctgtgaccctgcctgtggcccccatggccgccaccggccaggtgaggatggccggggccatgcctgcccggggcggcaagaggaggagcggcatggactttgatgatgaagatggagagggccccagcaagttcagccgggagaaccacagcgagattgaaagaagaagaagaaacaagatgacccagtacatcacagagctgagtgacatggtgcccacctgcagcgccctggccaggaagccagacaagctgaccatcctgaggatggctgtgagccacatgaagtccatgaggggcactggaaacaagagcacagatggagcctacaagcccagcttcctgacagagcaggagctgaagcacctgatcctggaggccgcagatggcttcctgtttgtggtggccgctgagaccggccgggtcatctacgtgtctgacagcgtgacccctgtgctgaaccagccccagagcgagtggtttggcagcaccctgtatgagcaggtgcacccagatgatgtggagaagctgcgggagcagctgtgcaccagtgaaaattccatgacaggccgcatcctggacctgaagacaggaacagtgaagaaggagggccagcagagctccatgaggatgtgcatgggcagccgccgctccttcatctgcaggatgagatgtggaaatgcccccctggaccacctgcccctgaaccgcatcaccaccatgaggaagcgcttcagaaatggcctgggccctgtgaaggagggggaggcccagtatgctgtggtgcactgcaccggctacatcaaggcctggcccccagctggcatgaccatcccagaagaagatgctgatgtgggccagggcagcaagtactgcctggtggccatcggccgcctgcaggtgaccagcagccctgtgtgcatggacatgaatggcatgtctgtgcccacagagttcctgagccgccacaacagtgatggcatcatcacctttgtggacccccgctgcatcagcgtcatcggctaccagccccaggacctgctgggcaaggacatcctggagttctgccaccctgaggaccagagccacctgcgggagagcttccagcaggtggtgaagctgaagggccaggtgctgtctgtgatgtaccgcttccgcaccaagaaccgggagtggatgctgatccgcaccagcagcttcaccttccagaacccctacagtgatgaaattgagtacatcatctgcaccaacaccaacgtgaagcagctgcagcagcagcaggccgagctggaggtgcaccagagagatggcctgagcagctatgacctgagccaggtgcctgtgcccaacctgcctgctggggtgcatgaggccggcaagtctgtggagaaggcagatgccatcttcagccaggagcgggaccccaggtttgctgagatgtttgctggcatcagcgccagcgagaagaagatgatgagcagcgccagcgctgctggcacccagcagatctacagccagggcagccccttccccagcggccacagcggcaaggccttcagcagctctgtggtgcacgtgcctggggtgaatgacatccagagcagcagcagcacaggccagaacatgagccagatcagcggcagctag

SEQ ID NO: 182700 - DNA, 2154 bp, Artificial Sequence
  derived and/or modified sequence
atggccacccccgccgccgtgaacccccccgagatggccagcgacattccaggcagtgtgacccttccagttgcacctatggctgcgaccggacaggttagaatggccggcgccatgcccgcgcgaggaggcaagcggcgtagcgggatggacttcgatgacgaggatggggaggggccttcaaagttttcgagggagaaccattccgagattgaacgccggagacggaacaaaatgacccagtatatcactgagctttctgatatggtgccgacatgctccgcactggccagaaagcctgacaaactaacgatcctaaggatggcagtgagtcacatgaaatccatgcgtggcactggtaacaaatctaccgatggtgcttataagcccagctttcttacggagcaggagcttaagcaccttatactggaggctgccgacggattcctttttgtagttgctgccgagaccggtcgggtgatttacgtctccgactccgtgacacccgtcttgaaccagccacagagcgagtggttcggcagcaccctgtatgagcaggtacacccagacgatgtcgaaaagctgagggagcaactgtgcaccagtgagaactcaatgacgggtcgtatactggacctgaaaacgggtacggtcaaaaaggaaggacagcagtcatccatgagaatgtgtatgggttcccggaggtcatttatatgtaggatgagatgcggtaatgctccattggaccatctacccctcaaccgaatcactacaatgcgtaagcgtttccggaacggtctcggccctgtcaaggagggcgaggcgcagtatgcagttgtccactgcaccggttatattaaagcctggcccccggccgggatgacaattccggaagaagatgcagatgtcggccagggcagcaaatattgtctagtagcaatcggacggctacaagtgaccagttccccagtctgcatggacatgaacggaatgtcggtccccactgagttcctgagcaggcacaattcagacgggataattaccttcgtggacccccgatgtatttctgtaattggataccagccccaggatcttctgggaaaagacattctggaattctgtcaccctgaggaccaatcccacctgcgagagagctttcagcaggtggtgaaacttaagggccaagttttatctgtcatgtaccgattcaggacaaagaatagggaatggatgttgattaggactagctctttcacgtttcagaacccttactccgacgaaattgaatatataatttgcaccaacacaaatgtgaagcagctgcaacagcaacaggctgaattagaggtgcatcaacgagatgggctgagctcctatgatctgagccaagtccctgttcccaaccttcccgccggtgtccatgaggctggaaagtctgtggaaaaagctgacgcgatcttcagccaagaacgagatcccagattcgcagagatgtttgctggcattagtgctagcgagaagaaaatgatgtcatcagctagcgccgccggcacccagcagatatacagccagggctcacccttcccttctggccactctgggaaggcattcagtagctccgttgtccatgtcccaggtgtaaacgacatacagtcttcaagcagtacagggcagaatatgtctcagatctccagacagctgaatcagtcccaagtcgcctggactggctctcgaccacccttcccaggccagcaaattccgtcccagtcttcaaaaactcagtcgtccccattcggaattggcacatctcacacttaccctgccgatccatcttcttactcccctctatcttcccctgccacttcatctccctctggtaatgcctactcctccctcgccaatagaacacccggattcgccgaaagcggtcagagttcgggccaattccaaggcaggccctctgaagtgtggagccagtggcaaagccagcatcacggacagcagtccggcgagcaacacagccaccagcagccgggacagacagaagtctttcaagatatgctgcctatgccgggagaccccacacaggggacaggtaactataacatagaagactttgcagatctgggaatgttcccaccattcagcgagtag

SEQ ID NO: 182701 - DNA, 2118 bp, Artificial Sequence
  derived and/or modified sequence
atggccagcgacatccccggcagcgtgaccctgcccgtggcccccatggctgctacgggacaggtgcggatggccggggcaatgccagcaaggggtggcaagaggaggtcaggcatggacttcgacgatgaagacggggaagggccaagtaaattttctcgcgagaatcactctgagatcgaaagacggcgccggaataaaatgacgcagtacatcactgaactgagcgatatggtgccaacatgcagtgcgctggctagaaagccagataagctgaccattttgaggatggcggtttcacacatgaaatctatgaggggcacaggcaataaaagcacagacggagcatataagccttcgttcctcactgagcaggaattaaagcaccttatcctggaagctgcggatggctttctgttcgtggttgctgctgagaccggcagggtgatctatgtgagcgactcagttacccctgtcctcaatcaaccacagagtgagtggttcggatcaacactgtacgagcaggtccatccagacgacgtggagaagctccgtgaacagctttgcacctctgagaattcaatgactggaaggattcttgacctcaaaacaggcactgttaaaaaggaaggacaacagagtagtatgcggatgtgtatggggtccagacgatccttcatttgccgcatgcgctgtggaaatgcaccattggaccatctgccactgaatagaatcacgactatgagaaaacgcttccgaaatgggctcggcccagtaaaggaaggggaggctcaatacgctgtggttcactgcacagggtatattaaagcgtggccacctgctgggatgacgatccctgaggaggatgccgatgtcggtcaaggctccaagtattgtctcgtagcgatcggacggctgcaggtgaccagcagtcctgtttgcatggacatgaacggcatgtccgtgccaacagaattcctgtctcggcacaactccgacggaatcataacttttgtcgatccaagatgcatcagtgtgatcggataccagccacaggacctactcggcaaggacatcctggaattctgccatcctgaagaccagtctcatctaagggagtccttccagcaggtggtgaagctgaagggccaggtcctgtctgtgatgtataggttccggactaagaaccgtgagtggatgctgattagaacctcctctttcacgtttcagaacccgtatagcgacgagattgagtacatcatttgcaccaataccaatgtcaaacagctgcaacagcagcaggccgagctcgaagtccaccaacgcgacggtctctcctcttacgatctctcccaggtccccgtaccaaatttgcccgccggcgtccatgaagccggaaagagcgtcgagaaggccgatgctatcttctctcaggaaagggatccccgtttcgccgagatgttcgccggcatcagtgcatctgaaaaaaaaatgatgtcctcagcttccgctgctggtacccaacaaatctatagccagggatccccatttccttccggccatagcggcaaggccttcagttcttccgtcgtccatgtcccaggtgtcaacgatatccagtctagcagcagtaccggccagaacatgagtcagatttctcggcagctgaaccaaagtcaggtggcctggacagggtctcggccaccttttcctggtcagcagatcccaagtcagtcgagcaagacccaaagtagtcctttcggtatcgggacaagccacacgtatccagcagacccaagctcctattcacctctgagctctcctgctacgtcttcaccctcaggcaatgcatacagttctcttgcgaacaggacccccggcttcgccgagtccggccaatcatccgggcagttccagggacgacccagcgaggtctggagccagtggcagtcccaacaccacggccagcaatccggagagcagcattcacaccagcagcctggccagactgaagtctttcaggacatgctgcctatgccaggggaccccaggaatgagtggtggtctccgcactcaaggcagcatttccgccagcctatctcttacgcccgcatgtag

SEQ ID NO: 182702 - DNA, 2121 bp, Artificial Sequence
  derived and/or modified sequence
atggccagcgacatccccggcagcgtgaccctgcccgtggcccccatggcggctacagggcaggtgaggatggccggcgccatgccagcaaggggggggaagaggagaagcggcatggacttcgatgacgaagacggcgaaggcccatccaagttcagtcgggaaaatcactctgagatagagcgtcgaagacgcaacaagatgacccagtatataaccgagctgagtgacatggtgcccacatgctctgccttagcccggaagccagataagctaacaatcctgcggatggccgtatcacatatgaagtccatgagagggaccggtaacaaaagcaccgacggcgcatacaagccatcatttttgacggagcaagagctgaaacacttgatcttagaggcggccgacgggttcctgtttgtggtggccgcggaaactggaagggtcatttatgtgtctgactcagtcacacctgtgctaaatcagcctcagagcgagtggtttgggtctacgctttacgagcaagttcaccccgacgacgtagagaagctaagggagcaactttgtacttctgaaaatagcatgaccggtcgcattctagacctcaaaactggcacagtgaaaaaggaaggccaacagtcatctatgagaatgtgcatgggaagtcgacggagcttcatctgcagaatgcggtgcggcaatgcccccttagaccaccttccgcttaaccggattactactatgagaaagcgtttccggaacggcctgggacccgtgaaggaaggcgaggctcagtacgcggttgttcactgtaccgggtatatcaaggcgtggccaccggcaggcatgactattcctgaagaggacgccgacgtcgggcaagggagcaaatattgcctggttgctatcggccgcctgcaggtgactagctccccagtatgtatggatatgaacggaatgtctgtccccaccgaatttctgagccggcataattcggacggaattatcacgttcgtggatcctagatgtatcagcgtgattgggtaccagccacaagacctgctcggcaaggacattctggagttttgccatcccgaagaccagagccacttaagggagtctttccagcaagtggtgaaacttaaaggacaggttctgagtgtgatgtataggtttcgaacaaagaacagggagtggatgttgattcgcacgtctagcttcactttccaaaacccgtactccgacgaaattgaatacatcatatgcaccaatactaacgttaagcagctgcaacagcagcaagcagagctggaagtccatcaaagggacggccttagttcctacgacctgtcgcaggtacctgttcctaatctgcccgccggcgttcatgaggccggtaagtcggtagagaaggccgacgcaatattctcacaagaaagagatccacggttcgccgagatgtttgccggcatcagtgccagcgaaaagaagatgatgagcagtgctagtgccgctggtacgcaacagatttatagtcaaggctctccgttcccatccggtcacagtggcaaagcattctcaagctccgtcgtgcacgtgcccggcgttaatgatatccagtctagctcctcaacaggacagaacatgagccagatctcccgccaactaaatcaatctcaggtggcttggaccggctcacggcccccttttcccggccaacaaatcccttcccagtcaagcaagacccagtctagtccattcgggatcggaacatcacacacctatccagccgacccatcgtcctacagccccctgtcgtcacctgccacgagctcgcctagcggaaatgcttacagttccttagccaacagaacacctggtttcgccgagtcaggccagtcttctggacagttccaggggaggcccagcgaagtctggagccagtggcagtctcagcatcatggacagcagagcggtgaacaacactcacatcagcagcctgggcagaccgaggtgttccaagatatgctccccatgcctggagacccaacacaagggacagggaattacaacatcgaagactttgctgacttggggatgtttcccccattttcagagtag

SEQ ID NO: 182703 - DNA, 2121 bp, Artificial Sequence
  derived and/or modified sequence
atggccagcgacatccccggcagcgtgaccctgcccgtggcccccatggctgctacaggacaggtccgcatggcgggcgcaatgcccgcgcgggggggaaagcgtcgctcaggcatggactttgatgatgaggacggggagggacccagcaaattctcacgggagaatcactccgagattgagagacggcgcaggaacaaaatgacacagtacatcacagaactgtctgacatggttcccacatgcagtgccctcgcccgaaagcccgacaagctgacgatcctgcgcatggcggtgtctcacatgaagtcaatgaggggcactgggaacaagagcacggatggcgcctataagccaagcttcctcacagaacaggagctgaagcatttgatcttggaggctgccgacggctttttatttgttgtagcagccgagaccggcagggtaatttatgtatctgattcagtcacacccgtgctcaatcaaccgcagagcgagtggttcggttcaaccctttatgagcaagttcacccggatgacgtggaaaagttgagggagcagctttgcacgtctgagaattcaatgacagggcggatcctagatctgaagaccggtacggtgaaaaaggaaggccagcagtcatctatgaggatgtgcatgggaagcagacgcagcttcatttgccgcatgcggtgtggcaacgcgccattggatcatctgccactgaatcggattactaccatgcgcaagcgcttcagaaatgggcttgggccagtaaaagaaggggaggcacaatacgccgtggttcactgcaccggatacattaaagcttggccacccgccggtatgacaattcctgaggaggatgcagacgtaggccagggctccaaatattgtctcgtggctataggcagactgcaagtaactagcagcccagtctgcatggacatgaatggaatgtctgtccccacagagttcctgagccggcataacagcgacgggattattactttcgtcgacccacgttgcatctctgttattggctaccagccacaggatctgttaggaaaagatatcctggaattctgccaccctgaggatcagtcacaccttcgtgagtcattccagcaagtggttaagctgaagggtcaagttctgtcagttatgtatagattcaggacgaaaaatcgcgagtggatgttaatccggacttccagttttacctttcagaacccttattccgacgagatcgagtatataatctgtacgaataccaatgtgaaacagctgcagcagcagcaggccgagcttgaggtacaccagcgcgatggactgtcttcctatgatcttagtcaggtccccgtacctaatctgcccgccggagtccacgaggctggcaaaagcgtcgagaaagctgacgccatattctcccaggaaagagatcctcggttcgccgaaatgtttgctgggatcagcgcgtctgaaaaaaagatgatgagcagcgcatcggcggcaggcacacagcaaatttacagccagggatccccgtttccctcaggccattcgggaaaggccttcagcagctcagtagtccatgtgcctggcgttaatgatattcagtcatcgtcctcgactggccagaatatgagtcagatctcccgccaactgaaccagtcccaggtcgcctggaccgggtctcgtcctcccttccctggccagcagattccctcccaatctagcaaaacacagtcttctccatttggcattggaaccagccacacctaccccgccgacccgagtagctattcccctctgtcctcacccgcgacgtcgtcccccagtggtaatgcctattcgagtctggcaaaccggacacccgggttcgcagagtcgggacagtcatccggtcagtttcaggggagacctagtgaggtgtggagccagtggcagtcacagcaccatgggcaacagtcaggtgagcaacactcgcatcagcagcctggccagactgaagtgttccaggacatgctgcctatgcccggagacccgacccaggggacgggcaactataacattgaggactttgccgatttggggatgttcccccctttttccgagtag

SEQ ID NO: 182704 - DNA, 1701 bp, Artificial Sequence
  derived and/or modified sequence
atggccacccccgccgccgtgaacccccccgagatggccagcgacatcccgggctccgttacccttccagttgctcctatggctgccaccgggcaagtgaggatggccggtgccatgccagccagaggagggaagcgtcgctccggaatggatttcgacgacgaggacggagaggggccatctaagttttcccgggaaaatcattctgaaatagagcgccgccgccgaaacaaaatgactcagtacattactgaactgagtgacatggtccccacctgctctgcccttgcaagaaagcccgataagctcaccatcttgagaatggcagtgagtcatatgaagagcatgcgcggcaccggaaataagagtacagacggagcttataagccttcttttttgaccgaacaagagctgaagcacttgatactcgaggccgccgacggcttcctgtttgtggtggccgccgagactggcagggtaatttacgtgtccgattcagtcactcccgtgcttaaccagcctcaatctgaatggttcgggtccacactgtatgagcaagtacaccccgatgacgtcgaaaaactccgggaacaactgtgcacaagtgagaactctatgacaggcaggatcctcgacttaaagacaggcacagtcaaaaaggagggccagcagagcagtatgagaatgtgtatgggctcccgaaggtccttcatctgccgcatgcgctgcggcaatgccccgttagatcatttacctttgaatcggatcaccaccatgaggaagagatttcgaaacgggcttggacctgtgaaggagggagaagcgcagtacgccgtagtgcactgtaccggctatatcaaagcttggccaccagcgggcatgacaatccccgaagaggacgccgatgtcgggcagggaagcaagtactgcttggtcgctataggacgcctacaggtgacaagcagccctgtctgtatggatatgaacgggatgtcagtgccgacagaattcctcagccggcataacagcgacgggatcattacatttgtggatccacggtgcattagcgttattgggtaccaaccacaggacttgttaggcaaggatatcctggaattttgccatcccgaagaccaatctcatctgcgcgagtccttccagcaagtcgtcaagttgaagggacaggtcctgagtgtcatgtaccgcttccgcacgaagaatagagagtggatgttgatccgcacctctagcttcactttccagaacccttattcagacgagatcgaatacatcatttgcactaatacaaacgtaaaacaactgcaacagcagcaggcggagctcgaagtgcatcagcgcgacgggctttccagctatgacctatcacaggtgccagtgccgaatctcccggccggagtgcacgaggctgggaagtctgtggagaaggccgatgccatatttagtcaagaaagagatcctcgcttcgctgaaatgtttgctggcatctccgcctccgagaagaagatgatgtccagcgcaagcgcagccgggacccagcagatctactcccaaggcagcccgttcccctcaggacactcagggaaggcgtttagctccagtgtggtacacgtccctggcgtcaatgacatccagagcagcagtagtacaggacaaaacatgagtcagatctctggcagttag

SEQ ID NO: 182705 - DNA, 2154 bp, Artificial Sequence
  derived and/or modified sequence
atggctacacctgccgcagtcaatccgccagaaatggcctcggatattcctggcagtgtgaccctgcccgtggccccaatggccgctactggccaggtcagaatggccggagctatgccggctagaggaggcaagcggaggtccggcatggattttgacgacgaggacggcgagggtccgtctaaattttccagggagaatcactccgaaattgaacggaggcgcagaaataagatgacccagtacatcacagagctgagtgacatggtgccaacctgctccgcattggccagaaagcccgataagctcacaatcctcagaatggccgtttctcacatgaaaagtatgcgcggaacagggaacaagagcaccgacggcgcttataaaccttctttcctgaccgagcaggagctgaaacatctgatattggaagcagccgatggatttctttttgtggtggctgcagagacaggaagggtgatttatgtgtccgactccgtgacacccgtactgaatcaacctcagtccgaatggttcgggtcaacactgtatgaacaagttcaccccgacgatgtagaaaaactgagagagcagctgtgcacaagcgaaaactccatgaccggccgtattctagatcttaaaactggcactgtcaagaaggagggccagcagtccagcatgagaatgtgtatgggttcaaggaggtcttttatctgtcgtatgcggtgtggtaacgcccctcttgatcacctcccactgaacagaattaccacaatgcgcaagcggttccgcaatgggctcgggccagttaaagaaggtgaagcccagtatgcggtggtgcactgcaccggatatatcaaagcctggcctccagctggcatgacaatccccgaggaggacgccgatgtgggccaggggtcgaaatactgcttggttgcaatcggacggctccaagttacttcctcgcctgtctgcatggatatgaatgggatgtccgtccccaccgagttcctctccaggcacaattctgatgggatcattacgtttgttgacccaagatgtatctcagttataggctaccagccgcaggatttgttagggaaagacattctggaattctgccaccccgaggaccaaagccacctgagagaatctttccagcaagtggtcaaactcaaaggacaggtgttaagtgtgatgtacagattccgcacaaaaaacagggaatggatgcttattcgcacctcttctttcacattccagaacccatatagtgacgagattgaatatattatttgcactaacacaaatgttaagcagctacagcaacaacaggccgagttggaagtgcatcaacgagatggcctgtcctcctacgacctgtcccaggtgcctgtgcccaacctgcctgctggggtgcatgaagctggcaagtccgtcgaaaaggccgacgcgatctttagccaggaaagggatccaaggttcgcagaaatgttcgccggaatctctgcctccgagaaaaaaatgatgagttctgcctcggcagcagggacccagcagatttacagccagggctctccttttccctccggtcactccgggaaagccttttccagcagtgtcgtacatgtgccaggggtgaacgacatacagtccagttcaagcaccggacaaaacatgtctcaaatttctcgccagctgaatcaatcccaggtggcgtggacgggcagtcgcccaccctttcccggtcagcagatcccaagccagagcagcaaaactcagagtagtccgtttggaatcgggactagccatacgtatcccgcagacccaagtagctattcccccctgagttctcccgctactagttccccctctggcaacgcttatagcagtctggccaataggacaccaggttttgccgaatcagggcagtcatccggtcagttccaggggaggccgtcggaggtgtggagccagtggcagtctcaacaccacggacagcagtctggggagcagcactctcaccaacagccaggacaaacagaagtctttcaggatatgttacctatgcccggagacccaacacaggggacaggcaattataacatcgaggactttgcagatctcggcatgtttccccctttcagcgagtag

SEQ ID NO: 182706 - DNA, 2118 bp, Artificial Sequence
  derived and/or modified sequence
atggcaagtgacattcccggttcggtaactctgcctgtggcgcctatggcagccaccggtcaagtgcggatggcaggtgcaatgcctgctagagggggaaagagacgcagcggaatggactttgatgacgaagacggagagggaccctcaaaattttcacgagagaatcatagcgagatcgagaggcgccgtcgtaataagatgacccagtatattacagagctgtcagacatggtcccaacatgttccgcgctcgccagaaagccagacaaactcactattttgagaatggcagtcagccacatgaagtcaatgcgcggaactgggaataagtcgaccgatggagcatataaacccagcttcttaacagaacaggaactcaagcatctcattctagaagccgcagatggtttcttgtttgtggttgccgctgagactggcagggtcatctatgtgtctgactctgtgacccccgtgctaaaccagcctcaatctgagtggttcggtagcaccctctacgaacaggtgcaccctgacgatgtagaaaagcttcgtgagcaactatgtacttctgagaatagcatgactggacgaatcctagacttgaaaactggtacagtcaaaaaggaaggacagcagtcatccatgcgcatgtgcatgggttctagacgctccttcatttgtaggatgagatgtggcaatgcaccgcttgaccacctacctctgaatcgaattacaaccatgagaaaacggttccgcaatggactgggcccagtgaaagagggagaggcacagtacgcagtggtgcattgcacaggatatatcaaggcatggcctccagccggaatgacaatacctgaggaggatgcagacgtgggccagggatccaagtattgtctggtggccataggaagactgcaagttaccagctctccagtttgtatggatatgaatggtatgagcgttcctacagagttcctgagccgccataattcggacggtatcataacatttgttgatccaaggtgtatttctgtcatcggttaccagcctcaggacctcctggggaaagatatccttgaattctgccaccctgaagaccagagtcacctacgcgagtcctttcagcaagtggtcaagctcaaagggcaagtgctctccgtaatgtatcgcttcagaacgaagaaccgcgagtggatgctcattcgcacctcaagtttcactttccaaaatccctactctgatgaaattgaatacatcatatgtacaaacacaaacgtcaagcaacttcaacagcaacaagccgagttggaagtgcatcagcgagacggtctttcttcatatgatctatcgcaagtgcctgttcctaacctgcctgctggggtgcacgaagcgggaaaatctgtcgaaaaggctgatgccatctttagccaggaacgggatccaagattcgcggagatgttcgcaggcatctctgcaagtgagaagaagatgatgagttcagcatctgccgcaggcacacagcaaatctattcccagggttctccgttcccatccggacattccggaaaggccttttcttcgagcgttgtgcacgtgcccggagtaaacgacatccagtcttccagctctaccgggcagaacatgtcacaaatcagtcgccagctgaaccagtcccaagtggcctggaccgggagtaggcccccatttccgggtcagcaaatacccagtcagtcatccaaaactcagtcatctccttttggtataggtacctcacatacttaccccgcagacccttcaagttattcccctctctcgtctccggctacaagttcaccatccggaaacgcctactcctctctggccaatcgtacacctggtttcgccgaatcgggacagagcagtgggcagttccaaggacgcccatcagaggtctggtctcagtggcagagccagcaccatgggcagcaatcaggagagcagcactctcaccaacaacccggacagactgaagtatttcaggatatgctcccgatgcccggtgatccacgaaacgagtggtggtcaccccattcacgacagcattttcgtcagcccatttcatacgccaggatgtag

SEQ ID NO: 182707 - DNA, 2121 bp, Artificial Sequence
  derived and/or modified sequence
atggctagcgatattccgggatccgtgacgctgcctgtggctcccatggctgcgaccgggcaagtgcgcatggccggagcaatgcccgctagagggggaaaacggcgaagcggcatggacttcgacgacgaagatggggaaggaccctccaagtttagtagagaaaaccacagcgagatcgaaaggcggaggagaaataaaatgactcagtatattactgagttgtcagacatggtcccaacttgttccgcattagcccgaaagccggacaaactgaccatcctgcgaatggctgtctcacacatgaaaagtatgcgagggacagggaacaagagtaccgacggggcatacaagccaagtttcttgactgagcaggaacttaaacatctgatcctcgaggctgccgatgggttcctctttgtggtggctgccgaaacagggagagtcatctatgtctccgattccgttacccccgtgctgaatcagccccagagcgagtggttcggctctaccctttacgaacaggtgcaccctgacgacgtggagaaactgagagagcagctgtgcacctcagagaacagcatgaccggtaggattttagacctcaagactggcaccgttaagaaggaaggccaacaatcttctatgagaatgtgcatggggagtagacgatcatttatttgccgaatgcggtgtgggaatgcgccactggatcatctgccactgaaccggatcaccacgatgagaaagcgatttcggaacgggctcggacctgtgaaggagggggaggcccagtacgctgtggtccattgcacaggctacattaaagcctggccccctgccggtatgacaatcccggaggaggacgcggacgtgggccagggctccaagtactgcctcgtggccatcgggaggctgcaagtgacaagctctcccgtctgcatggatatgaacggcatgagtgttccaactgagtttttatccagacacaattccgacggcattattacgttcgtcgatcccaggtgtataagcgtgatcggataccagccgcaggatctcttgggaaaagatattctcgagttctgtcaccccgaagatcagtctcatttacgggagagctttcaacaggtagtcaaactaaaaggtcaggtgttaagcgtcatgtatcggtttagaacaaaaaaccgagagtggatgcttatcaggaccagttccttcacctttcagaacccgtatagtgatgagattgagtatattatctgcacgaataccaatgtgaaacagctccagcaacagcaggctgaattagaggtgcaccagcgcgatgggctcagtagctatgacttgagccaagtccctgtcccgaaccttccagctggcgttcatgaggcgggaaaatcagtcgaaaaggcggacgcaatctttagtcaagagcgcgaccccagatttgccgaaatgttcgctggaattagcgcttcagagaaaaagatgatgtccagcgcgagcgctgccggaactcagcagatctacagccagggcagcccatttccttctggccatagcggcaaggccttttcatcatcagttgtgcacgtacctggcgtgaacgacatccagtcttcttcatctacaggtcagaatatgtcgcagatctcacgccagctgaatcagtctcaggtggcttggacgggttctcgtcccccatttccaggtcagcagataccttcacagagtagtaaaactcagagcagtcccttcggaattggaactagccatacgtaccctgccgatccgagctcttattctccactgtcttcccccgctacatcctcaccttctggtaatgcctacagtagtctggccaaccggacgcccggattcgcagaatccggccagtcttctgggcagttccagggaaggccaagcgaggtctggagtcaatggcagtcacagcatcacggacagcagtctggggaacagcattctcatcaacagcccggacagaccgaagtattccaggatatgctccccatgcccggagacccaacgcagggcaccgggaactacaacatcgaagatttcgcggacttgggaatgttccccccattttcagagtag

SEQ ID NO: 182708 - DNA, 2121 bp, Artificial Sequence
  derived and/or modified sequence
atggcgtctgacatccctggttcagtgacgttacccgtggctcctatggcggcaacaggacaggtgcggatggccggtgccatgcccgctcgaggaggcaaaaggcgaagcgggatggatttcgatgatgaagacggagagggacctagcaaatttagtagagagaatcacagcgagatcgagcgcagacgcagaaacaagatgacccagtacattaccgaactttccgacatggtacccacatgtagtgcacttgctcggaaacctgacaaactgactatcctgagaatggcggtgtcccatatgaagtccatgcgagggactggaaataaaagtacggatggcgcttataagccctcctttctgaccgagcaggagctaaagcatctgatcctggaggccgctgacggatttctttttgtggtcgcggctgagaccgggagggtgatctacgtctctgattctgtcaccccagtgcttaatcaaccgcagagtgagtggttcggctcgactctatatgagcaggtgcatccagatgatgtggagaagcttcgggaacaactctgtactagcgagaattcaatgaccggacgaatcctggacctgaagaccggcaccgtgaagaaggaaggtcagcagtctagtatgaggatgtgtatgggtagtagacggtcctttatttgcagaatgagatgtggtaacgcccctctggatcacctgccactcaataggatcacgaccatgcggaagcgcttccggaatggcttaggccctgtaaaagaaggagaggcccagtacgcagtcgttcactgtaccgggtacattaaggcatggccacccgctggaatgaccattcccgaggaggacgccgacgtggggcagggatccaaatactgtctggttgctatcggcagactccaggtgacttcatcaccagtgtgcatggatatgaacggaatgtcggtgcccactgaatttttatccaggcacaattcggatgggattattacttttgtggatcctaggtgtatctcagtgatcggatatcaaccccaggacctgctcggcaaggatattctggagttctgtcatccagaggatcagagtcacctgagggagtctttccaacaggtggtcaaactcaagggacaggtcctctccgtaatgtaccgctttcggacgaaaaacagagagtggatgctgattcgcacatcaagttttacgtttcagaatccatactccgacgagatcgaatacatcatatgcaccaataccaatgtcaaacaactgcagcagcagcaggccgaactggaggtccatcaacgggacggcctgtcatcatacgatcttagtcaggtgcccgtacccaatctgcccgcaggtgtacatgaggccggaaaatccgtcgagaaagctgacgccatcttcagccaggaacgtgacccaagattcgccgaaatgtttgcaggcatctcagctagtgagaaaaaaatgatgtcctctgcctctgctgccggaacccagcagatatattcccaggggagtccttttccaagtggacactccggcaaggcgttttctagcagcgttgtgcacgtccctggcgtcaatgacatacagagttcatctagcaccggacagaatatgtcccagatttctagacagctgaaccagagtcaagtggcctggactggctcgagacctcctttccccggtcagcagattccatctcagtcttccaagacccaaagctctcctttcggaatcgggacgtcccacacgtaccccgctgacccttcaagctatagccccttaagctcacctgcgaccagcagtccctccggtaacgcctactcgtctctggctaacagaacccccggattcgctgagagcggtcagtctagcgggcaattccaaggacgcccttcagaggtatggagccagtggcaaagtcagcaccatggtcaacagagtggcgagcaacacagccaccagcaaccaggacaaaccgaggtgttccaagacatgttgccaatgcccggagaccctactcaaggaactggtaactacaacatcgaagatttcgctgacctcggtatgttccctcccttttcggagtag

SEQ ID NO: 182709 - DNA, 1701 bp, Artificial Sequence
  derived and/or modified sequence
atggccaccccagccgctgtgaacccaccagagatggcgtctgacatccctggtagtgttaccctccccgtggcgccaatggctgcgactgggcaagttcgtatggcaggagctatgccggcaagaggtggaaagcgcaggtctggtatggatttcgacgacgaggacggggaaggtcctagcaaattttcgagagaaaatcattccgagattgagcgacgacggagaaataaaatgactcagtatatcaccgagctttctgatatggtgcctacttgtagtgcacttgctcgcaagcccgacaagctaactatcctgcgcatggccgtaagccatatgaaatctatgcgcggaactgggaacaaaagcacggatggagcctacaaaccttctttcctgactgagcaggaactgaaacacttgatcctggaagctgccgatgggtttctcttcgttgtggccgctgaaacgggcagagtcatctatgtatctgatagcgtgacacctgtgctgaaccaaccacaatcggagtggtttggatccacactctatgaacaggttcacccagacgacgtggaaaagctgagggagcagctctgtacctccgaaaacagtatgacagggaggattttagacctgaagaccgggaccgttaagaaggaaggccaacagtcctccatgaggatgtgcatggggtcccgccgaagcttcatttgtcgcatgcgttgtggcaatgctcctctggatcacttgccactgaatagaatcacaacaatgcgcaagaggtttagaaatggactcgggcctgtcaaggaaggcgaagcccagtacgcggtggtgcactgtaccgggtatatcaaagcctggccccctgctgggatgacaataccagaagaagacgccgacgtgggtcagggatctaaatactgtctcgtagccatcggcagactgcaggtgacttcctcccccgtttgcatggatatgaacggaatgtcagtacctaccgagtttttgtccaggcataattctgacggtataattacttttgttgatcccagatgtatcagcgtcattgggtaccagcctcaggacttgctgggtaaagatattttggagttttgccatcccgaggaccagagccatctgcgagaatccttccagcaggtcgttaaacttaagggacaggtgctgagcgtgatgtacagattccgcaccaagaacagagaatggatgctcatccgcacgagctcctttaccttccagaacccgtattctgacgaaatcgaatacattatttgtactaataccaatgttaagcaactgcagcagcagcaggcggaattggaagttcaccagagggatggactatcctcatacgacctctcacaggtgccagtgcccaatctacctgctggagtgcacgaggcaggtaaaagcgttgaaaaggctgatgccatctttagtcaagagcgggacccaagattcgcagaaatgtttgcaggcatttcagcaagcgagaaaaaaatgatgtcatctgcgtccgccgcaggcacccagcagatttattcacaaggtagccccttcccttccggtcactccggtaaagcattttccagcagcgtggtgcatgttcctggagtcaacgacatccagagttctagtagcaccggacagaacatgagtcagatatcaggttcctag

SEQ ID NO: 182710 - DNA, 6558 bp, Artificial Sequence
  derived and/or modified sequence
cggccgcggcggcggggagagcggagggagcgccgcccgcccgcgccgtcctttgtgtggcggcggcggcgcctgggcctgaccgggtccccggggctgagcgccgggctccgcgccgcccctcccgcgcccctgccaagcgggcgcctatcctctccgagcaagatggcaaccccggcggcggtcaaccctccggaaatggcttcagacatacctggatctgtgacgttgcccgttgcccccatggcggccaccggacaggtgaggatggcgggggccatgcctgcccgtggaggaaagcggcgttccggaatggacttcgatgatgaagatggtgaaggccccagtaaattttcaagagagaatcatagtgaaatcgaaaggcgcagacggaacaagatgactcagtacatcacggagctctccgacatggtccccacatgcagcgcactggctcggaagccagacaagctcaccatcctccgcatggccgtctcgcacatgaagtccatgaggggtacagggaacaagtccaccgatggcgcgtacaagccttccttcctcacagagcaggaactgaagcatctcatccttgaagcagctgatggatttctgtttgtggtggctgctgagacagggcgagtgatttatgtgtctgactccgtcacccctgttctgaaccagccccagtcagagtggtttgggagcacactgtatgaacaggtgcatcctgatgacgtggagaagctgagagagcaactgtgcacctcagaaaactcaatgacaggccggatcttggacctgaagactgggacggtcaagaaagaagggcagcagtcatccatgaggatgtgcatgggctcgcggcggtctttcatctgcaggatgaggtgtggaaatgctcctttggaccaccttcctctaaacagaataaccaccatgaggaaaaggttcaggaatggccttggccctgtgaaagaaggagaagcccaatatgctgtggtccactgtacaggatacatcaaggcctggccaccagcaggaatgaccatacctgaagaagacgctgatgtgggacaaggcagtaaatattgcctcgtggcaattgggagactccaggtgaccagctctcctgtatgcatggacatgaatgggatgtcggtgcccacagagttcttatcccggcataactccgatggaatcatcacatttgtggatccaagatgtatcagtgtgattggctaccaaccccaggatcttctgggaaaggacattttggaattctgccaccctgaggatcaaagccatctgcgtgagagcttccagcaggtggttaagctgaaaggccaagtcctgtcggtcatgtatcgatttcgcaccaagaaccgggagtggatgttgatccgcaccagcagcttcacattccagaatccctattctgatgagattgagtacatcatctgcaccaacaccaacgtcaagcaacttcagcaacagcaggcagaattggaagtgcaccagagagatggattgtcatcgtatgacttatcccaggtccccgtccccaacctaccagccggtgttcatgaggccgggaagtccgtggaaaaggcggatgcaatcttctcccaggaaagagatcctcggtttgctgaaatgtttgcaggaattagtgcatcggagaagaagatgatgagctcagcctctgcagcaggaacccagcagatctactcccaaggaagcccatttccctctggacactccgggaaggccttcagctcttcagtggttcatgtgcctggagtgaatgatattcagtcctcttcttccacgggccagaacatgtcccaaatctcccggcagctaaaccagagtcaggtggcatggacagggagtcgtccgccctttccgggacagcaaatcccatctcagtccagcaagactcagtcatctccctttgggattggaacgagccacacctacccggcagacccctcttcctacagccccctctccagcccagctacctcctcgccaagtgggaatgcctactccagtcttgccaacaggactccagggttcgctgaaagtggacaaagtagcgggcagttccaagggcggccctcggaagtctggtcgcagtggcaaagccagcaccatggccagcagagcggtgagcagcactcccaccagcagcccggtcagactgaagtgttccaggacatgctgcccatgccaggagatccaacccaggggactggcaactataacatcgaagactttgccgacctgggcatgtttccaccgttttctgagtagctgcggccagagtgaggctcctgctgtacagtgccacccatactgtgatgtcgatgcccatgtgaatgaggcccaccctcgccctgcttgccctgccgcaggccccccaccagaagccatctcccccgctgtgtgtccccaggcgcatcattgctccactctcccctgcagccgcggctgctcggccactgaccaggggccctggcagacattaggggatcagttgtatttattgtattttatctgtgtgtgctcaggaggtgagcctagtgggtccttaagtttggttgtgaataatctcttgatagacaatttatacccatgaaagttcagccaatgcccagagtgaccaagcagcaccagcaggcctgcccaggatgctgaaagcagatttcttcttgatttcacttctgatggatgcatggggctctgggggaatgctgggaaaatgggcaagcagagtgcacagccctcgttctgccagctggagccaagaagcacagagacacagaggcgcctgcccctcagctccgctggtctgtctgtgcatccactgtgccgtgggacatatgtaatttgtgcagtgtgacatggacttgctgtcctaatggatgtgttgtgccttgtgtctgtcatgtgtggccagcgtgattgtatagaatccagagtatgtagagagccaaaatgtgtggccctgtccccaagctcagcaccaccggccatgaccagaggttgctcggcccagggtctgggagctgggctaacaggctgacacttcggcagggtcaccaggaggcacagctaggggcatgctcacatgggtaggtcagttctttggtccaagcctctggtgcagattcaagctcctcctcttagaggaagcagctccttcctcccacaggagccccaagggagcactcaccctcctcccaattggatctgaatagctgtgttcctgatcccacataagcatgtctcatccttgccccactggtgagaggaggaccttgtgcctgcccagagcctgcaggacagcacgccttgaggtcagaggcctggcccttctttacagatgtagatagcagggtaggacgcccaggccttctcacatgggcaccatgaaacactttcttccaggccacctgagccttcgttcttcagcccgactggaggaacagcagctctgggaggcacagagtgcaggtctcaggggcagaagacatgggttccagttctggttctgccacacacccaccggccttgaatttctctggtggtctcaagacaagaacaagagctgactctagaatcttctgcctggctgacctctgagcccatgatccctggcttgctgtgcttctcttggatttgaggagagtttatgaatccatccccctgttttcagggacctctgccttctcccacaccccttacactagtgaggactccttcggcctcttgtgtttccttccttttgtgaccattacgccccctccctgtttcttatcaccagcccatcagcccactgactcccatatggtagaaaaggtaccgtggctgctgcagggcacatggagggacctaccctctgggaaagcccttgtgtccctcccagagtccttcaggtaggccctcgcagatgctgcttgctcagaaacaacccgtgcatccctgcccatggattctgcaggacctagaagagtggcattggttctaggaacctgagagtggagtgaggccagcatgcaggaaggagtttggagagagtgtttgctgtgatccattgaaagctccacattaaaccccagccctgtctggccagggagatccatgtgctcaatgttgctgggggacctacaaaagtcaaacattgctcagtaaaatgcctttggctggtcgccagctgtgcatgactgcagttcctagactctaacttaaccccaactttgcagtttctagagctttttgtctgtaatggtgattgggtctccactgtagatgcatgcagtgttcactccaacctcagaggctttcttgcttctggggaaatggcaggtggttgaaaccctgcacatcctcccagggccagccccagaatgggcctttctctgcctgccctgcccttggggccacctctgcctccagcaggcttgagcttgccccaggccttgggcataattatttccccccaaaaaaggcacaaaaataggttttggatcaaagaagtgtttctcagtgaaatgaaaacagtctttttatagcctttagcttgtgagtttggaagtttggggggtcttatgtttgttttgcctcttctgtttcttggaggagagttgaggcttttcttaggtgcatacacagacccaggtgaacacgctgactgtgaacctgccctgtatccggagctgtgctgggcactgaggggatgcaacaaaattaggagaggatccttgctcccaacgtctacttctcctacctcaacaggggtccagggtgcagtgaactcagttcttggcccttgggtgaggattcatggatgaatgaaagctagacctgatggggaggcattatgactaaataggcccagcctccttcccttccagctctgtcctaggagcataggcgggaaatctgagtagagtctgactgcagtttttgcttatgatttgtaaaagccgtcatggggtcaataagaaaataggggtgatggagggggagaagcccaggactgggagaatcgcacatgccccaggggttttcaccaaggattttcaagacaaactggagtaagaattaaagccccagaggatttaattatcctggtttgcaaaagagcctcccatgccagtaccgcccagccttggaggccggaatgctcatggcccctgtggtctgcttgtccttcagcccatgcccagcagatacctctctgactggagacgggctcaaagctggattagaaaggggagaggcacttgtgactttgtttgactctgtgactcacttcctcgctcacaccttgtttgaactactggactttcaactggctttccttaggtcaggcaagcagacagctccccactgaagaggtctgtacagtgacaacccgggccggcagcaaggacacagatgcagccacagtaaggctccatcaggactgggtcagtgatggcaacaggatggccaaggatggctctagaacactctgtccatgcgtcactccccccagttttatttttagctttggcttcagggagtgacagccatcacaaatagccacattctgctctactctccaacataccagattctacactgttgttatttcatgagacgtgaatgttgcagagagtggggggattctggttgttaaggaacttacactggggagctttactcttccgtgtcaacaatgtgactacatgttctccagattagccacacatgcaaacatcagtgtccttctagctttagccgagaaagaaaccagtcccagggaatgaatggtggtctccccactcccggcagcactttaggcagcccataagctatgcgagaatgtgaacgctcaccttgctccgtcacggttctgacctaccacataaacaggaagaagccagtgaccggaacagctctaggaataacaagtcagaatagaagtgtcctttatattaccagaaaatatgggcttggcctaagtcgctgtctcctaacctgccggggtcattccccaccaaacaccccatactaaggagccatgagccacctggacattcaccttttctttgaccatctggagtctggggcaacttaaggaggcaccacacagtggtgcaggcacatttccaagcgtaggtgtccctggcttttgtggccaaagctagtgttatggtcaacaacaggccagggtctgtggggcactgaccttgaaagtggcaaaatggaggtttcacaggctgtgcgggagcaggacggcttgcttcatctaacaatctcagtttcctttaaaaaaagaaagaaaggaaaagatttcataagcaggtgtcagtggacagtttaagtacttaaccatttctctttcttcttatggatgtgaactgtgctgtggataaatcatttgtatttcttgaatgttctctatgactaacagttattaagtcggttgtgtatatgtgtaactaatgtaactgccttttaaaatttcattacaataaaaatgactttgctctgaacaacaaa

SEQ ID NO: 182711 - DNA, 2317 bp, Artificial Sequence
  derived and/or modified sequence
gcggccgcggcggcggggagagcggagggagcgccgcccgcccgcgccgtcctttgtgtggcggcggcggcgcctgggcctgaccgggtccccggggctgagcgccgggctccgcgccgcccctcccgcgcccctgccaagcgggcgcctatcctctccgagcaagatggcaaccccggcggcggtcaaccctccggaaatggcttcagacatacctggatctgtgacgttgcccgttgcccccatggcggccaccggacaggtgaggatggcgggggccatgcctgcccgtggaggaaagcggcgttccggaatggacttcgatgatgaagatggtgaaggccccagtaaattttcaagagagaatcatagtgaaatcgaaaggcgcagacggaacaagatgactcagtacatcacggagctctccgacatggtccccacatgcagcgcactggctcggaagccagacaagctcaccatcctccgcatggccgtctcgcacatgaagtccatgaggggtacagggaacaagtccaccgatggcgcgtacaagccttccttcctcacagagcaggaactgaagcatctcatccttgaagcagctgatggatttctgtttgtggtggctgctgagacagggcgagtgatttatgtgtctgactccgtcacccctgttctgaaccagccccagtcagagtggtttgggagcacactgtatgaacaggtgcatcctgatgacgtggagaagctgagagagcaactgtgcacctcagaaaactcaatgacaggccggatcttggacctgaagactgggacggtcaagaaagaagggcagcagtcatccatgaggatgtgcatgggctcgcggcggtctttcatctgcaggatgaggtgtggaaatgctcctttggaccaccttcctctaaacagaataaccaccatgaggaaaaggttcaggaatggccttggccctgtgaaagaaggagaagcccaatatgctgtggtccactgtacaggatacatcaaggcctggccaccagcaggaatgaccatacctgaagaagacgctgatgtgggacaaggcagtaaatattgcctcgtggcaattgggagactccaggtgaccagctctcctgtatgcatggacatgaatgggatgtcggtgcccacagagttcttatcccggcataactccgatggaatcatcacatttgtggatccaagatgtatcagtgtgattggctaccaaccccaggatcttctgggaaaggacattttggaattctgccaccctgaggatcaaagccatctgcgtgagagcttccagcaggtggttaagctgaaaggccaagtcctgtcggtcatgtatcgatttcgcaccaagaaccgggagtggatgttgatccgcaccagcagcttcacattccagaatccctattctgatgagattgagtacatcatctgcaccaacaccaacgtcaagcaacttcagcaacagcaggcagaattggaagtgcaccagagagatggattgtcatcgtatgacttatcccaggtccccgtccccaacctaccagccggtgttcatgaggccgggaagtccgtggaaaaggcggatgcaatcttctcccaggaaagagatcctcggtttgctgaaatgtttgcaggaattagtgcatcggagaagaagatgatgagctcagcctctgcagcaggaacccagcagatctactcccaaggaagcccatttccctctggacactccgggaaggccttcagctcttcagtggttcatgtgcctggagtgaatgatattcagtcctcttcttccacgggccagaacatgtcccaaatctcccggcagctaaaccagagtcaggtggcatggacagggagtcgtccgccctttccgggacagcaaatcccatctcagtccagcaagactcagtcatctccctttgggattggaacgagccacacctacccggcagacccctcttcctacagccccctctccagcccagctacctcctcgccaagtgggaatgcctactccagtcttgccaacaggactccagggttcgctgaaagtggacaaagtagcgggcagttccaagggcggccctcggaagtctggtcgcagtggcaaagccagcaccatggccagcagagcggtgagcagcactcccaccagcagcccggtcagactgaagtgttccaggacatgctgcccatgccaggagatccaaggaatgaatggtggtctccccactcccggcagcactttaggcagcccataagctatgcgagaatgtga

SEQ ID NO: 182712 - DNA, 2458 bp, Artificial Sequence
  derived and/or modified sequence
tgacattttctcagcagaatacaaatgcagctacatttcctcccagaggtttctgacatttcttctacacggataacagattctcctaagaaggtgttggtcacaaggaagaaagatctttgtttaatccctctgaaaagaaatggcttcagacatacctggatctgtgacgttgcccgttgcccccatggcggccaccggacaggtgaggatggcgggggccatgcctgcccgtggaggaaagcggcgttccggaatggacttcgatgatgaagatggtgaaggccccagtaaattttcaagagagaatcatagtgaaatcgaaaggcgcagacggaacaagatgactcagtacatcacggagctctccgacatggtccccacatgcagcgcactggctcggaagccagacaagctcaccatcctccgcatggccgtctcgcacatgaagtccatgaggggtacagggaacaagtccaccgatggcgcgtacaagccttccttcctcacagagcaggaactgaagcatctcatccttgaagcagctgatggatttctgtttgtggtggctgctgagacagggcgagtgatttatgtgtctgactccgtcacccctgttctgaaccagccccagtcagagtggtttgggagcacactgtatgaacaggtgcatcctgatgacgtggagaagctgagagagcaactgtgcacctcagaaaactcaatgacaggccggatcttggacctgaagactgggacggtcaagaaagaagggcagcagtcatccatgaggatgtgcatgggctcgcggcggtctttcatctgcaggatgaggtgtggaaatgctcctttggaccaccttcctctaaacagaataaccaccatgaggaaaaggttcaggaatggccttggccctgtgaaagaaggagaagcccaatatgctgtggtccactgtacaggatacatcaaggcctggccaccagcaggaatgaccatacctgaagaagacgctgatgtgggacaaggcagtaaatattgcctcgtggcaattgggagactccaggtgaccagctctcctgtatgcatggacatgaatgggatgtcggtgcccacagagttcttatcccggcataactccgatggaatcatcacatttgtggatccaagatgtatcagtgtgattggctaccaaccccaggatcttctgggaaaggacattttggaattctgccaccctgaggatcaaagccatctgcgtgagagcttccagcaggtggttaagctgaaaggccaagtcctgtcggtcatgtatcgatttcgcaccaagaaccgggagtggatgttgatccgcaccagcagcttcacattccagaatccctattctgatgagattgagtacatcatctgcaccaacaccaacgtcaagcaacttcagcaacagcaggcagaattggaagtgcaccagagagatggattgtcatcgtatgacttatcccaggtccccgtccccaacctaccagccggtgttcatgaggccgggaagtccgtggaaaaggcggatgcaatcttctcccaggaaagagatcctcggtttgctgaaatgtttgcaggaattagtgcatcggagaagaagatgatgagctcagcctctgcagcaggaacccagcagatctactcccaaggaagcccatttccctctggacactccgggaaggccttcagctcttcagtggttcatgtgcctggagtgaatgatattcagtcctcttcttccacgggccagaacatgtcccaaatctcccggcagctaaaccagagtcaggtggcatggacagggagtcgtccgccctttccgggacagcaaatcccatctcagtccagcaagactcagtcatctccctttgggattggaacgagccacacctacccggcagacccctcttcctacagccccctctccagcccagctacctcctcgccaagtgggaatgcctactccagtcttgccaacaggactccagggttcgctgaaagtggacaaagtagcgggcagttccaagggcggccctcggaagtctggtcgcagtggcaaagccagcaccatggccagcagagcggtgagcagcactcccaccagcagcccggtcagactgaagtgttccaggacatgctgcccatgccaggagatccaacccaggggactggcaactataacatcgaagactttgccgacctgggcatgtttccaccgttttctgagtagctgcggccagagtgaggctcctgctgtacagtgccacccatactgtgatgtcgatgcccatgtgaatgaggcccaccctcgccctgcttgccctgccgcaggccccccaccagaagccatctcccccgctgtgtgtccccaggcgcatcattgctccactctcccctgcagccgcggctgctcggccactgacca

SEQ ID NO: 182713 - DNA, 6690 bp, Artificial Sequence
  derived and/or modified sequence
atctgtgatgacattttctcagcagaatacaaatgcagctacatttcctcccagaggtttctgacatttcttctacacggataacagattctcctaagaaggtgttggtcacaaggaagaaagatctttgtttaatccctctgaaaagtgtaggaggatcaggtgaccaaggttttttagaattttccctttttgggatctgacgccgacacactattttgaggcagtgacatcatctctttcctctggcgtgccctccttgcggctccatcattcaggccttgtcatctctcacctggactgctgtgaccttcattcattcccaggagaagtccagaaatggcttcagacatacctggatctgtgacgttgcccgttgcccccatggcggccaccggacaggtgaggatggcgggggccatgcctgcccgtggaggaaagcggcgttccggaatggacttcgatgatgaagatggtgaaggccccagtaaattttcaagagagaatcatagtgaaatcgaaaggcgcagacggaacaagatgactcagtacatcacggagctctccgacatggtccccacatgcagcgcactggctcggaagccagacaagctcaccatcctccgcatggccgtctcgcacatgaagtccatgaggggtacagggaacaagtccaccgatggcgcgtacaagccttccttcctcacagagcaggaactgaagcatctcatccttgaagcagctgatggatttctgtttgtggtggctgctgagacagggcgagtgatttatgtgtctgactccgtcacccctgttctgaaccagccccagtcagagtggtttgggagcacactgtatgaacaggtgcatcctgatgacgtggagaagctgagagagcaactgtgcacctcagaaaactcaatgacaggccggatcttggacctgaagactgggacggtcaagaaagaagggcagcagtcatccatgaggatgtgcatgggctcgcggcggtctttcatctgcaggatgaggtgtggaaatgctcctttggaccaccttcctctaaacagaataaccaccatgaggaaaaggttcaggaatggccttggccctgtgaaagaaggagaagcccaatatgctgtggtccactgtacaggatacatcaaggcctggccaccagcaggaatgaccatacctgaagaagacgctgatgtgggacaaggcagtaaatattgcctcgtggcaattgggagactccaggtgaccagctctcctgtatgcatggacatgaatgggatgtcggtgcccacagagttcttatcccggcataactccgatggaatcatcacatttgtggatccaagatgtatcagtgtgattggctaccaaccccaggatcttctgggaaaggacattttggaattctgccaccctgaggatcaaagccatctgcgtgagagcttccagcaggtggttaagctgaaaggccaagtcctgtcggtcatgtatcgatttcgcaccaagaaccgggagtggatgttgatccgcaccagcagcttcacattccagaatccctattctgatgagattgagtacatcatctgcaccaacaccaacgtcaagcaacttcagcaacagcaggcagaattggaagtgcaccagagagatggattgtcatcgtatgacttatcccaggtccccgtccccaacctaccagccggtgttcatgaggccgggaagtccgtggaaaaggcggatgcaatcttctcccaggaaagagatcctcggtttgctgaaatgtttgcaggaattagtgcatcggagaagaagatgatgagctcagcctctgcagcaggaacccagcagatctactcccaaggaagcccatttccctctggacactccgggaaggccttcagctcttcagtggttcatgtgcctggagtgaatgatattcagtcctcttcttccacgggccagaacatgtcccaaatctcccggcagctaaaccagagtcaggtggcatggacagggagtcgtccgccctttccgggacagcaaatcccatctcagtccagcaagactcagtcatctccctttgggattggaacgagccacacctacccggcagacccctcttcctacagccccctctccagcccagctacctcctcgccaagtgggaatgcctactccagtcttgccaacaggactccagggttcgctgaaagtggacaaagtagcgggcagttccaagggcggccctcggaagtctggtcgcagtggcaaagccagcaccatggccagcagagcggtgagcagcactcccaccagcagcccggtcagactgaagtgttccaggacatgctgcccatgccaggagatccaacccaggggactggcaactataacatcgaagactttgccgacctgggcatgtttccaccgttttctgagtagctgcggccagagtgaggctcctgctgtacagtgccacccatactgtgatgtcgatgcccatgtgaatgaggcccaccctcgccctgcttgccctgccgcaggccccccaccagaagccatctcccccgctgtgtgtccccaggcgcatcattgctccactctcccctgcagccgcggctgctcggccactgaccaggggccctggcagacattaggggatcagttgtatttattgtattttatctgtgtgtgctcaggaggtgagcctagtgggtccttaagtttggttgtgaataatctcttgatagacaatttatacccatgaaagttcagccaatgcccagagtgaccaagcagcaccagcaggcctgcccaggatgctgaaagcagatttcttcttgatttcacttctgatggatgcatggggctctgggggaatgctgggaaaatgggcaagcagagtgcacagccctcgttctgccagctggagccaagaagcacagagacacagaggcgcctgcccctcagctccgctggtctgtctgtgcatccactgtgccgtgggacatatgtaatttgtgcagtgtgacatggacttgctgtcctaatggatgtgttgtgccttgtgtctgtcatgtgtggccagcgtgattgtatagaatccagagtatgtagagagccaaaatgtgtggccctgtccccaagctcagcaccaccggccatgaccagaggttgctcggcccagggtctgggagctgggctaacaggctgacacttcggcagggtcaccaggaggcacagctaggggcatgctcacatgggtaggtcagttctttggtccaagcctctggtgcagattcaagctcctcctcttagaggaagcagctccttcctcccacaggagccccaagggagcactcaccctcctcccaattggatctgaatagctgtgttcctgatcccacataagcatgtctcatccttgccccactggtgagaggaggaccttgtgcctgcccagagcctgcaggacagcacgccttgaggtcagaggcctggcccttctttacagatgtagatagcagggtaggacgcccaggccttctcacatgggcaccatgaaacactttcttccaggccacctgagccttcgttcttcagcccgactggaggaacagcagctctgggaggcacagagtgcaggtctcaggggcagaagacatgggttccagttctggttctgccacacacccaccggccttgaatttctctggtggtctcaagacaagaacaagagctgactctagaatcttctgcctggctgacctctgagcccatgatccctggcttgctgtgcttctcttggatttgaggagagtttatgaatccatccccctgttttcagggacctctgccttctcccacaccccttacactagtgaggactccttcggcctcttgtgtttccttccttttgtgaccattacgccccctccctgtttcttatcaccagcccatcagcccactgactcccatatggtagaaaaggtaccgtggctgctgcagggcacatggagggacctaccctctgggaaagcccttgtgtccctcccagagtccttcaggtaggccctcgcagatgctgcttgctcagaaacaacccgtgcatccctgcccatggattctgcaggacctagaagagtggcattggttctaggaacctgagagtggagtgaggccagcatgcaggaaggagtttggagagagtgtttgctgtgatccattgaaagctccacattaaaccccagccctgtctggccagggagatccatgtgctcaatgttgctgggggacctacaaaagtcaaacattgctcagtaaaatgcctttggctggtcgccagctgtgcatgactgcagttcctagactctaacttaaccccaactttgcagtttctagagctttttgtctgtaatggtgattgggtctccactgtagatgcatgcagtgttcactccaacctcagaggctttcttgcttctggggaaatggcaggtggttgaaaccctgcacatcctcccagggccagccccagaatgggcctttctctgcctgccctgcccttggggccacctctgcctccagcaggcttgagcttgccccaggccttgggcataattatttccccccaaaaaaggcacaaaaataggttttggatcaaagaagtgtttctcagtgaaatgaaaacagtctttttatagcctttagcttgtgagtttggaagtttggggggtcttatgtttgttttgcctcttctgtttcttggaggagagttgaggcttttcttaggtgcatacacagacccaggtgaacacgctgactgtgaacctgccctgtatccggagctgtgctgggcactgaggggatgcaacaaaattaggagaggatccttgctcccaacgtctacttctcctacctcaacaggggtccagggtgcagtgaactcagttcttggcccttgggtgaggattcatggatgaatgaaagctagacctgatggggaggcattatgactaaataggcccagcctccttcccttccagctctgtcctaggagcataggcgggaaatctgagtagagtctgactgcagtttttgcttatgatttgtaaaagccgtcatggggtcaataagaaaataggggtgatggagggggagaagcccaggactgggagaatcgcacatgccccaggggttttcaccaaggattttcaagacaaactggagtaagaattaaagccccagaggatttaattatcctggtttgcaaaagagcctcccatgccagtaccgcccagccttggaggccggaatgctcatggcccctgtggtctgcttgtccttcagcccatgcccagcagatacctctctgactggagacgggctcaaagctggattagaaaggggagaggcacttgtgactttgtttgactctgtgactcacttcctcgctcacaccttgtttgaactactggactttcaactggctttccttaggtcaggcaagcagacagctccccactgaagaggtctgtacagtgacaacccgggccggcagcaaggacacagatgcagccacagtaaggctccatcaggactgggtcagtgatggcaacaggatggccaaggatggctctagaacactctgtccatgcgtcactccccccagttttatttttagctttggcttcagggagtgacagccatcacaaatagccacattctgctctactctccaacataccagattctacactgttgttatttcatgagacgtgaatgttgcagagagtggggggattctggttgttaaggaacttacactggggagctttactcttccgtgtcaacaatgtgactacatgttctccagattagccacacatgcaaacatcagtgtccttctagctttagccgagaaagaaaccagtcccagggaatgaatggtggtctccccactcccggcagcactttaggcagcccataagctatgcgagaatgtgaacgctcaccttgctccgtcacggttctgacctaccacataaacaggaagaagccagtgaccggaacagctctaggaataacaagtcagaatagaagtgtcctttatattaccagaaaatatgggcttggcctaagtcgctgtctcctaacctgccggggtcattccccaccaaacaccccatactaaggagccatgagccacctggacattcaccttttctttgaccatctggagtctggggcaacttaaggaggcaccacacagtggtgcaggcacatttccaagcgtaggtgtccctggcttttgtggccaaagctagtgttatggtcaacaacaggccagggtctgtggggcactgaccttgaaagtggcaaaatggaggtttcacaggctgtgcgggagcaggacggcttgcttcatctaacaatctcagtttcctttaaaaaaagaaagaaaggaaaagatttcataagcaggtgtcagtggacagtttaagtacttaaccatttctctttcttcttatggatgtgaactgtgctgtggataaatcatttgtatttcttgaatgttctctatgactaacagttattaagtcggttgtgtatatgtgtaactaatgtaactgccttttaaaatttcattacaataaaaatgactttgctctg

SEQ ID NO: 182714 - DNA, 6409 bp, Artificial Sequence
  derived and/or modified sequence
gcgggcgcctatcctctccgagcaagatggcaaccccggcggcggtcaaccctccggaaatggcttcagacatacctggatctgtgacgttgcccgttgcccccatggcggccaccggacaggtgaggatggcgggggccatgcctgcccgtggaggaaagcggcgttccggaatggacttcgatgatgaagatggtgaaggccccagtaaattttcaagagagaatcatagtgaaatcgaaaggcgcagacggaacaagatgactcagtacatcacggagctctccgacatggtccccacatgcagcgcactggctcggaagccagacaagctcaccatcctccgcatggccgtctcgcacatgaagtccatgaggggtacagggaacaagtccaccgatggcgcgtacaagccttccttcctcacagagcaggaactgaagcatctcatccttgaagcagctgatggatttctgtttgtggtggctgctgagacagggcgagtgatttatgtgtctgactccgtcacccctgttctgaaccagccccagtcagagtggtttgggagcacactgtatgaacaggtgcatcctgatgacgtggagaagctgagagagcaactgtgcacctcagaaaactcaatgacaggccggatcttggacctgaagactgggacggtcaagaaagaagggcagcagtcatccatgaggatgtgcatgggctcgcggcggtctttcatctgcaggatgaggtgtggaaatgctcctttggaccaccttcctctaaacagaataaccaccatgaggaaaaggttcaggaatggccttggccctgtgaaagaaggagaagcccaatatgctgtggtccactgtacaggatacatcaaggcctggccaccagcaggaatgaccatacctgaagaagacgctgatgtgggacaaggcagtaaatattgcctcgtggcaattgggagactccaggtgaccagctctcctgtatgcatggacatgaatgggatgtcggtgcccacagagttcttatcccggcataactccgatggaatcatcacatttgtggatccaagatgtatcagtgtgattggctaccaaccccaggatcttctgggaaaggacattttggaattctgccaccctgaggatcaaagccatctgcgtgagagcttccagcaggtggttaagctgaaaggccaagtcctgtcggtcatgtatcgatttcgcaccaagaaccgggagtggatgttgatccgcaccagcagcttcacattccagaatccctattctgatgagattgagtacatcatctgcaccaacaccaacgtcaagcaacttcagcaacagcaggcagaattggaagtgcaccagagagatggattgtcatcgtatgacttatcccaggtccccgtccccaacctaccagccggtgttcatgaggccgggaagtccgtggaaaaggcggatgcaatcttctcccaggaaagagatcctcggtttgctgaaatgtttgcaggaattagtgcatcggagaagaagatgatgagctcagcctctgcagcaggaacccagcagatctactcccaaggaagcccatttccctctggacactccgggaaggccttcagctcttcagtggttcatgtgcctggagtgaatgatattcagtcctcttcttccacgggccagaacatgtcccaaatctccggcagctaaaccagagtcaggtggcatggacagggagtcgtccgccctttccgggacagcaaatcccatctcagtccagcaagactcagtcatctccctttgggattggaacgagccacacctacccggcagacccctcttcctacagccccctctccagcccagctacctcctcgccaagtgggaatgcctactccagtcttgccaacaggactccagggttcgctgaaagtggacaaagtagcgggcagttccaagggcggccctcggaagtctggtcgcagtggcaaagccagcaccatggccagcagagcggtgagcagcactcccaccagcagcccggtcagactgaagtgttccaggacatgctgcccatgccaggagatccaacccaggggactggcaactataacatcgaagactttgccgacctgggcatgtttccaccgttttctgagtagctgcggccagagtgaggctcctgctgtacagtgccacccatactgtgatgtcgatgcccatgtgaatgaggcccaccctcgccctgcttgccctgccgcaggccccccaccagaagccatctcccccgctgtgtgtccccaggcgcatcattgctccactctcccctgcagccgcggctgctcggccactgaccaggggccctggcagacattaggggatcagttgtatttattgtattttatctgtgtgtgctcaggaggtgagcctagtgggtccttaagtttggttgtgaataatctcttgatagacaatttatacccatgaaagttcagccaatgcccagagtgaccaagcagcaccagcaggcctgcccaggatgctgaaagcagatttcttcttgatttcacttctgatggatgcatggggctctgggggaatgctgggaaaatgggcaagcagagtgcacagccctcgttctgccagctggagccaagaagcacagagacacagaggcgcctgcccctcagctccgctggtctgtctgtgcatccactgtgccgtgggacatatgtaatttgtgcagtgtgacatggacttgctgtcctaatggatgtgttgtgccttgtgtctgtcatgtgtggccagcgtgattgtatagaatccagagtatgtagagagccaaaatgtgtggccctgtccccaagctcagcaccaccggccatgaccagaggttgctcggcccagggtctgggagctgggctaacaggctgacacttcggcagggtcaccaggaggcacagctaggggcatgctcacatgggtaggtcagttctttggtccaagcctctggtgcagattcaagctcctcctcttagaggaagcagctccttcctcccacaggagccccaagggagcactcaccctcctcccaattggatctgaatagctgtgttcctgatcccacataagcatgtctcatccttgccccactggtgagaggaggaccttgtgcctgcccagagcctgcaggacagcacgccttgaggtcagaggcctggcccttctttacagatgtagatagcagggtaggacgcccaggccttctcacatgggcaccatgaaacactttcttccaggccacctgagccttcgttcttcagcccgactggaggaacagcagctctgggaggcacagagtgcaggtctcaggggcagaagacatgggttccagttctggttctgccacacacccaccggccttgaatttctctggtggtctcaagacaagaacaagagctgactctagaatcttctgcctggctgacctctgagcccatgatccctggcttgctgtgcttctcttggatttgaggagagtttatgaatccatccccctgttttcagggacctctgccttctcccacaccccttacactagtgaggactccttcggcctcttgtgtttccttccttttgtgaccattacgccccctccctgtttcttatcaccagcccatcagcccactgactcccatatggtagaaaaggtaccgtggctgctgcagggcacatggagggacctaccctctgggaaagcccttgtgtccctcccagagtccttcaggtaggccctcgcagatgctgcttgctcagaaacaacccgtgcatccctgcccatggattctgcaggacctagaagagtggcattggttctaggaacctgagagtggagtgaggccagcatgcaggaaggagtttggagagagtgtttgctgtgatccattgaaagctccacattaaaccccagccctgtctggccagggagatccatgtgctcaatgttgctgggggacctacaaaagtcaaacattgctcagtaaaatgcctttggctggtcgccagctgtgcatgactgcagttcctagactctaacttaaccccaactttgcagtttctagagctttttgtctgtaatggtgattgggtctccactgtagatgcatgcagtgttcactccaacctcagaggctttcttgcttctggggaaatggcaggtggttgaaaccctgcacatcctcccagggccagccccagaatgggcctttctctgcctgccctgcccttggggccacctctgcctccagcaggcttgagcttgccccaggccttgggcataattatttccccccaaaaaaggcacaaaaataggttttggatcaaagaagtgtttctcagtgaaatgaaaacagtctttttatagcctttagcttgtgagtttggaagtttggggggtcttatgtttgttttgcctcttctgtttcttggaggagagttgaggcttttcttaggtgcatacacagacccaggtgaacacgctgactgtgaacctgccctgtatccggagctgtgctgggcactgaggggatgcaacaaaattaggagaggatccttgctcccaacgtctacttctcctacctcaacaggggtccagggtgcagtgaactcagttcttggcccttgggtgaggattcatggatgaatgaaagctagacctgatggggaggcattatgactaaataggcccagcctccttcccttccagctctgtcctaggagcataggcgggaaatctgagtagagtctgactgcagtttttgcttatgatttgtaaaagccgtcatggggtcaataagaaaataggggtgatggagggggagaagcccaggactgggagaatcgcacatgccccaggggttttcaccaaggattttcaagacaaactggagtaagaattaaagccccagaggatttaattatcctggtttgcaaaagagcctcccatgccagtaccgcccagccttggaggccggaatgctcatggcccctgtggtctgcttgtccttcagcccatgcccagcagatacctctctgactggagacgggctcaaagctggattagaaaggggagaggcacttgtgactttgtttgactctgtgactcacttcctcgctcacaccttgtttgaactactggactttcaactggctttccttaggtcaggcaagcagacagctccccactgaagaggtctgtacagtgacaacccgggccggcagcaaggacacagatgcagccacagtaaggctccatcaggactgggtcagtgatggcaacaggatggccaaggatggctctagaacactctgtccatgcgtcactccccccagttttatttttagctttggcttcagggagtgacagccatcacaaatagccacattctgctctactctccaacataccagattctacactgttgttatttcatgagacgtgaatgttgcagagagtggggggattctggttgttaaggaacttacactggggagctttactcttccgtgtcaacaatgtgactacatgttctccagattagccacacatgcaaacatcagtgtccttctagctttagccgagaaagaaaccagtcccagggaatgaatggtggtctccccactcccggcagcactttaggcagcccataagctatgcgagaatgtgaacgctcaccttgctccgtcacggttctgacctaccacataaacaggaagaagccagtgaccggaacagctctaggaataacaagtcagaatagaagtgtcctttatattaccagaaaatatgggcttggcctaagtcgctgtctcctaacctgccggggtcattccccaccaaacaccccatactaaggagccatgagccacctggacattcaccttttctttgaccatctggagtctggggcaacttaaggaggcaccacacagtggtgcaggcacatttccaagcgtaggtgtccctggcttttgtggccaaagctagtgttatggtcaacaacaggccagggtctgtggggcactgaccttgaaagtggcaaaatggaggtttcacaggctgtgcgggagcaggacggcttgcttcatctaacaatctcagtttcctttaaaaaaagaaagaaaggaaaagatttcataagcaggtgtcagtggacagtttaagtacttaaccatttctctttcttcttatggatgtgaactgtgctgtggataaatcatttgtatttcttgaatgttctctatgactaacagttattaagtcggttgtgtatatgtgtaactaatgtaactgccttttaaaatttcattacaataaaaatgactttgctctg

SEQ ID NO: 182715 - DNA, 2154 bp, Artificial Sequence
  derived and/or modified sequence
atggccacccccgccgccgtgaacccccccgagatggccagcgacatccccggcagcgtgaccctgcccgtggcccccatggccgccaccggccaggtgagaatggccggcgccatgcccgccagaggcggcaagagaagaagcggcatggacttcgacgacgaggacggcgagggccccagcaagttcagcagagagaaccacagcgagatcgagagaagaagaagaaacaagatgacccagtacatcaccgagctgagcgacatggtgcccacctgcagcgccctggccagaaagcccgacaagctgaccatcctgagaatggccgtgagccacatgaagagcatgagaggcaccggcaacaagagcaccgacggcgcctacaagcccagcttcctgaccgagcaggagctgaagcacctgatcctggaggccgccgacggcttcctgttcgtggtggccgccgagaccggcagagtgatctacgtgagcgacagcgtgacccccgtgctgaaccagccccagagcgagtggttcggcagcaccctgtacgagcaggtgcaccccgacgacgtggagaagctgagagagcagctgtgcaccagcgagaacagcatgaccggcagaatcctggacctgaagaccggcaccgtgaagaaggagggccagcagagcagcatgagaatgtgcatgggcagcagaagaagcttcatctgcagaatgagatgcggcaacgcccccctggaccacctgcccctgaacagaatcaccaccatgagaaagagattcagaaacggcctgggccccgtgaaggagggcgaggcccagtacgccgtggtgcactgcaccggctacatcaaggcctggccccccgccggcatgaccatccccgaggaggacgccgacgtgggccagggcagcaagtactgcctggtggccatcggcagactgcaggtgaccagcagccccgtgtgcatggacatgaacggcatgagcgtgcccaccgagttcctgagcagacacaacagcgacggcatcatcaccttcgtggaccccagatgcatcagcgtgatcggctaccagccccaggacctgctgggcaaggacatcctggagttctgccaccccgaggaccagagccacctgagagagagcttccagcaggtggtgaagctgaagggccaggtgctgagcgtgatgtacagattcagaaccaagaacagagagtggatgctgatcagaaccagcagcttcaccttccagaacccctacagcgacgagatcgagtacatcatctgcaccaacaccaacgtgaagcagctgcagcagcagcaggccgagctggaggtgcaccagagagacggcctgagcagctacgacctgagccaggtgcccgtgcccaacctgcccgccggcgtgcacgaggccggcaagagcgtggagaaggccgacgccatcttcagccaggagagagaccccagattcgccgagatgttcgccggcatcagcgccagcgagaagaagatgatgagcagcgccagcgccgccggcacccagcagatctacagccagggcagccccttccccagcggccacagcggcaaggccttcagcagcagcgtggtgcacgtgcccggcgtgaacgacatccagagcagcagcagcaccggccagaacatgagccagatcagcagacagctgaaccagagccaggtggcctggaccggcagcagaccccccttccccggccagcagatccccagccagagcagcaagacccagagcagccccttcggcatcggcaccagccacacctaccccgccgaccccagcagctacagccccctgagcagccccgccaccagcagccccagcggcaacgcctacagcagcctggccaacagaacccccggcttcgccgagagcggccagagcagcggccagttccagggcagacccagcgaggtgtggagccagtggcagagccagcaccacggccagcagagcggcgagcagcacagccaccagcagcccggccagaccgaggtgttccaggacatgctgcccatgcccggcgaccccacccagggcaccggcaactacaacatcgaggacttcgccgacctgggcatgttcccccccttcagcgagtag

SEQ ID NO: 182716 - DNA, 2118 bp, Artificial Sequence
  derived and/or modified sequence
atggccagcgacatccccggcagcgtgaccctgcccgtggcccccatggccgccaccggccaggtgagaatggccggcgccatgcccgccagaggcggcaagagaagaagcggcatggacttcgacgacgaggacggcgagggccccagcaagttcagcagagagaaccacagcgagatcgagagaagaagaagaaacaagatgacccagtacatcaccgagctgagcgacatggtgcccacctgcagcgccctggccagaaagcccgacaagctgaccatcctgagaatggccgtgagccacatgaagagcatgagaggcaccggcaacaagagcaccgacggcgcctacaagcccagcttcctgaccgagcaggagctgaagcacctgatcctggaggccgccgacggcttcctgttcgtggtggccgccgagaccggcagagtgatctacgtgagcgacagcgtgacccccgtgctgaaccagccccagagcgagtggttcggcagcaccctgtacgagcaggtgcaccccgacgacgtggagaagctgagagagcagctgtgcaccagcgagaacagcatgaccggcagaatcctggacctgaagaccggcaccgtgaagaaggagggccagcagagcagcatgagaatgtgcatgggcagcagaagaagcttcatctgcagaatgagatgcggcaacgcccccctggaccacctgcccctgaacagaatcaccaccatgagaaagagattcagaaacggcctgggccccgtgaaggagggcgaggcccagtacgccgtggtgcactgcaccggctacatcaaggcctggccccccgccggcatgaccatccccgaggaggacgccgacgtgggccagggcagcaagtactgcctggtggccatcggcagactgcaggtgaccagcagccccgtgtgcatggacatgaacggcatgagcgtgcccaccgagttcctgagcagacacaacagcgacggcatcatcaccttcgtggaccccagatgcatcagcgtgatcggctaccagccccaggacctgctgggcaaggacatcctggagttctgccaccccgaggaccagagccacctgagagagagcttccagcaggtggtgaagctgaagggccaggtgctgagcgtgatgtacagattcagaaccaagaacagagagtggatgctgatcagaaccagcagcttcaccttccagaacccctacagcgacgagatcgagtacatcatctgcaccaacaccaacgtgaagcagctgcagcagcagcaggccgagctggaggtgcaccagagagacggcctgagcagctacgacctgagccaggtgcccgtgcccaacctgcccgccggcgtgcacgaggccggcaagagcgtggagaaggccgacgccatcttcagccaggagagagaccccagattcgccgagatgttcgccggcatcagcgccagcgagaagaagatgatgagcagcgccagcgccgccggcacccagcagatctacagccagggcagccccttccccagcggccacagcggcaaggccttcagcagcagcgtggtgcacgtgcccggcgtgaacgacatccagagcagcagcagcaccggccagaacatgagccagatcagcagacagctgaaccagagccaggtggcctggaccggcagcagaccccccttccccggccagcagatccccagccagagcagcaagacccagagcagccccttcggcatcggcaccagccacacctaccccgccgaccccagcagctacagccccctgagcagccccgccaccagcagccccagcggcaacgcctacagcagcctggccaacagaacccccggcttcgccgagagcggccagagcagcggccagttccagggcagacccagcgaggtgtggagccagtggcagagccagcaccacggccagcagagcggcgagcagcacagccaccagcagcccggccagaccgaggtgttccaggacatgctgcccatgcccggcgaccccagaaacgagtggtggagcccccacagcagacagcacttcagacagcccatcagctacgccagaatgtag

SEQ ID NO: 182717 - DNA, 2121 bp, Artificial Sequence
  derived and/or modified sequence
atggccagcgacatccccggcagcgtgaccctgcccgtggcccccatggccgccaccggccaggtgagaatggccggcgccatgcccgccagaggcggcaagagaagaagcggcatggacttcgacgacgaggacggcgagggccccagcaagttcagcagagagaaccacagcgagatcgagagaagaagaagaaacaagatgacccagtacatcaccgagctgagcgacatggtgcccacctgcagcgccctggccagaaagcccgacaagctgaccatcctgagaatggccgtgagccacatgaagagcatgagaggcaccggcaacaagagcaccgacggcgcctacaagcccagcttcctgaccgagcaggagctgaagcacctgatcctggaggccgccgacggcttcctgttcgtggtggccgccgagaccggcagagtgatctacgtgagcgacagcgtgacccccgtgctgaaccagccccagagcgagtggttcggcagcaccctgtacgagcaggtgcaccccgacgacgtggagaagctgagagagcagctgtgcaccagcgagaacagcatgaccggcagaatcctggacctgaagaccggcaccgtgaagaaggagggccagcagagcagcatgagaatgtgcatgggcagcagaagaagcttcatctgcagaatgagatgcggcaacgcccccctggaccacctgcccctgaacagaatcaccaccatgagaaagagattcagaaacggcctgggccccgtgaaggagggcgaggcccagtacgccgtggtgcactgcaccggctacatcaaggcctggccccccgccggcatgaccatccccgaggaggacgccgacgtgggccagggcagcaagtactgcctggtggccatcggcagactgcaggtgaccagcagccccgtgtgcatggacatgaacggcatgagcgtgcccaccgagttcctgagcagacacaacagcgacggcatcatcaccttcgtggaccccagatgcatcagcgtgatcggctaccagccccaggacctgctgggcaaggacatcctggagttctgccaccccgaggaccagagccacctgagagagagcttccagcaggtggtgaagctgaagggccaggtgctgagcgtgatgtacagattcagaaccaagaacagagagtggatgctgatcagaaccagcagcttcaccttccagaacccctacagcgacgagatcgagtacatcatctgcaccaacaccaacgtgaagcagctgcagcagcagcaggccgagctggaggtgcaccagagagacggcctgagcagctacgacctgagccaggtgcccgtgcccaacctgcccgccggcgtgcacgaggccggcaagagcgtggagaaggccgacgccatcttcagccaggagagagaccccagattcgccgagatgttcgccggcatcagcgccagcgagaagaagatgatgagcagcgccagcgccgccggcacccagcagatctacagccagggcagccccttccccagcggccacagcggcaaggccttcagcagcagcgtggtgcacgtgcccggcgtgaacgacatccagagcagcagcagcaccggccagaacatgagccagatcagcagacagctgaaccagagccaggtggcctggaccggcagcagaccccccttccccggccagcagatccccagccagagcagcaagacccagagcagccccttcggcatcggcaccagccacacctaccccgccgaccccagcagctacagccccctgagcagccccgccaccagcagccccagcggcaacgcctacagcagcctggccaacagaacccccggcttcgccgagagcggccagagcagcggccagttccagggcagacccagcgaggtgtggagccagtggcagagccagcaccacggccagcagagcggcgagcagcacagccaccagcagcccggccagaccgaggtgttccaggacatgctgcccatgcccggcgaccccacccagggcaccggcaactacaacatcgaggacttcgccgacctgggcatgttcccccccttcagcgagtag

SEQ ID NO: 182718 - DNA, 1701 bp, Artificial Sequence
  derived and/or modified sequence
atggccacccccgccgccgtgaacccccccgagatggccagcgacatccccggcagcgtgaccctgcccgtggcccccatggccgccaccggccaggtgagaatggccggcgccatgcccgccagaggcggcaagagaagaagcggcatggacttcgacgacgaggacggcgagggccccagcaagttcagcagagagaaccacagcgagatcgagagaagaagaagaaacaagatgacccagtacatcaccgagctgagcgacatggtgcccacctgcagcgccctggccagaaagcccgacaagctgaccatcctgagaatggccgtgagccacatgaagagcatgagaggcaccggcaacaagagcaccgacggcgcctacaagcccagcttcctgaccgagcaggagctgaagcacctgatcctggaggccgccgacggcttcctgttcgtggtggccgccgagaccggcagagtgatctacgtgagcgacagcgtgacccccgtgctgaaccagccccagagcgagtggttcggcagcaccctgtacgagcaggtgcaccccgacgacgtggagaagctgagagagcagctgtgcaccagcgagaacagcatgaccggcagaatcctggacctgaagaccggcaccgtgaagaaggagggccagcagagcagcatgagaatgtgcatgggcagcagaagaagcttcatctgcagaatgagatgcggcaacgcccccctggaccacctgcccctgaacagaatcaccaccatgagaaagagattcagaaacggcctgggccccgtgaaggagggcgaggcccagtacgccgtggtgcactgcaccggctacatcaaggcctggccccccgccggcatgaccatccccgaggaggacgccgacgtgggccagggcagcaagtactgcctggtggccatcggcagactgcaggtgaccagcagccccgtgtgcatggacatgaacggcatgagcgtgcccaccgagttcctgagcagacacaacagcgacggcatcatcaccttcgtggaccccagatgcatcagcgtgatcggctaccagccccaggacctgctgggcaaggacatcctggagttctgccaccccgaggaccagagccacctgagagagagcttccagcaggtggtgaagctgaagggccaggtgctgagcgtgatgtacagattcagaaccaagaacagagagtggatgctgatcagaaccagcagcttcaccttccagaacccctacagcgacgagatcgagtacatcatctgcaccaacaccaacgtgaagcagctgcagcagcagcaggccgagctggaggtgcaccagagagacggcctgagcagctacgacctgagccaggtgcccgtgcccaacctgcccgccggcgtgcacgaggccggcaagagcgtggagaaggccgacgccatcttcagccaggagagagaccccagattcgccgagatgttcgccggcatcagcgccagcgagaagaagatgatgagcagcgccagcgccgccggcacccagcagatctacagccagggcagccccttccccagcggccacagcggcaaggccttcagcagcagcgtggtgcacgtgcccggcgtgaacgacatccagagcagcagcagcaccggccagaacatgagccagatcagcggcagctag

SEQ ID NO: 182719 - protein, 409 aa, Artificial Sequence
  derived and/or modified sequence
MKLKQRVVLLAILLVIFIFTKVFLIDNLDTSAANREDQRAFHRMMTGLRVELAPKLDHTLQSPWEIAAQWVVPREVYPEETPELGAVMHAMATKKIIKADVGYKGTQLKALLILEGGQKVVFKPKRYSRDHVVEGEPYAGYDRHNAEVAAFHLDRILGFHRAPLVVGRFVNLRTEIKPVATEQLLSTFLTVGNNTCFYGKCYYCRETEPACADGDIMEGSVTLWLPDVWPLQKHRHPWGRTYREGKLARWEYDESYCDAVKKTSPYDSGPRLLDIIDTAVFDYLIGNADRHHYESFQDDEGASMLILLDNAKSFGNPSLDERSILAPLYQCCIIRVSTWNRLNYLKNGVLKSALKSAMAHDPISPVLSDPHLDAVDQRLLSVLATVKQCTDQFGMDTVLVEDRMPLSHL

SEQ ID NO: 182720 - protein, 138 aa, Artificial Sequence
  derived and/or modified sequence
MKLKQRVVLLAILLVIFIFTKVFLIDNLDTSAANREDQRAFHRMMTGLRVELAPKLDHTLQSPWEIAAQWVVPREVYPEETPELGAVMHAMATKKIIKADVGYKGTQLKALLILEGGQKVVFKPKRYSRDHVVEGEPY

SEQ ID NO: 182721 - DNA, 5984 bp, Artificial Sequence
  derived and/or modified sequence
gtgtgggactgccgctctgcgcggcgagaggtggcctgggaatggccgggccgggggtgggccggagccgctgtggcggcggcggcggctgggggcggtgagcgcggcgtggggctgcccctccccggaggcggcgggggcggccggggccgcgccgcaccgcaccgcgcgggcggccatggagcgagcctagggcccgacaggaactgtggaaggtgcatcagtgaagaaatggaccaatgtgtataatcatggaatctccttgctaaccatcaccaccagctctccttaatacatgagcaagagtgggtcaggggagaaggaaaagaggtcaacatgaagctaaagcagcgagtcgtgctgttagcaattctccttgtcatttttatcttcaccaaagttttcctgattgacaacttagatacatcagctgccaaccgggaggaccagagggcctttcaccgaatgatgactggcttgcgggtggagctggcacccaagctggaccataccttgcagtctccctgggagattgcagcccagtgggtggttccccgggaagtgtaccctgaagagacaccagagctgggggcagtcatgcatgccatggccaccaagaaaatcattaaagctgatgtgggttataaagggacacagctgaaagccttactgatacttgaaggaggccagaaagttgttttcaaacctaagcggtatagccgagaccatgtggtggaaggggaaccgtatgctggttatgatagacacaatgcagaggtagcagcctttcacttggacaggattctgggtttccaccgagcccccttggtagttggcagatttgttaatcttcggacagagatcaaacctgtcgccacagagcagctgttgagcaccttcctaactgtaggaaacaatacttgtttttatgggaagtgctattactgccgagaaacagaaccagcttgtgctgatggagacataatggagggatctgtcacactttggcttccagatgtgtggcctctgcagaagcaccgtcacccatggggcaggacttaccgagaaggcaaattggccaggtgggagtatgatgagagctactgtgatgctgtgaagaaaacgtccccttatgactctggcccgcgcctcttggacatcattgacacagctgtctttgattacctgattggcaatgctgaccgccatcactatgagagctttcaagatgatgaaggcgctagtatgctcatccttcttgataatgccaaaagctttgggaacccctcgctggatgaaagaagcattcttgcccctctctatcagtgttgcatcattcgggtgtccacctggaacagactgaactacctaaagaatggtgtgctaaagtctgccttaaaatctgccatggcccatgaccccatctccccagtgctctctgatcctcatctggacgccgtggaccagcggctcctgagtgtcctggccaccgtgaagcagtgcaccgaccagtttgggatggacacagtactggtggaagacaggatgcctctctcacacttgtaattctcgacacaaaataagtgaaacttctttttacaaagatagagaaacagcacaatcaattccaaatggtatgagatggattggaagtggccagcagcaagttctggtgacgggacagagtggccttggatgtctttggtattttctgtagtagaaactaaagcaaagaccacaagtttcagagcatggagacattcctgctgaatcgccttctcacctcctcggcaattgctcattctagggttgggcatcatagttggtcagtcttaattcccatgccaaaggacaaacaggtgtgacatttggatagatgaatactgggattggctctggagcatgtgttttgagttgaaccttgcagtcctttctctacgcccgtggattttgtggaaacactttgcaatctctttgtcttttttttttttaccagaactagttacattggaatgcttactgtcctacagagtggcagcaaataaaaccttgcattccatcaagccaaaatagcacactctgttagaggagatacatgtttaagatagaattggagggaaggacaaaaacagaaaaatgtttgggcttttaagccattgggtagtattgttttgatgatcttagaggagggaagaagagagagagacccaatggtagaaccagaatcagggagatgactgaactactgaaaaacaggttcccttgtatttaggatcttaaggtgtataaaaagcaaacatgactttgcacctaagtaaattctgcattctcatagttgtgtcccaattaaccaaaaagttgtctctagagaaaatactattacaatctaagcatgattctctgtggagactaattttttccccttttgccaaaagcagtccttcccaaattaacaaagcaaactgaaataataccttgaataacaggttgcctgtggtctctgtcatcctcgtttctcttctgaaatgaatttccacctctgcctttaaggcatttttgtcactgaagctgctgttcccaagagatcggcaacctttttgtccctttctcataagaaagggacactcctacaggtgagagtgtataccttactctctcagataagtggctggacttatcttgtgatttggggccatggaagattggaaacaaagattttaagccttcttctttttttcttttttcttttttttttgagaccaagtctcactctgttgcccaggctggagtgcagtggcacgatcttggcttactgcaacctccgtctcccaggttcaagcgattctcttgcctcagcctccagagtagctgggattacaggcgcccgccatcgtgcccagctaatttttatatttttagtggagacagggtttcgggtttcaccatgttggccaggttgatcttggactcctgaccccaggtgatccacctgcctcagccttccaaagtgctgggattacaggcatgagccaccgtggccggccaagattttaagccttctgagccttgaaattgaggaggttaaaaggaagagccttaagattttgatttatgtcaaatcctaattctatcattcagtcttgtttggagttctgaacccatgatgttgtattatgcttctttctcctcttagcactctcaaatttcaggtttgtaaaacacagtttttgttttgtgttctggcaaagtgatctcaacatgtaagtagttgcagtaaaacacaggggcaaaggaagacaggcctgatgtgcccactcatctatggactcagagctgtgtgctttgctcctgcatcttgttgaggtgctgttccagctttgcatttctgtcaagtagaggcgaatatataaacagtgtggttgaatacatttaatgccagccattggaaactagttttaggcaaccactctcaaaaacagctttagaatttatgcccagttttcttgcattgaaagataactgagtaataacctgtaactatttttaaatggcatgaaattaggaaacttttgtacattttatatacattttgagatgaacagaacaatgggctgagttataaaaagcgtgtattgaatttaagaagacagactagcacaaaacacagaattcgtgttaaccaaaggaggcattgatttcagttttaaggctactcagtgttgtgtgtccagggaaattcacagctcagtatgagaataccttggttagtgctcacccacaagcttccaggagccagctgggaggagacaataggaagagatgtcatctctgctctccctgtaaatgttagttgaactaagttatggatttgtggtctttcaaatacatgacgcctttagtatgccacactgaaatgaataagaagtcttctgaaactgggaacttcataacattgaaggcagaagattctgctaaggaaaaaagcaggcaggaaagaaaatgtctcatcctttcttgaaagcatttgcagaaaatatatcatttcattttattcccatctgttttcaaactcgtgatcttaaaaggcattctgatgataaatttagaattttcatctataaaatttagaactctaatccataaagttagaattgagctaatagagtggtatgacatggcactaaaaatataaatttttgttgtaagtcaggattggagtaagctggaaaagtatgtttaggcaaatcttggagaaaaccaaccataaacttacagctctaaaattcagaaagccctaaaatttcaaacactgtttgaaagaagaggtgggggccgggtgccgtggctcatgcctgtcatcccagcatttgggaggctgaggcaggcagatcacctgaggccaggagttcgagaccagcctggctggctagcatggtgagaccgtctctactaaaaatgcaaaaattaacagggcacggtggcatgcgcctgtagtcccagctactcgggaggctgaggcaggagaatcacttgaatccaggaggcgaaggttgcagtgagctgagattgtgctgctgcactccagcctgggagacagagcgagactctgtcttaaaaaaaaaaaaaggaggtgaatttttttttaagttttgtaacactgtcctactttatttattagaatctaaggctgttacaatcaagtcgttgcagggtttggatcagctgtaagttaggtatgcctaccaaacatccaaaggtagacgtggagacattttaatactacaaaactaggaaaatcagaactcatggccatttcctgccctcctccaacttgttaaaacatgtttattctaaagttcgaatggataaatttgagtataaaggttttgttataaaactgttctttagtgtaaggctgcattgtgggtttgggggaaatgtaaataattttctgtgtaaaacaaattcataggatctgatttgctcagagtattattcaagaatgtattaataaggcattgccccctgtttgcactcagggttaatatgtcaaatgaaatttaagaaggaaatggaagaattcaggtacattaattgcatattattttgggaaagatgagtcctatacgtggcaatttttcaatgtcatctgaagccagcattatcttccaaagaaatcgatcttttttttctaaaaaaaaaaaatgcttttgccttcccttcccttcccatccgccatatttcttcagcctttcttctcgatcacccgtgtattctttgaccagtaaatgaccacacctcaatgatggtaaaacagcatcatcagtaagctatcttatatgcctcatcctgtgagtttgagcttcaggaaacatgagtaaaagtatatgtaatgtatatagtcgtatatgtattctagcaagaaaaacatatttattttgacaaaggggaacactgactttctgaaggattcagaaagaaccttagtgaaaggttctcagtctctgagagtggaccctaattaacataaagaccattcatcagcgaataactactgagcaactctagtgtgccagcacaggccagacatactagtgagccaggcacatctggccttgggaaactcatcctacaggggaaggccagtttttttcccttcaattcctcaagtctgggtggtgacaaggtaggggctaggtactggactaccacaggtttttaggaactaaggtgtttctcataaacacaaaatgttgggtgaaactgggaacaactactcagaagctcatttatttgcttaaatggaaagtgtgggagccactaccctctcttttgatctgccaaggatttcctctcagagctgttgcacagacagagattgtacttggtaagataccaaacaagacagatatggatctaaatttctaatgtgttctatgggtttcaattctgaaaaaagaaaatgaataaagattttaataaat

SEQ ID NO: 182722 - DNA, 603 bp, Artificial Sequence
  derived and/or modified sequence
ggccgcgccgagcgagcgctgggattggccgtcgggcaggcgctacgctaggacggaactgtggaaggtgcatcagtgaagaaatggaccaatgtgtataatcatggaatctccttgctaaccatcaccaccagctctccttaatacatgagcaagagtgggtcaggggagaaggaaaagaggtcaacatgaagctaaagcagcgagtcgtgctgttagcaattctccttgtcatttttatcttcaccaaagttttcctgattgacaacttagatacatcagctgccaaccgggaggaccagagggcctttcaccgaatgatgactggcttgcgggtggagctggcacccaagctggaccataccttgcagtctccctgggagattgcagcccagtgggtggttccccgggaagtgtaccctgaagagacaccagagctgggggcagtcatgcatgccatggccaccaagaaaatcattaaagctgatgtgggttataaagggacacagctgaaagccttactgatacttgaaggaggccagaaagttgttttcaaacctaagcggtatagccgagaccatgtggtggaaggggaaccgtatg

SEQ ID NO: 182723 - DNA, 1230 bp, Artificial Sequence
  derived and/or modified sequence
atgaagctaaagcagcgggtcgtattgctggccatcctcctggtcatatttattttcaccaaggtcttcctcattgataatctagacacctccgctgccaacagggaagaccagcgagctttccacaggatgatgactggtctgcgggtcgagctggctccaaagttggaccacactcttcaaagtccgtgggaaatcgcggctcaatgggtggtaccccgggaggtgtacccagaggaaacccctgaactgggagccgtgatgcacgccatggctaccaagaaaatcattaaggccgatgtgggctacaagggaacccagcttaaggcactgctgatcctggagggcggccagaaagttgttttcaaacccaaacgatactcaagagatcatgtggtcgaaggggaaccgtatgcaggatatgacaggcacaacgcagaggttgctgcgttccacctcgaccgaatcctcgggtttcatcgtgcccctctggtggtcggacgattcgtaaatctgaggaccgaaatcaaacctgtagcgactgagcagctgctctctactttcttaacagtgggtaacaatacgtgtttctacggtaaatgttattactgtagagagacagaaccagcctgcgctgatggcgatatcatggaaggctcagtaacactgtggctgcccgatgtttggccactacagaaacacaggcatccatggggcagaacttaccgggaaggcaaattggcaagatgggaatatgatgaatcttactgcgatgccgtaaaaaagacttctccttacgatagtggccctcgcttgctggacatcatagacacagctgtgttcgattatctgattggcaatgccgatcgccatcattatgaatcatttcaggacgacgagggcgcatccatgctgattctgctcgataacgctaaatcattcggtaacccctctcttgatgaaagatcaattctggcccccctatatcagtgctgcatcatcagggtgagcacatggaaccggcttaattacctcaagaacggtgtgctaaaatctgcactgaagtctgctatggcccatgaccctattagccctgtcctctcagaccctcatttggacgccgtcgaccagcgtctgctgtcagtactggctactgtgaaacagtgcactgatcagtttggaatggacactgtcctcgtggaggatagaatgcccttatctcatctatag

SEQ ID NO: 182724 - DNA, 417 bp, Artificial Sequence
  derived and/or modified sequence
atgaagctgaagcagcgagttgttctgctcgcgattctgttagtgatatttattttcacgaaggtattccttatagataacttagatacttctgccgctaaccgtgaagaccaacgcgcgtttcaccgtatgatgacaggacttagagtggaactggctccgaagctcgaccacacattgcaatccccgtgggaaatcgctgcccagtgggtggtgccaagagaggtgtaccctgaagaaaccccagaactgggtgcagttatgcacgcaatggccacaaaaaaaatcattaaggcagacgtcgggtataaaggcacacagctgaaggcactactgatcttggaggggggtcagaaagtcgtattcaaacccaagcggtattctagggaccacgtagttgagggcgaaccatactag

SEQ ID NO: 182725 - DNA, 1230 bp, Artificial Sequence
  derived and/or modified sequence
atgaagctgaagcagagggtggtgctgctggccatcctgctggtgatcttcatcttcaccaaggtgttcctgattgacaacctggacaccagcgctgccaaccgggaggaccagagggccttccacaggatgatgacaggcctgcgggtggagctggcccccaagctggaccacaccctgcagagcccctgggagattgctgcccagtgggtggtgccccgggaggtgtacccagaggagaccccagagctgggcgctgtgatgcacgccatggccaccaagaagatcatcaaggcagatgtgggctacaagggcacccagctgaaggccctgctgatcctggagggcggccagaaggtggtgttcaagcccaagcgctacagccgggaccacgtggtggagggggagccctatgccggctatgacagacacaatgctgaggtggccgccttccacctggaccgcatcctgggcttccaccgggcccccctggtggtgggccgctttgtgaacctgaggacagagatcaagcctgtggccacagagcagctgctgagcaccttcctgactgtgggcaacaacacctgcttctacggcaagtgctactactgccgggagacagagcccgcctgtgctgatggagacatcatggagggctctgtgaccctgtggctgcctgatgtgtggcccctgcagaagcaccgccacccctggggccgcacctaccgggagggcaagctggcccgctgggagtatgatgagagctactgtgatgctgtgaagaagaccagcccctatgacagcggcccccggctgctggacatcatcgacacagctgtgtttgactacctgattggaaatgctgacagacaccactatgagagcttccaggatgatgaaggagcctccatgctgatcctgctggacaatgccaagagctttggaaaccccagcctggatgagaggagcatcctggcccccctgtaccagtgctgcatcatccgggtgtccacctggaaccggctgaactacctgaagaatggagtgctgaagagcgccctgaagagcgccatggcccatgaccccatcagccctgtgctgagtgacccccacctggatgctgtggaccagaggctgctgtctgtgctggccaccgtgaagcagtgcacagaccagtttggcatggacacagtgctggtggaggacaggatgcccctgagccacctgtag

SEQ ID NO: 182726 - DNA, 417 bp, Artificial Sequence
  derived and/or modified sequence
atgaagctgaagcagagggtggtgctgctggccatcctgctggtgatcttcatcttcaccaaggtgttcctgattgacaacctggacaccagcgctgccaaccgggaggaccagagggccttccacaggatgatgacaggcctgcgggtggagctggcccccaagctggaccacaccctgcagagcccctgggagattgctgcccagtgggtggtgccccgggaggtgtacccagaggagaccccagagctgggcgctgtgatgcacgccatggccaccaagaagatcatcaaggcagatgtgggctacaagggcacccagctgaaggccctgctgatcctggagggcggccagaaggtggtgttcaagcccaagcgctacagccgggaccacgtggtggagggggagccctactag

SEQ ID NO: 182727 - DNA, 1230 bp, Artificial Sequence
  derived and/or modified sequence
atgaagctgaagcagcgggtggtgctgctggccatcctgctggtgattttcatctttacgaaggtgtttttgatcgacaacctagacacgtccgctgccaatcgagaggaccagcgggccttccatcggatgatgaccggtctgagagtggaactggcccccaagctcgatcacacactgcagtccccttgggagatcgccgctcaatgggtcgtgcctagggaagtgtaccccgaagagaccccagagctcggagccgtgatgcacgccatggccaccaagaagataattaaggctgacgtggggtataagggcactcagcttaaagcccttctcattttggaaggtggtcagaaggtagtcttcaaaccaaagagatatagtcgtgatcacgtggtcgagggtgagccgtatgcaggatacgatcggcacaacgccgaggtcgctgccttccatttagatcgcattctcggattccacagggcacctcttgtagtgggacggtttgtcaacctccggactgagatcaaaccagtagctactgagcagcttctgtccactttccttactgtggggaataatacgtgcttctacggcaaatgctactactgtagggagacggagcctgcctgtgcagatggcgatatcatggagggcagcgtgaccctctggctccccgatgtctggcccttgcagaagcaccgccatccatggggcaggacatatcgagagggcaaactcgccaggtgggagtacgatgagtcatattgcgatgctgtcaagaagacaagcccctacgactcaggcccccgtttgctggacatcatcgataccgccgtgttcgattacttgatcggaaatgccgatcggcatcactacgagtctttccaggacgacgaaggggcatctatgctgattttattggacaatgccaaatcatttggcaatccttccctggacgaacggagcatcttggccccactgtatcaatgctgcatcatacgagtgtctacatggaacaggcttaactaccttaaaaatggcgtactgaaatctgccctaaagtctgccatggcacatgatcctatttctccagtccttagcgaccctcacctggatgccgtagatcaaaggctgctgagcgtcctggctacagtcaaacagtgcaccgatcaatttgggatggataccgtgctggtcgaagatagaatgcccttgagccatctttag

SEQ ID NO: 182728 - DNA, 417 bp, Artificial Sequence
  derived and/or modified sequence
atgaagctgaagcagcgggtggtgctgctggccatcctgctggtgattttcattttcacaaaagtattcttgatcgacaatctcgataccagcgcagccaaccgagaggaccagagagctttccaccgaatgatgactggactccgggtggagctcgcgccaaaactggatcatacattgcagagcccctgggaaatagcagcacagtgggtggtgcctagggaagtctatccagaggagaccccagaactgggtgccgtgatgcacgccatggccaccaagaaaatcattaaggccgatgtgggctacaaaggtacacagctgaaggccctcttgatcctggaaggcggtcagaaggtcgtctttaagcctaagaggtactcacgggatcatgtggtggagggcgagccctattag

SEQ ID NO: 182729 - DNA, 1230 bp, Artificial Sequence
  derived and/or modified sequence
atgaagcttaagcagagggtggttctgctggccatcctgttggttattttcatttttacaaaggtgttccttatagataacttagatacttctgctgctaacagggaggaccagcgggcttttcacagaatgatgacggggttacgcgtcgagttggcgcctaagttggatcacacactgcagagcccatgggagattgccgctcagtgggtcgtgcctcgcgaggtgtatccagaagaaacacctgagttgggggctgttatgcacgcaatggctactaagaaaatcatcaaagctgacgtgggatataaaggtacccagttaaaggccctgctgatcctggagggaggacagaaggtggtatttaagcccaaaagatattctagggaccacgtcgtggaaggggagccctacgcaggatacgatagacataacgcagaggttgcggcattccatctggatcgcatcctagggttccacagagctcccctcgtggtggggagatttgtcaatctgcggaccgagatcaaacccgtggcaactgagcaattgctctcaacttttctcacggtgggcaacaacacctgcttttacggaaagtgctattattgcagagagacagaacccgcttgcgccgatggcgacataatggagggatctgtcactctgtggctgccagatgtctggccgctgcagaagcaccgtcacccctggggcaggacgtatcgggaggggaaactggcgaggtgggagtacgatgagagttactgcgatgctgttaaaaagactagcccttatgactcggggcctaggctcctggatataattgataccgccgtctttgattacctgattgggaatgccgaccgacaccactatgaatcttttcaggacgatgagggagccagcatgttaattctgctggacaatgccaagagttttgggaacccgagtctggacgagcggtcaatattggccccactgtatcagtgctgcatcatccgagtttcgacctggaacaggcttaactacctcaaaaatggggtgttgaaatcggccctgaaaagcgccatggctcacgaccctatctcacccgtgctgtctgacccccatttggatgcggtggaccaacgcctattgtccgtgctggcgaccgttaaacaatgcactgatcaattcggcatggataccgtccttgttgaagaccgcatgcctctgtctcacttatag

SEQ ID NO: 182730 - DNA, 417 bp, Artificial Sequence
  derived and/or modified sequence
atgaagctgaagcagcgcgtcgtactgttagccattctgttggtaatcttcatcttcaccaaggtatttctaatcgacaacttagacacgtccgctgcaaacagagaggatcagagggccttccacagaatgatgacagggcttcgagtggagttagcacctaagctggatcatactctgcagagtccatgggaaattgcggctcagtgggttgttccgagggaagtctacccagaggagactcctgaacttggggctgtgatgcatgcgatggctactaagaagatcattaaagctgacgtgggatacaaagggacccagctcaaagcgttattaattctggaaggcggtcagaaggtggtttttaagccgaaacggtattcaagggatcatgttgttgagggggaaccttattag

SEQ ID NO: 182731 - DNA, 1230 bp, Artificial Sequence
  derived and/or modified sequence
atgaagctgaagcagagagtggtgctgctggccatcctgctggtgatcttcatcttcaccaaggtgttcctgatcgacaacctggacaccagcgccgccaacagagaggaccagagagccttccacagaatgatgaccggcctgagagtggagctggcccccaagctggaccacaccctgcagagcccctgggagatcgccgcccagtgggtggtgcccagagaggtgtaccccgaggagacccccgagctgggcgccgtgatgcacgccatggccaccaagaagatcatcaaggccgacgtgggctacaagggcacccagctgaaggccctgctgatcctggagggcggccagaaggtggtgttcaagcccaagagatacagcagagaccacgtggtggagggcgagccctacgccggctacgacagacacaacgccgaggtggccgccttccacctggacagaatcctgggcttccacagagcccccctggtggtgggcagattcgtgaacctgagaaccgagatcaagcccgtggccaccgagcagctgctgagcaccttcctgaccgtgggcaacaacacctgcttctacggcaagtgctactactgcagagagaccgagcccgcctgcgccgacggcgacatcatggagggcagcgtgaccctgtggctgcccgacgtgtggcccctgcagaagcacagacacccctggggcagaacctacagagagggcaagctggccagatgggagtacgacgagagctactgcgacgccgtgaagaagaccagcccctacgacagcggccccagactgctggacatcatcgacaccgccgtgttcgactacctgatcggcaacgccgacagacaccactacgagagcttccaggacgacgagggcgccagcatgctgatcctgctggacaacgccaagagcttcggcaaccccagcctggacgagagaagcatcctggcccccctgtaccagtgctgcatcatcagagtgagcacctggaacagactgaactacctgaagaacggcgtgctgaagagcgccctgaagagcgccatggcccacgaccccatcagccccgtgctgagcgacccccacctggacgccgtggaccagagactgctgagcgtgctggccaccgtgaagcagtgcaccgaccagttcggcatggacaccgtgctggtggaggacagaatgcccctgagccacctgtag

SEQ ID NO: 182732 - DNA, 417 bp, Artificial Sequence
  derived and/or modified sequence
atgaagctgaagcagagagtggtgctgctggccatcctgctggtgatcttcatcttcaccaaggtgttcctgatcgacaacctggacaccagcgccgccaacagagaggaccagagagccttccacagaatgatgaccggcctgagagtggagctggcccccaagctggaccacaccctgcagagcccctgggagatcgccgcccagtgggtggtgcccagagaggtgtaccccgaggagacccccgagctgggcgccgtgatgcacgccatggccaccaagaagatcatcaaggccgacgtgggctacaagggcacccagctgaaggccctgctgatcctggagggcggccagaaggtggtgttcaagcccaagagatacagcagagaccacgtggtggagggcgagccctactag

SEQ ID NO: 182733 - protein, 1401 aa, Artificial Sequence
  derived and/or modified sequence
MAPQMYEFHLPLSPEELLKSGGVNQYVVQEVLSIKHLPPQLRAFQAAFRAQGPLAMLQHFDTIYSILHHFRSIDPGLKEDTLQFLIKVVSRHSQELPAILDDTTLSGSDRNAHLNALKMNCYALIRLLESFETMASQTNLVDLDLGGKGKKARTKAAHGFDWEEERQPILQLLTQLLQLDIRHLWNHSIIEEEFVSLVTGCCYRLLENPTINHQKNRPTREAITHLLGVALTRYNHMLSATVKIIQMLQHFEHLAPVLVAAVSLWATDYGMKSIVGEIVREIGQKCPQELSRDPSGTKGFAAFLTELAERVPAILMSSMCILLDHLDGENYMMRNAVLAAMAEMVLQVLSGDQLEAAARDTRDQFLDTLQAHGHDVNSFVRSRVLQLFTRIVQQKALPLTRFQAVVALAVGRLADKSVLVCKNAIQLLASFLANNPFSCKLSDADLAGPLQKETQKLQEMRAQRRTAAASAVLDPEEEWEAMLPELKSTLQQLLQLPQGEEEIPEQIANTETTEDVKGRIYQLLAKASYKKAIILTREATGHFQESEPFSHIDPEESEETRLLNILGLIFKGPAASTQEKNPRESTGNMVTGQTVCKNKPNMSDPEESRGNDELVKQEMLVQYLQDAYSFSRKITEAIGIISKMMYENTTTVVQEVIEFFVMVFQFGVPQALFGVRRMLPLIWSKEPGVREAVLNAYRQLYLNPKGDSARAKAQALIQNLSLLLVDASVGTIQCLEEILCEFVQKDELKPAVTQLLWERATEKVACCPLERCSSVMLLGMMARGKPEIVGSNLDTLVSIGLDEKFPQDYRLAQQVCHAIANISDRRKPSLGKRHPPFRLPQEHRLFERLRETVTKGFVHPDPLWIPFKEVAVTLIYQLAEGPEVICAQILQGCAKQALEKLEEKRTSQEDPKESPAMLPTFLLMNLLSLAGDVALQQLVHLEQAVSGELCRRRVLREEQEHKTKDPKEKNTSSETTMEEELGLVGATADDTEAELIRGICEMELLDGKQTLAAFVPLLLKVCNNPGLYSNPDLSAAASLALGKFCMISATFCDSQLRLLFTMLEKSPLPIVRSNLMVATGDLAIRFPNLVDPWTPHLYARLRDPAQQVRKTAGLVMTHLILKDMVKVKGQVSEMAVLLIDPEPQIAALAKNFFNELSHKGNAIYNLLPDIISRLSDPELGVEEEPFHTIMKQLLSYITKDKQTESLVEKLCQRFRTSRTERQQRDLAYCVSQLPLTERGLRKMLDNFDCFGDKLSDESIFSAFLSVVGKLRRGAKPEGKAIIDEFEQKLRACHTRGLDGIKELEIGQAGSQRAPSAKKPSTGSRYQPLASTASDNDFVTPEPRRTTRRHPNTQQRASKKKPKVVFSSDESSEEDLSAEMTEDETPKKTTPILRASARRHRS

SEQ ID NO: 182734 - protein, 939 aa, Artificial Sequence
  derived and/or modified sequence
MAPQMYEFHLPLSPEELLKSGGVNQYVVQEVLSIKHLPPQLRAFQAAFRAQGPLAMLQHFDTIYSILHLVTGCCYRLLENPTINHQKNRPTREAITHLLGVALTRYNHMLSATVKIIQMLQHFEHLAPVLVAAVSLWATDYGMKSIVGEIVREIGQKCPQELSRDPSGTKGFAAFLTELAERVPAILMSSMCILLDHLDGENYMMRNAVLAAMAEMVLQVLSGDQLEAAARDTRDQFLDTLQAHGHDVNSFVRSRVLQLFTRIVQQKALPLTRFQAVVALAVGRLADKSVLVCKNAIQLLASFLANNPFSCKLSDADLAGPLQKETQKLQEMRAQRRTAAASAVLDPEEEWEAMLPELKSTLQQLLQLPQGEEEIPEQIANTETTEDVKGRIYQLLAKASYKKAIILTREATGHFQESEPFSHIDPEESEETRLLNILGLIFKGPAASTQEKNPRESTGNMVTGQTVCKNKPNMSDPEESRGNDELVKQEMLVQYLQDAYSFSRKITEAIGIISKMMYENTTTVVQEVIEFFVMVFQFGVPQALFGVRRMLPLIWSKEPGVREAVLNAYRQLYLNPKGDSARAKAQALIQNLSLLLVDASVGTIQCLEEILCEFVQKDELKPAVTQLLWERATEKVACCPLERCSSVMLLGMMARGKPEIVGSNLDTLVSIGLDEKFPQDYRLAQQVCHAIANISDRRKPSLGKRHPPFRLPQEHRLFERLRETVTKGFVHPDPLWIPFKEVAVTLIYQLAEGPEVICAQILQGCAKQALEKLEEKRTSQEDPKESPAMLPTFLLMNLLSLAGDVALQQLVHLEQAVSGELCRRRVLREEQEHKTKDPKEKNTSSETTMEEELGLVGATADDTEAELIRGICEMELLDGKQTLAAFVPLLLKVCNNPGLYSNPDLSAAASLALGKFCMISATFCDSQHFAIPRRVDNLR

SEQ ID NO: 182735 - protein, 1356 aa, Artificial Sequence
  derived and/or modified sequence
MLCKRYCPSNIFHHSLELFRLPFELRGPWLCCSTLILSTAFCMVSRHSQELPAILDDTTLSGSDRNAHLNALKMNCYALIRLLESFETMASQTNLVDLDLGGKGKKARTKAAHGFDWEEERQPILQLLTQLLQLDIRHLWNHSIIEEEFVSLVTGCCYRLLENPTINHQKNRPTREAITHLLGVALTRYNHMLSATVKIIQMLQHFEHLAPVLVAAVSLWATDYGMKSIVGEIVREIGQKCPQELSRDPSGTKGFAAFLTELAERVPAILMSSMCILLDHLDGENYMMRNAVLAAMAEMVLQVLSGDQLEAAARDTRDQFLDTLQAHGHDVNSFVRSRVLQLFTRIVQQKALPLTRFQAVVALAVGRLADKSVLVCKNAIQLLASFLANNPFSCKLSDADLAGPLQKETQKLQEMRAQRRTAAASAVLDPEEEWEAMLPELKSTLQQLLQLPQGEEEIPEQIANTETTEDVKGRIYQLLAKASYKKAIILTREATGHFQESEPFSHIDPEESEETRLLNILGLIFKGPAASTQEKNPRESTGNMVTGQTVCKNKPNMSDPEESRGNDELVKQEMLVQYLQDAYSFSRKITEAIGIISKMMYENTTTVVQEVIEFFVMVFQFGVPQALFGVRRMLPLIWSKEPGVREAVLNAYRQLYLNPKGDSARAKAQALIQNLSLLLVDASVGTIQCLEEILCEFVQKDELKPAVTQLLWERATEKVACCPLERCSSVMLLGMMARGKPEIVGSNLDTLVSIGLDEKFPQDYRLAQQVCHAIANISDRRKPSLGKRHPPFRLPQEHRLFERLRETVTKGFVHPDPLWIPFKEVAVTLIYQLAEGPEVICAQILQGCAKQALEKLEEKRTSQEDPKESPAMLPTFLLMNLLSLAGDVALQQLVHLEQAVSGELCRRRVLREEQEHKTKDPKEKNTSSETTMEEELGLVGATADDTEAELIRGICEMELLDGKQTLAAFVPLLLKVCNNPGLYSNPDLSAAASLALGKFCMISATFCDSQLRLLFTMLEKSPLPIVRSNLMVATGDLAIRFPNLVDPWTPHLYARLRDPAQQVRKTAGLVMTHLILKDMVKVKGQVSEMAVLLIDPEPQIAALAKNFFNELSHKGNAIYNLLPDIISRLSDPELGVEEEPFHTIMKQLLSYITKDKQTESLVEKLCQRFRTSRTERQQRDLAYCVSQLPLTERGLRKMLDNFDCFGDKLSDESIFSAFLSVVGKLRRGAKPEGKAIIDEFEQKLRACHTRGLDGIKELEIGQAGSQRAPSAKKPSTGSRYQPLASTASDNDFVTPEPRRTTRRHPNTQQRASKKKPKVVFSSDESSEEDLSAEMTEDETPKKTTPILRASARRHRS

SEQ ID NO: 182736 - DNA, 4206 bp, Artificial Sequence
  derived and/or modified sequence
atggccccccagatgtacgagttccacctgcccctgagccccgaggagctgctgaagagcggcggcgtgaaccagtacgtggtgcaggaggtgctgagcatcaagcacctgcccccccagctgagagccttccaggccgccttcagagcccagggccccctggccatgctgcagcacttcgacaccatctacagcatcctgcaccacttcagaagcatcgaccccggcctgaaggaggacaccctgcagttcctgatcaaggtggtgagcagacacagccaggagctgcccgccatcctggacgacaccaccctgagcggcagcgacagaaacgcccacctgaacgccctgaagatgaactgctacgccctgatcagactgctggagagcttcgagaccatggccagccagaccaacctggtggacctggacctgggcggcaagggcaagaaggccagaaccaaggccgcccacggcttcgactgggaggaggagagacagcccatcctgcagctgctgacccagctgctgcagctggacatcagacacctgtggaaccacagcatcatcgaggaggagttcgtgagcctggtgaccggctgctgctacagactgctggagaaccccaccatcaaccaccagaagaacagacccaccagagaggccatcacccacctgctgggcgtggccctgaccagatacaaccacatgctgagcgccaccgtgaagatcatccagatgctgcagcacttcgagcacctggcccccgtgctggtggccgccgtgagcctgtgggccaccgactacggcatgaagagcatcgtgggcgagatcgtgagagagatcggccagaagtgcccccaggagctgagcagagaccccagcggcaccaagggcttcgccgccttcctgaccgagctggccgagagagtgcccgccatcctgatgagcagcatgtgcatcctgctggaccacctggacggcgagaactacatgatgagaaacgccgtgctggccgccatggccgagatggtgctgcaggtgctgagcggcgaccagctggaggccgccgccagagacaccagagaccagttcctggacaccctgcaggcccacggccacgacgtgaacagcttcgtgagaagcagagtgctgcagctgttcaccagaatcgtgcagcagaaggccctgcccctgaccagattccaggccgtggtggccctggccgtgggcagactggccgacaagagcgtgctggtgtgcaagaacgccatccagctgctggccagcttcctggccaacaaccccttcagctgcaagctgagcgacgccgacctggccggccccctgcagaaggagacccagaagctgcaggagatgagagcccagagaagaaccgccgccgccagcgccgtgctggaccccgaggaggagtgggaggccatgctgcccgagctgaagagcaccctgcagcagctgctgcagctgccccagggcgaggaggagatccccgagcagatcgccaacaccgagaccaccgaggacgtgaagggcagaatctaccagctgctggccaaggccagctacaagaaggccatcatcctgaccagagaggccaccggccacttccaggagagcgagcccttcagccacatcgaccccgaggagagcgaggagaccagactgctgaacatcctgggcctgatcttcaagggccccgccgccagcacccaggagaagaaccccagagagagcaccggcaacatggtgaccggccagaccgtgtgcaagaacaagcccaacatgagcgaccccgaggagagcagaggcaacgacgagctggtgaagcaggagatgctggtgcagtacctgcaggacgcctacagcttcagcagaaagatcaccgaggccatcggcatcatcagcaagatgatgtacgagaacaccaccaccgtggtgcaggaggtgatcgagttcttcgtgatggtgttccagttcggcgtgccccaggccctgttcggcgtgagaagaatgctgcccctgatctggagcaaggagcccggcgtgagagaggccgtgctgaacgcctacagacagctgtacctgaaccccaagggcgacagcgccagagccaaggcccaggccctgatccagaacctgagcctgctgctggtggacgccagcgtgggcaccatccagtgcctggaggagatcctgtgcgagttcgtgcagaaggacgagctgaagcccgccgtgacccagctgctgtgggagagagccaccgagaaggtggcctgctgccccctggagagatgcagcagcgtgatgctgctgggcatgatggccagaggcaagcccgagatcgtgggcagcaacctggacaccctggtgagcatcggcctggacgagaagttcccccaggactacagactggcccagcaggtgtgccacgccatcgccaacatcagcgacagaagaaagcccagcctgggcaagagacacccccccttcagactgccccaggagcacagactgttcgagagactgagagagaccgtgaccaagggcttcgtgcaccccgaccccctgtggatccccttcaaggaggtggccgtgaccctgatctaccagctggccgagggccccgaggtgatctgcgcccagatcctgcagggctgcgccaagcaggccctggagaagctggaggagaagagaaccagccaggaggaccccaaggagagccccgccatgctgcccaccttcctgctgatgaacctgctgagcctggccggcgacgtggccctgcagcagctggtgcacctggagcaggccgtgagcggcgagctgtgcagaagaagagtgctgagagaggagcaggagcacaagaccaaggaccccaaggagaagaacaccagcagcgagaccaccatggaggaggagctgggcctggtgggcgccaccgccgacgacaccgaggccgagctgatcagaggcatctgcgagatggagctgctggacggcaagcagaccctggccgccttcgtgcccctgctgctgaaggtgtgcaacaaccccggcctgtacagcaaccccgacctgagcgccgccgccagcctggccctgggcaagttctgcatgatcagcgccaccttctgcgacagccagctgagactgctgttcaccatgctggagaagagccccctgcccatcgtgagaagcaacctgatggtggccaccggcgacctggccatcagattccccaacctggtggacccctggaccccccacctgtacgccagactgagagaccccgcccagcaggtgagaaagaccgccggcctggtgatgacccacctgatcctgaaggacatggtgaaggtgaagggccaggtgagcgagatggccgtgctgctgatcgaccccgagccccagatcgccgccctggccaagaacttcttcaacgagctgagccacaagggcaacgccatctacaacctgctgcccgacatcatcagcagactgagcgaccccgagctgggcgtggaggaggagcccttccacaccatcatgaagcagctgctgagctacatcaccaaggacaagcagaccgagagcctggtggagaagctgtgccagagattcagaaccagcagaaccgagagacagcagagagacctggcctactgcgtgagccagctgcccctgaccgagagaggcctgagaaagatgctggacaacttcgactgcttcggcgacaagctgagcgacgagagcatcttcagcgccttcctgagcgtggtgggcaagctgagaagaggcgccaagcccgagggcaaggccatcatcgacgagttcgagcagaagctgagagcctgccacaccagaggcctggacggcatcaaggagctggagatcggccaggccggcagccagagagcccccagcgccaagaagcccagcaccggcagcagataccagcccctggccagcaccgccagcgacaacgacttcgtgacccccgagcccagaagaaccaccagaagacaccccaacacccagcagagagccagcaagaagaagcccaaggtggtgttcagcagcgacgagagcagcgaggaggacctgagcgccgagatgaccgaggacgagacccccaagaagaccacccccatcctgagagccagcgccagaagacacagaagctag

SEQ ID NO: 182737 - DNA, 2820 bp, Artificial Sequence
  derived and/or modified sequence
atggccccccagatgtacgagttccacctgcccctgagccccgaggagctgctgaagagcggcggcgtgaaccagtacgtggtgcaggaggtgctgagcatcaagcacctgcccccccagctgagagccttccaggccgccttcagagcccagggccccctggccatgctgcagcacttcgacaccatctacagcatcctgcacctggtgaccggctgctgctacagactgctggagaaccccaccatcaaccaccagaagaacagacccaccagagaggccatcacccacctgctgggcgtggccctgaccagatacaaccacatgctgagcgccaccgtgaagatcatccagatgctgcagcacttcgagcacctggcccccgtgctggtggccgccgtgagcctgtgggccaccgactacggcatgaagagcatcgtgggcgagatcgtgagagagatcggccagaagtgcccccaggagctgagcagagaccccagcggcaccaagggcttcgccgccttcctgaccgagctggccgagagagtgcccgccatcctgatgagcagcatgtgcatcctgctggaccacctggacggcgagaactacatgatgagaaacgccgtgctggccgccatggccgagatggtgctgcaggtgctgagcggcgaccagctggaggccgccgccagagacaccagagaccagttcctggacaccctgcaggcccacggccacgacgtgaacagcttcgtgagaagcagagtgctgcagctgttcaccagaatcgtgcagcagaaggccctgcccctgaccagattccaggccgtggtggccctggccgtgggcagactggccgacaagagcgtgctggtgtgcaagaacgccatccagctgctggccagcttcctggccaacaaccccttcagctgcaagctgagcgacgccgacctggccggccccctgcagaaggagacccagaagctgcaggagatgagagcccagagaagaaccgccgccgccagcgccgtgctggaccccgaggaggagtgggaggccatgctgcccgagctgaagagcaccctgcagcagctgctgcagctgccccagggcgaggaggagatccccgagcagatcgccaacaccgagaccaccgaggacgtgaagggcagaatctaccagctgctggccaaggccagctacaagaaggccatcatcctgaccagagaggccaccggccacttccaggagagcgagcccttcagccacatcgaccccgaggagagcgaggagaccagactgctgaacatcctgggcctgatcttcaagggccccgccgccagcacccaggagaagaaccccagagagagcaccggcaacatggtgaccggccagaccgtgtgcaagaacaagcccaacatgagcgaccccgaggagagcagaggcaacgacgagctggtgaagcaggagatgctggtgcagtacctgcaggacgcctacagcttcagcagaaagatcaccgaggccatcggcatcatcagcaagatgatgtacgagaacaccaccaccgtggtgcaggaggtgatcgagttcttcgtgatggtgttccagttcggcgtgccccaggccctgttcggcgtgagaagaatgctgcccctgatctggagcaaggagcccggcgtgagagaggccgtgctgaacgcctacagacagctgtacctgaaccccaagggcgacagcgccagagccaaggcccaggccctgatccagaacctgagcctgctgctggtggacgccagcgtgggcaccatccagtgcctggaggagatcctgtgcgagttcgtgcagaaggacgagctgaagcccgccgtgacccagctgctgtgggagagagccaccgagaaggtggcctgctgccccctggagagatgcagcagcgtgatgctgctgggcatgatggccagaggcaagcccgagatcgtgggcagcaacctggacaccctggtgagcatcggcctggacgagaagttcccccaggactacagactggcccagcaggtgtgccacgccatcgccaacatcagcgacagaagaaagcccagcctgggcaagagacacccccccttcagactgccccaggagcacagactgttcgagagactgagagagaccgtgaccaagggcttcgtgcaccccgaccccctgtggatccccttcaaggaggtggccgtgaccctgatctaccagctggccgagggccccgaggtgatctgcgcccagatcctgcagggctgcgccaagcaggccctggagaagctggaggagaagagaaccagccaggaggaccccaaggagagccccgccatgctgcccaccttcctgctgatgaacctgctgagcctggccggcgacgtggccctgcagcagctggtgcacctggagcaggccgtgagcggcgagctgtgcagaagaagagtgctgagagaggagcaggagcacaagaccaaggaccccaaggagaagaacaccagcagcgagaccaccatggaggaggagctgggcctggtgggcgccaccgccgacgacaccgaggccgagctgatcagaggcatctgcgagatggagctgctggacggcaagcagaccctggccgccttcgtgcccctgctgctgaaggtgtgcaacaaccccggcctgtacagcaaccccgacctgagcgccgccgccagcctggccctgggcaagttctgcatgatcagcgccaccttctgcgacagccagcacttcgccatccccagaagagtggacaacctgagatag

SEQ ID NO: 182738 - DNA, 4071 bp, Artificial Sequence
  derived and/or modified sequence
atgctgtgcaagagatactgccccagcaacatcttccaccacagcctggagctgttcagactgcccttcgagctgagaggcccctggctgtgctgcagcaccctgatcctgagcaccgccttctgcatggtgagcagacacagccaggagctgcccgccatcctggacgacaccaccctgagcggcagcgacagaaacgcccacctgaacgccctgaagatgaactgctacgccctgatcagactgctggagagcttcgagaccatggccagccagaccaacctggtggacctggacctgggcggcaagggcaagaaggccagaaccaaggccgcccacggcttcgactgggaggaggagagacagcccatcctgcagctgctgacccagctgctgcagctggacatcagacacctgtggaaccacagcatcatcgaggaggagttcgtgagcctggtgaccggctgctgctacagactgctggagaaccccaccatcaaccaccagaagaacagacccaccagagaggccatcacccacctgctgggcgtggccctgaccagatacaaccacatgctgagcgccaccgtgaagatcatccagatgctgcagcacttcgagcacctggcccccgtgctggtggccgccgtgagcctgtgggccaccgactacggcatgaagagcatcgtgggcgagatcgtgagagagatcggccagaagtgcccccaggagctgagcagagaccccagcggcaccaagggcttcgccgccttcctgaccgagctggccgagagagtgcccgccatcctgatgagcagcatgtgcatcctgctggaccacctggacggcgagaactacatgatgagaaacgccgtgctggccgccatggccgagatggtgctgcaggtgctgagcggcgaccagctggaggccgccgccagagacaccagagaccagttcctggacaccctgcaggcccacggccacgacgtgaacagcttcgtgagaagcagagtgctgcagctgttcaccagaatcgtgcagcagaaggccctgcccctgaccagattccaggccgtggtggccctggccgtgggcagactggccgacaagagcgtgctggtgtgcaagaacgccatccagctgctggccagcttcctggccaacaaccccttcagctgcaagctgagcgacgccgacctggccggccccctgcagaaggagacccagaagctgcaggagatgagagcccagagaagaaccgccgccgccagcgccgtgctggaccccgaggaggagtgggaggccatgctgcccgagctgaagagcaccctgcagcagctgctgcagctgccccagggcgaggaggagatccccgagcagatcgccaacaccgagaccaccgaggacgtgaagggcagaatctaccagctgctggccaaggccagctacaagaaggccatcatcctgaccagagaggccaccggccacttccaggagagcgagcccttcagccacatcgaccccgaggagagcgaggagaccagactgctgaacatcctgggcctgatcttcaagggccccgccgccagcacccaggagaagaaccccagagagagcaccggcaacatggtgaccggccagaccgtgtgcaagaacaagcccaacatgagcgaccccgaggagagcagaggcaacgacgagctggtgaagcaggagatgctggtgcagtacctgcaggacgcctacagcttcagcagaaagatcaccgaggccatcggcatcatcagcaagatgatgtacgagaacaccaccaccgtggtgcaggaggtgatcgagttcttcgtgatggtgttccagttcggcgtgccccaggccctgttcggcgtgagaagaatgctgcccctgatctggagcaaggagcccggcgtgagagaggccgtgctgaacgcctacagacagctgtacctgaaccccaagggcgacagcgccagagccaaggcccaggccctgatccagaacctgagcctgctgctggtggacgccagcgtgggcaccatccagtgcctggaggagatcctgtgcgagttcgtgcagaaggacgagctgaagcccgccgtgacccagctgctgtgggagagagccaccgagaaggtggcctgctgccccctggagagatgcagcagcgtgatgctgctgggcatgatggccagaggcaagcccgagatcgtgggcagcaacctggacaccctggtgagcatcggcctggacgagaagttcccccaggactacagactggcccagcaggtgtgccacgccatcgccaacatcagcgacagaagaaagcccagcctgggcaagagacacccccccttcagactgccccaggagcacagactgttcgagagactgagagagaccgtgaccaagggcttcgtgcaccccgaccccctgtggatccccttcaaggaggtggccgtgaccctgatctaccagctggccgagggccccgaggtgatctgcgcccagatcctgcagggctgcgccaagcaggccctggagaagctggaggagaagagaaccagccaggaggaccccaaggagagccccgccatgctgcccaccttcctgctgatgaacctgctgagcctggccggcgacgtggccctgcagcagctggtgcacctggagcaggccgtgagcggcgagctgtgcagaagaagagtgctgagagaggagcaggagcacaagaccaaggaccccaaggagaagaacaccagcagcgagaccaccatggaggaggagctgggcctggtgggcgccaccgccgacgacaccgaggccgagctgatcagaggcatctgcgagatggagctgctggacggcaagcagaccctggccgccttcgtgcccctgctgctgaaggtgtgcaacaaccccggcctgtacagcaaccccgacctgagcgccgccgccagcctggccctgggcaagttctgcatgatcagcgccaccttctgcgacagccagctgagactgctgttcaccatgctggagaagagccccctgcccatcgtgagaagcaacctgatggtggccaccggcgacctggccatcagattccccaacctggtggacccctggaccccccacctgtacgccagactgagagaccccgcccagcaggtgagaaagaccgccggcctggtgatgacccacctgatcctgaaggacatggtgaaggtgaagggccaggtgagcgagatggccgtgctgctgatcgaccccgagccccagatcgccgccctggccaagaacttcttcaacgagctgagccacaagggcaacgccatctacaacctgctgcccgacatcatcagcagactgagcgaccccgagctgggcgtggaggaggagcccttccacaccatcatgaagcagctgctgagctacatcaccaaggacaagcagaccgagagcctggtggagaagctgtgccagagattcagaaccagcagaaccgagagacagcagagagacctggcctactgcgtgagccagctgcccctgaccgagagaggcctgagaaagatgctggacaacttcgactgcttcggcgacaagctgagcgacgagagcatcttcagcgccttcctgagcgtggtgggcaagctgagaagaggcgccaagcccgagggcaaggccatcatcgacgagttcgagcagaagctgagagcctgccacaccagaggcctggacggcatcaaggagctggagatcggccaggccggcagccagagagcccccagcgccaagaagcccagcaccggcagcagataccagcccctggccagcaccgccagcgacaacgacttcgtgacccccgagcccagaagaaccaccagaagacaccccaacacccagcagagagccagcaagaagaagcccaaggtggtgttcagcagcgacgagagcagcgaggaggacctgagcgccgagatgaccgaggacgagacccccaagaagaccacccccatcctgagagccagcgccagaagacacagaagctag

SEQ ID NO: 182739 - DNA, 4206 bp, Artificial Sequence
  derived and/or modified sequence
atggctccacagatgtatgaattccatttaccgttgagccctgaggagttactcaagtcaggaggagtgaaccaatatgtggtacaggaagtgctttccataaaacaccttcccccccagctaagggcatttcaagctgcatttcgagcccagggcccactggctatgttgcagcattttgacacaatctacagtattttacatcactttcgatcaattgacccgggtcttaaagaagacactcttcagttcttgatcaaagtagtgtccagacactctcaggaattgcccgcgattcttgatgatactacactttcagggtcagatcggaacgcacacctaaatgccctaaagatgaactgttacgcactcataaggcttctggaatccttcgagacaatggcaagtcagaccaacctggttgatcttgacctgggtgggaagggtaagaaggctcggactaaggccgctcacggcttcgactgggaggaggaaagacagcctatattacagttattaacccagctgctccagctggacattcggcacctgtggaatcatagtatcatcgaggaggaattcgtatcgctcgttactggatgttgttaccggctgctcgaaaaccctacgattaaccaccagaaaaaccgcccaactagggaggcaataacccacctcctgggagtagcccttacacgctataaccacatgctctctgccactgtgaagatcattcagatgttacaacacttcgagcacttggcccctgtactggtggccgcagtctccctctgggccacagactatggtatgaagtcgattgtcggcgagatagtccgggagatcggccagaagtgtcctcaggagctttcacgggatccctccggtaccaagggcttcgctgcattcttgaccgaattagccgagcgggttccggccatcctcatgagctccatgtgtatccttctggaccatcttgatggcgaaaattatatgatgcggaacgccgtcctcgcggccatggccgagatggtcctacaggtcctctctggagatcagctcgaagcagccgctcgagatacccgcgatcagttcttggataccctgcaggcacatggccatgatgtgaactcattcgtgcggtcccgagtgttacagctgttcacgcgcatcgtgcagcagaaggctctgccacttacacggttccaggcagtggtggccttggccgtgggccgtctcgccgataagagtgtgcttgtatgtaaaaatgcgatacagctccttgcttctttccttgccaataaccctttttcatgcaaactgagcgatgcggatctggccggccccctacaaaaggagacccagaagctgcaggagatgcgggctcaacgcaggaccgctgccgcctctgcagttctcgaccccgaggaagaatgggaagcaatgctcccagaactcaaaagcactctccaacagctgctgcagctgcctcagggggaagaggagatacccgaacaaattgccaatacagaaaccacagaagatgtcaagggccggatctatcaactgctggccaaggccagctacaaaaaggccattatcctcactcgggaggcaaccggccactttcaggaatctgaaccattttcccacattgacccagaggaatctgaggagacccgcctgttaaacatattgggactgatttttaagggtcctgccgcttcaactcaagagaaaaatcctagggagtctaccgggaacatggttactggacagaccgtatgcaaaaacaagcctaatatgtcggacccagaggaatcacgtggcaacgatgaactggtcaagcaggaaatgctggttcagtacctgcaggatgcctatagcttctcccggaagatcacagaggctatcggcatcatcagcaaaatgatgtacgagaatacaacgactgttgtgcaggaagtgattgaattcttcgtcatggttttccaatttggtgtgccacaggccctgtttggcgttcgccgcatgttacccttgatctggtccaaagaaccaggcgtgcgcgaagccgtgctcaacgcctaccgccagctctacctaaatccaaaaggagactctgcgcgcgcaaaggcccaggctttaattcagaatttaagtctgctgctggtagatgcatcggtcggcaccatacagtgcttggaagaaatcctatgtgaattcgttcaaaaggacgagctgaaacccgctgtgactcagttattatgggagagagccaccgagaaagttgcttgttgtccgctggaaaggtgttctagcgttatgctgctgggcatgatggcccgcggcaagcccgaaattgtggggtccaacctcgatacactggttagcattggcctggacgaaaaattcccccaggactaccgtttggcacagcaggtgtgccatgcaatcgctaatatctccgacagaagaaagccttcattgggcaagagacatccacctttcagacttccacaggagcataggctctttgagagactccgggagactgtgaccaagggcttcgtccaccccgatccactgtggatccctttcaaagaagtggctgtgacattgatttaccagttagcggaagggccggaggtgatatgcgctcaaatcctccaagggtgtgcaaagcaagctctcgagaagcttgaagaaaaaaggacatcccaggaagacccaaaagaatccccggccatgctacccacatttctgctgatgaatctgcttagtctcgccggggatgtagccttgcagcagctggtgcacctggaacaagccgtatcgggagaactctgccgacgccgggttctgcgggaggaacaagaacacaagaccaaggatccaaaagaaaagaatacatcctctgagacaaccatggaagaagaacttggcctagtcggggctactgccgacgacaccgaggcggaattgatacgcgggatctgtgagatggaactactggatggaaaacagacactggcagccttcgtgcccttactgctgaaagtttgcaacaaccccggcctctacagcaaccccgaccttagtgcagccgctagtctggccctcggtaagttttgcatgatctctgctactttttgcgatagccagctacgtctgctgttcacaatgctggaaaagagccctctccctattgttcggagcaacttgatggtagcaacaggcgaccttgccatacgattccctaatcttgtcgatccctggaccccccatttgtatgccagactccgcgatcctgctcagcaggtgcgaaagactgccggcctcgtgatgactcacttgatcctgaaggatatggtcaaagttaaaggacaagtgtccgagatggcagtcctcctgatcgaccctgagccccaaatagccgctctcgctaagaactttttcaatgagctgagtcacaaaggcaatgcaatttataacttactgcctgatatcattagccgtttgtctgatcccgagcttggtgtggaggaggaacctttccatacaatcatgaagcagttgctctcctatatcactaaggataagcaaaccgagagcctagtggagaagctgtgccagcggttccgtacctcacgaacagaacgccagcagcgcgatctggcatactgtgtgagtcaattacccctgactgaacgaggcctccgtaagatgctggataattttgactgttttggcgacaagctttctgacgagagcatcttttccgcattcctctccgtggttggaaagctgaggcgcggcgcgaagcccgagggcaaggccattattgatgagtttgagcaaaaacttagagcctgccatacccgaggacttgatggcatcaaggagcttgagatcgggcaggccggctctcagagagctccatccgccaagaagccctctacaggatcccgctaccaaccgctggctagtactgcttctgacaacgattttgtgacaccagagccaaggcgaacaacaagacgccatccgaacacacagcagcgagccagcaaaaaaaagcctaaagtggtgttcagttctgatgaatcctccgaggaagatctatcagcggagatgaccgaagacgaaacgccaaagaaaaccacccctatcctgagggcctccgccagacggcaccgaagttag

SEQ ID NO: 182740 - DNA, 2820 bp, Artificial Sequence
  derived and/or modified sequence
atggcgccgcagatgtatgaatttcatcttccactgagccctgaagagctgctcaagtctggcggagtcaaccagtatgtggtacaagaagtgctaagtatcaagcaccttccacctcagctgagagcttttcaggcggccttcagggcacaggggccgctggcaatgctgcagcactttgatacaatctatagtattcttcatctcgtcacgggatgctgctacaggctgctggaaaatccaacgatcaaccaccagaaaaatcggccgacgcgggaggctatcacacacctgctgggagtagcactgaccaggtataatcacatgctcagcgcgaccgttaagataatccaaatgttgcaacacttcgagcaccttgccccagtgttggtggcagccgtcagtctttgggctactgactatgggatgaagtcaattgtgggcgagattgtccgggagattggacagaaatgcccacaggaactgagcagagacccgagcggaacaaagggctttgcagccttcctgaccgaactggccgaaagagttcccgcaattctgatgtccagcatgtgcattttactggaccatctggatggcgaaaattatatgatgcgaaatgctgtcctggcggcgatggcggagatggtccttcaggtcctttcgggagaccagctcgaggctgccgcccgtgacaccagagaccagttcctcgacacccttcaggcacatggacatgatgtgaacagctttgtgcgctccagggtccttcagcttttcactagaatcgtgcagcagaaggccctgccgttgactcgattccaggccgtcgtcgccctcgcagtcggacgactagcagacaagagcgtcctcgtgtgcaagaacgcaatccagctcctggcctctttccttgctaacaatccttttagttgcaagttgtctgatgccgatctggctgggccgttgcagaaggagactcagaaattacaagagatgcgcgcacagaggcggacagccgccgcaagcgctgtgctcgatcccgaggaagaatgggaagccatgctaccagaacttaagagcaccttgcaacagctgctgcagctgccccagggagaagaagagatcccagagcaaatcgccaacactgagactacggaagatgtcaagggtaggatataccagctactggctaaagcttcctacaagaaggctataatcttgacccgggaggcgaccggccacttccaggagtcggaaccatttagccatatcgatccagaggagtctgaagaaacgcgattgctcaatattcttggactgatcttcaagggacctgccgccagcactcaggaaaagaacccacgtgagtcgacaggtaatatggtgactggacagactgtgtgtaagaacaaacctaacatgtctgaccccgaagagagccgcggcaatgacgagctcgttaagcaggagatgctcgtgcaatacttacaggatgcctactccttttccaggaagattactgaggcaattggaatcatttctaagatgatgtatgagaacaccaccacagtcgtccaggaggtgatcgaatttttcgtaatggttttccagtttggagtcccacaagccctgtttggcgttcgacgtatgcttccactgatctggtccaaggaacctggagttcgcgaggccgtgctcaacgcatacaggcagctatatttgaaccctaagggagatagcgcacgagccaaagcccaggctctcattcagaatctaagcctgttactggtggatgctagcgttggtactatccagtgcttggaggaaatcctgtgcgagttcgtccagaaagatgaactcaaaccagcagtcactcagctgctatgggaacgggctaccgaaaaagtggcctgctgcccattggagcgttgttcttctgtgatgttgctgggcatgatggccagggggaagccagagatagtgggctcaaacttagatacactggtcagtatcgggctagatgaaaaatttccccaagactatcgcctggcccagcaggtgtgccacgcgatcgctaacatttctgaccgaagaaagcctagtctgggtaaaaggcatccacccttcaggctgccccaggaacacaggctctttgagcgcctgcgggagaccgtcaccaaggggtttgttcatcccgatccactgtggatacctttcaaggaggtggctgtgaccctgatttatcagctggccgaaggccctgaggtcatctgtgcccagatccttcaggggtgcgccaagcaggcccttgagaaactggaggagaagcgtactagccaagaggatccaaaggaaagtccagccatgcttcctaccttcctcctgatgaatctcctgagcctggccggtgatgtcgccttacagcagctggttcatttagaacaggctgtctctggcgagttatgccggaggcgggtcctcagggaagagcaggagcacaaaacaaaggacccaaaagaaaaaaataccagttcggagactactatggaagaagagctagggctcgtaggcgcaacagctgacgacaccgaggcagaacttatccgcgggatttgcgaaatggaactcctcgatgggaaacagactctcgccgcatttgtgccgttgcttctcaaggtctgtaacaaccccggactgtactctaaccccgacttatcagccgccgccagtctggcgctcgggaaattttgcatgatcagcgctacattttgcgactctcagcattttgctatccctagaagggttgataacctgcgctag

SEQ ID NO: 182741 - DNA, 4071 bp, Artificial Sequence
  derived and/or modified sequence
atgttatgtaagaggtattgtcccagcaacatcttccaccacagtctagaactcttccgcctgcccttcgagcttaggggtccttggctatgttgtagtacgctgattttgtctactgcattctgtatggtgagccgccattcacaggaactcccggcaatactagatgataccaccctgagcggatcagataggaatgcccacctgaacgccctgaaaatgaattgctatgctctgatccgcctgctggaatcatttgaaacaatggccagccaaaccaacctagtggacctggacctcggcggaaaagggaaaaaagctcgtaccaaggccgctcacggcttcgactgggaagaagagaggcagccaattcttcagctccttacccagctgctgcagctcgacattcgacacttatggaaccatagcattatcgaagaagaatttgtgtccttagtgactgggtgctgctatcgcctgctcgaaaatcctacaatcaatcaccagaaaaaccgtcccaccagggaggcaatcacccatttactgggtgtagctctgactaggtacaaccacatgctgtccgccactgttaaaataatccagatgctccagcacttcgaacatctcgccccagtcttggtggctgccgtcagtctctgggccaccgattatgggatgaaaagtattgtgggcgaaatcgtcagggagatcggtcagaagtgcccacaagaactcagccgggacccctcaggtactaaaggattcgctgcctttctcaccgaactcgctgaaagggtaccagcaatcctcatgagtagcatgtgcatcctgctagaccatctggacggggaaaactatatgatgcgaaatgccgtgctcgccgcgatggcggagatggtgttgcaagtattgagcggggaccagttggaagctgccgcccgggatacccgggaccagttcctggataccctccaagcccacggccacgacgttaacagctttgtgcgcagtagggtcctacagcttttcactagaattgtccagcagaaagccctcccacttacgcgttttcaggcagttgttgctttggcagtagggcgtcttgccgataagagtgtcctggtgtgtaaaaatgcgattcagcttttggcctcgtttctggccaacaacccctttagctgtaagctttccgacgcagaccttgcgggccctctacagaaggagacacagaagctacaagaaatgagagctcagcggagaaccgccgcagcttctgctgtcctcgatcctgaggaggaatgggaggccatgttgcccgaactgaagtccaccctacaacagctgctgcagctacctcaaggtgaggaagaaatccctgagcaaatcgcaaataccgaaacaactgaggatgtgaagggccgcatctatcaactgctggcgaaagcctcctacaaaaaagcaatcatcctaaccagggaagctactggccattttcaggaaagcgaaccattcagtcatattgatccagaagagagcgaagagaccaggctactgaacatcctcgggctgattttcaagggacccgcggcatccacacaggaaaaaaaccccagagagagcacagggaacatggtgactggacagaccgtgtgtaagaacaaacctaatatgtccgatcccgaggagtctagggggaacgatgagcttgtgaagcaagagatgctggtccaatatctccaggatgcttacagcttttcgagaaagatcacagaggctatcggcatcatatccaagatgatgtacgaaaatacaacaaccgttgtgcaggaagtgatagaattcttcgtgatggttttccagttcggggtaccacaggcacttttcggcgttaggcggatgctgcctctcatatggtcaaaagagccaggggtccgggaggccgttttaaatgcataccgccagctctatcttaatcccaaaggggatagcgcaagagccaaggcacaggccttaatacagaacctgagtctgctgcttgtagatgcatccgttggcactatccagtgcctcgaggagatcctgtgcgaattcgtgcagaaggacgagctgaaaccagccgtgacccagctgttgtgggagagggccacagagaaggtggcctgctgtcctctggagagatgctcatcggttatgttgctgggcatgatggccaggggcaaaccagagatcgtagggtcaaatcttgacactttggtaagtatcggactcgacgagaaatttccacaggattacagacttgcacaacaagtgtgccacgcaattgcgaatatttcggaccggcgcaaacccagcctcggcaaacggcaccctcccttccgtctgcctcaggaacaccggctcttcgaaaggctgcgggagaccgtgactaaggggttcgttcaccctgacccgctgtggattccctttaaggaggtcgccgttacactgatctaccagctcgcggaggggcccgaagtgatctgcgcccaaatcctgcagggatgtgccaagcaggcactagaaaagcttgaggaaaaaagaacatcgcaggaagaccccaaagaaagcccggcgatgttgcccactttcctgctcatgaacctgttgtctctcgcgggggatgtagccctgcagcagctggtccatctcgagcaggccgtgtcaggagaactgtgcagacgtagagtgttgagggaggagcaagagcataaaaccaaggatcccaaggaaaagaacacaagttccgagacaaccatggaggaagaactgggactggttggagccaccgccgacgacacagaagctgaactgatcagaggcatctgcgagatggagctgctggatggaaagcagaccctcgctgccttcgtgccgctactactgaaagtgtgcaataatccagggctatattcaaaccccgacttgagcgcagccgcaagtttggcattgggcaagttctgtatgatctctgccaccttttgtgacagtcaacttcggctacttttcacaatgttggaaaagtcccccctccccatcgttcgatcaaatctgatggtggccacgggtgatttagccattagatttcccaacttagtagatccctggactcctcacctatacgctaggctcagggacccagcccaacaggtccgtaaaaccgcgggtctggtgatgacccatctgatattgaaggatatggtaaaagtaaagggacaagtgtccgaaatggcggtactgctgatcgatcctgaaccacaaattgccgcgctagcaaaaaatttttttaatgagctgtcacataaggggaatgctatctataaccttctcccagatatcatcagccgcttatccgaccccgaactgggcgtggaagaggaaccatttcacaccattatgaaacaactgctgtcatacatcacaaaggataaacagactgagagcctagtggagaaactatgtcagaggttccgcactagcaggacagaaaggcagcaacgtgacctggcatattgtgtcagccagctgccccttacggagcgaggcctaaggaagatgctggacaatttcgattgcttcggcgacaagttgtccgacgagtctatcttttctgccttcttatccgtggtaggcaaattaaggaggggcgccaaacccgagggaaaagccattattgacgagtttgagcagaaactgcgagcctgtcacactcgcgggctggatggcatcaaagagttagagatcgggcaggccggcagccaaagagctccgtcagccaagaagccgagcactggcagccggtaccagcccctggcctcaactgccagtgacaatgacttcgtgacccccgagccgaggcgcaccacacggcgccaccccaacacccaacagcgggcaagtaagaagaagccgaaagtcgttttcagctccgacgaatcctcagaggaggatctgagtgctgagatgacagaggacgaaacccctaagaagacgactcccattctcagagcgtccgctcggcgacaccgctcctag

SEQ ID NO: 182742 - DNA, 4206 bp, Artificial Sequence
  derived and/or modified sequence
atggccccccagatgtatgagttccacctgcccctgagccctgaggagctgctgaagagcggcggcgtgaaccagtatgtggtgcaggaggtgctgagcatcaagcacctgcccccccagctgcgggccttccaggccgccttccgggcccagggccccctggccatgctgcagcactttgacaccatctacagcatcctgcaccacttccgcagcattgatcctggcctgaaggaggacaccctgcagttcctgatcaaggtggtgagccgccacagccaggagctgcctgccatcctggatgacaccaccctgagcggcagtgacagaaatgcccacctgaatgccctgaagatgaactgctacgccctgatccggctgctggagagctttgagaccatggccagccagaccaacctggtggacctggacctgggcggcaagggcaagaaggcccggaccaaggccgcccacggctttgactgggaggaggagcggcagcccatcctgcagctgctgacccagctgctgcagctggacatccgccacctgtggaaccacagcatcatcgaggaggagtttgtgtccctggtgacaggctgctgctaccgcctgctggagaaccccaccatcaaccaccagaagaaccggcccacccgggaggccatcacccacctgctgggcgtggccctgacccgctacaaccacatgctgagcgccaccgtgaagatcatccagatgctgcagcactttgagcacctggcccctgtgctggtggccgctgtgtccctgtgggccacagattatggcatgaagagcatcgtgggggagatcgtgcgggagatcggccagaagtgcccccaggagctgagccgggaccccagcggcaccaagggctttgctgccttcctgacagagctggccgagcgggtgcctgccatcctgatgagctccatgtgcatcctgctggaccacctggatggagagaactacatgatgagaaatgctgtgctggccgccatggccgagatggtgctgcaggtgctgagcggggaccagctggaggccgccgcccgggacacccgggaccagttcctggacaccctgcaggcccacggccatgatgtgaacagctttgtgcgcagccgggtgctgcagctgttcaccagaattgtgcagcagaaggccctgcccctgacccgcttccaggccgtggtggccctggccgtgggccgcctggccgacaagtctgtgctggtgtgcaagaatgccatccagctgctggccagcttcctggccaacaaccccttcagctgcaagctgagtgatgctgacctggccggccccctgcagaaggagacccagaagctgcaggagatgagggcccagaggagaacagctgctgccagcgctgtgctggaccctgaggaggagtgggaggccatgctgcctgagctgaagagcaccctgcagcagctgctgcagctgccccagggcgaggaggagatccctgagcagatcgccaacacagagaccacagaagatgtgaagggccgcatctaccagctgctggccaaggccagctacaagaaggccatcatcctgacccgggaggccaccggccacttccaggagagcgagcccttcagccacatcgaccctgaggagagcgaggagacccggctgctgaacatcctgggcctcatcttcaagggccctgctgccagcacccaggagaagaacccccgggagagcacaggcaacatggtgacaggccagacagtgtgcaagaacaagcccaacatgtctgaccctgaggagagcagaggaaatgatgagctggtgaagcaggagatgctggtgcagtacctgcaggatgcctacagcttcagcaggaagatcacagaggccatcggcatcatcagcaagatgatgtatgagaacaccaccaccgtggtgcaggaggtgattgagttctttgtgatggtgttccagtttggagtgccccaggccctgtttggagtgcggaggatgctgcccctcatctggagcaaggagcccggggtgcgggaggccgtgctgaatgcctaccggcagctgtacctgaaccccaagggggacagcgcccgggccaaggcccaggccctgatccagaacctgagcctgctgctggtggatgcctctgtgggcaccatccagtgcctggaggagatcctgtgtgaatttgtgcagaaggatgagctgaagccagctgtgacccagctgctgtgggagcgggccacagagaaggtggcctgctgccccctggagcgctgcagctctgtgatgctgctgggcatgatggcccggggcaagccagagatcgtgggcagcaacctggacaccctggtgtccatcggcctggatgagaagttcccccaggactaccgcctggcccagcaggtgtgccacgccatcgccaacatcagtgacaggaggaagcccagcctgggcaagaggcacccccccttccggctgccccaggagcaccggctgtttgagcggctgcgggagaccgtgaccaagggctttgtgcacccagaccccctgtggatccccttcaaggaggtggccgtgaccctcatctaccagctggccgagggccctgaggtgatctgtgcccagatcctgcagggctgtgccaagcaggccctggagaagctggaggagaagaggaccagccaggaggaccccaaggagagccctgccatgctgcccaccttcctgctgatgaacctgctgagcctggccggagatgtggccctgcagcagctggtgcacctggagcaggccgtgtctggagagctgtgcagaagaagagtgctgcgggaggagcaggagcacaagaccaaggaccccaaggagaagaacaccagcagcgagaccaccatggaggaggagctgggcctggtgggcgccacagcagatgacacagaagctgagctgatccggggcatctgtgagatggagctgctggatggcaagcagaccctggccgcctttgtgcccctgctgctgaaggtgtgcaacaaccctggcctgtacagcaacccagacctgtctgctgctgccagcctggccctgggcaagttctgcatgatcagcgccaccttctgtgacagccagctgcggctgctcttcaccatgctggagaagagccccctgcccatcgtgcgcagcaacctgatggtggccactggagacctggccatccgcttccccaacctggtggacccctggaccccccacctgtatgcccggctgcgggaccctgcccagcaggtgaggaagacagctggcctggtgatgacccacctgatcctgaaggacatggtgaaggtgaagggccaggtgtctgagatggctgtgctgctgattgatcctgagccccagattgctgccctggccaagaacttcttcaatgagctgagccacaagggaaatgccatctacaacctgctgcctgacatcatcagccggctgagtgaccctgagctgggcgtggaggaggagcccttccacaccatcatgaagcagctgctgagctacatcaccaaggacaagcagacagagagcctggtggagaagctgtgccagcgcttccgcaccagcaggacagagcggcagcagagggacctggcctactgtgtgtcccagctgcccctgacagagcggggcctgaggaagatgctggacaactttgactgcttcggggacaagctgagtgatgagagcatcttcagcgccttcctgtctgtggtgggcaagctgcggcggggggccaagccagagggcaaggccatcattgatgaatttgagcagaagctgcgggcctgccacacccggggcctggatggcatcaaggagctggagatcggccaggccggcagccagagggcccccagcgccaagaagcccagcacaggcagccgctaccagcccctggccagcacagccagtgacaatgactttgtgaccccagagcccaggaggaccaccaggaggcaccccaacacccagcagagggccagcaagaagaagcccaaggtggtgttcagcagtgatgagagcagcgaggaggacctgtctgctgagatgacagaagatgagacccccaagaagaccacccccatcctgcgggccagcgcccggcggcacaggagctag

SEQ ID NO: 182743 - DNA, 2820 bp, Artificial Sequence
  derived and/or modified sequence
atggccccccagatgtatgagttccacctgcccctgagccctgaggagctgctgaagagcggcggcgtgaaccagtatgtggtgcaggaggtgctgagcatcaagcacctgcccccccagctgcgggccttccaggccgccttccgggcccagggccccctggccatgctgcagcactttgacaccatctacagcatcctgcacctggtgacaggctgctgctaccgcctgctggagaaccccaccatcaaccaccagaagaaccggcccacccgggaggccatcacccacctgctgggcgtggccctgacccgctacaaccacatgctgagcgccaccgtgaagatcatccagatgctgcagcactttgagcacctggcccctgtgctggtggccgctgtgtccctgtgggccacagattatggcatgaagagcatcgtgggggagatcgtgcgggagatcggccagaagtgcccccaggagctgagccgggaccccagcggcaccaagggctttgctgccttcctgacagagctggccgagcgggtgcctgccatcctgatgagctccatgtgcatcctgctggaccacctggatggagagaactacatgatgagaaatgctgtgctggccgccatggccgagatggtgctgcaggtgctgagcggggaccagctggaggccgccgcccgggacacccgggaccagttcctggacaccctgcaggcccacggccatgatgtgaacagctttgtgcgcagccgggtgctgcagctgttcaccagaattgtgcagcagaaggccctgcccctgacccgcttccaggccgtggtggccctggccgtgggccgcctggccgacaagtctgtgctggtgtgcaagaatgccatccagctgctggccagcttcctggccaacaaccccttcagctgcaagctgagtgatgctgacctggccggccccctgcagaaggagacccagaagctgcaggagatgagggcccagaggagaacagctgctgccagcgctgtgctggaccctgaggaggagtgggaggccatgctgcctgagctgaagagcaccctgcagcagctgctgcagctgccccagggcgaggaggagatccctgagcagatcgccaacacagagaccacagaagatgtgaagggccgcatctaccagctgctggccaaggccagctacaagaaggccatcatcctgacccgggaggccaccggccacttccaggagagcgagcccttcagccacatcgaccctgaggagagcgaggagacccggctgctgaacatcctgggcctcatcttcaagggccctgctgccagcacccaggagaagaacccccgggagagcacaggcaacatggtgacaggccagacagtgtgcaagaacaagcccaacatgtctgaccctgaggagagcagaggaaatgatgagctggtgaagcaggagatgctggtgcagtacctgcaggatgcctacagcttcagcaggaagatcacagaggccatcggcatcatcagcaagatgatgtatgagaacaccaccaccgtggtgcaggaggtgattgagttctttgtgatggtgttccagtttggagtgccccaggccctgtttggagtgcggaggatgctgcccctcatctggagcaaggagcccggggtgcgggaggccgtgctgaatgcctaccggcagctgtacctgaaccccaagggggacagcgcccgggccaaggcccaggccctgatccagaacctgagcctgctgctggtggatgcctctgtgggcaccatccagtgcctggaggagatcctgtgtgaatttgtgcagaaggatgagctgaagccagctgtgacccagctgctgtgggagcgggccacagagaaggtggcctgctgccccctggagcgctgcagctctgtgatgctgctgggcatgatggcccggggcaagccagagatcgtgggcagcaacctggacaccctggtgtccatcggcctggatgagaagttcccccaggactaccgcctggcccagcaggtgtgccacgccatcgccaacatcagtgacaggaggaagcccagcctgggcaagaggcacccccccttccggctgccccaggagcaccggctgtttgagcggctgcgggagaccgtgaccaagggctttgtgcacccagaccccctgtggatccccttcaaggaggtggccgtgaccctcatctaccagctggccgagggccctgaggtgatctgtgcccagatcctgcagggctgtgccaagcaggccctggagaagctggaggagaagaggaccagccaggaggaccccaaggagagccctgccatgctgcccaccttcctgctgatgaacctgctgagcctggccggagatgtggccctgcagcagctggtgcacctggagcaggccgtgtctggagagctgtgcagaagaagagtgctgcgggaggagcaggagcacaagaccaaggaccccaaggagaagaacaccagcagcgagaccaccatggaggaggagctgggcctggtgggcgccacagcagatgacacagaagctgagctgatccggggcatctgtgagatggagctgctggatggcaagcagaccctggccgcctttgtgcccctgctgctgaaggtgtgcaacaaccctggcctgtacagcaacccagacctgtctgctgctgccagcctggccctgggcaagttctgcatgatcagcgccaccttctgtgacagccagcactttgccatccccaggagagtggacaacctgaggtag

SEQ ID NO: 182744 - DNA, 4071 bp, Artificial Sequence
  derived and/or modified sequence
atgctgtgcaagcgctactgccccagcaacatcttccaccacagcctggagctgttccggctgccctttgagctgcggggcccctggctgtgctgcagcaccctcatcctgagcacagccttctgcatggtgagccgccacagccaggagctgcctgccatcctggatgacaccaccctgagcggcagtgacagaaatgcccacctgaatgccctgaagatgaactgctacgccctgatccggctgctggagagctttgagaccatggccagccagaccaacctggtggacctggacctgggcggcaagggcaagaaggcccggaccaaggccgcccacggctttgactgggaggaggagcggcagcccatcctgcagctgctgacccagctgctgcagctggacatccgccacctgtggaaccacagcatcatcgaggaggagtttgtgtccctggtgacaggctgctgctaccgcctgctggagaaccccaccatcaaccaccagaagaaccggcccacccgggaggccatcacccacctgctgggcgtggccctgacccgctacaaccacatgctgagcgccaccgtgaagatcatccagatgctgcagcactttgagcacctggcccctgtgctggtggccgctgtgtccctgtgggccacagattatggcatgaagagcatcgtgggggagatcgtgcgggagatcggccagaagtgcccccaggagctgagccgggaccccagcggcaccaagggctttgctgccttcctgacagagctggccgagcgggtgcctgccatcctgatgagctccatgtgcatcctgctggaccacctggatggagagaactacatgatgagaaatgctgtgctggccgccatggccgagatggtgctgcaggtgctgagcggggaccagctggaggccgccgcccgggacacccgggaccagttcctggacaccctgcaggcccacggccatgatgtgaacagctttgtgcgcagccgggtgctgcagctgttcacccgcatcgtgcagcagaaggccctgcccctgacccgcttccaggccgtggtggccctggccgtgggccgcctggccgacaagtctgtgctggtgtgcaagaatgccatccagctgctggccagcttcctggccaacaaccccttcagctgcaagctgagtgatgctgacctggccggccccctgcagaaggagacccagaagctgcaggagatgagggcccagaggagaacagctgctgccagcgctgtgctggaccctgaggaggagtgggaggccatgctgcctgagctgaagagcaccctgcagcagctgctgcagctgccccagggcgaggaggagatccctgagcagatcgccaacacagagaccacagaagatgtgaagggccgcatctaccagctgctggccaaggccagctacaagaaggccatcatcctgacccgggaggccaccggccacttccaggagagcgagcccttcagccacattgatcctgaggagagcgaggagacccggctgctgaacatcctgggcctcatcttcaagggccctgctgccagcacccaggagaagaacccccgggagagcactggaaacatggtgacaggccagacagtgtgcaagaacaagcccaacatgtctgaccctgaggagagcagaggaaatgatgagctggtgaagcaggagatgctggtgcagtacctgcaggatgcctacagcttcagcaggaagatcacagaggccatcggcatcatcagcaagatgatgtatgagaacaccaccaccgtggtgcaggaggtgattgagttctttgtgatggtgttccagtttggagtgccccaggccctgtttggagtgcggaggatgctgcccctcatctggagcaaggagcccggggtgcgggaggccgtgctgaatgcctaccggcagctgtacctgaaccccaagggggacagcgcccgggccaaggcccaggccctgatccagaacctgagcctgctgctggtggatgcctctgtgggcaccatccagtgcctggaggagatcctgtgtgaatttgtgcagaaggatgagctgaagccagctgtgacccagctgctgtgggagcgggccacagagaaggtggcctgctgccccctggagcgctgcagctctgtgatgctgctgggcatgatggcccggggcaagccagaaattgtgggcagcaacctggacaccctggtgtccatcggcctggatgagaagttcccccaggactaccgcctggcccagcaggtgtgccacgccatcgccaacatcagtgacaggaggaagcccagcctgggcaagaggcacccccccttccggctgccccaggagcaccggctgtttgagcggctgcgggagaccgtgaccaagggctttgtgcacccagaccccctgtggatccccttcaaggaggtggccgtgaccctcatctaccagctggccgagggccctgaggtgatctgtgcccagatcctgcagggctgtgccaagcaggccctggagaagctggaggagaagaggaccagccaggaggaccccaaggagagccctgccatgctgcccaccttcctgctgatgaacctgctgagcctggccggagatgtggccctgcagcagctggtgcacctggagcaggccgtgtctggagagctgtgcagaagaagagtgctgcgggaggagcaggagcacaagaccaaggaccccaaggagaagaacaccagcagcgagaccaccatggaggaggagctgggcctggtgggcgccacagcagatgacacagaggccgagctgatccggggcatctgtgagatggagctgctggatggcaagcagaccctggccgcctttgtgcccctgctgctgaaggtgtgcaacaaccctggcctgtacagcaacccagacctgtctgctgctgccagcctggccctgggcaagttctgcatgatcagcgccaccttctgtgacagccagctgcggctgctcttcaccatgctggagaagagccccctgcccatcgtgcgcagcaacctgatggtggccaccggggacctggccatccgcttccccaacctggtggacccctggaccccccacctgtatgcccggctgcgggaccctgcccagcaggtgaggaagacagctggcctggtgatgacccacctgatcctgaaggacatggtgaaggtgaagggccaggtgtctgagatggctgtgctgctgattgatcctgagccccagattgctgccctggccaagaacttcttcaatgagctgagccacaagggaaatgccatctacaacctgctgcctgacatcatcagccggctgagtgaccctgagctgggcgtggaggaggagcccttccacaccatcatgaagcagctgctgagctacatcaccaaggacaagcagacagagagcctggtggagaagctgtgccagcgcttccgcaccagcaggacagagcggcagcagagggacctggcctactgtgtgtcccagctgcccctgacagagcggggcctgaggaagatgctggacaactttgactgctttggagacaagctgagtgatgagagcatcttcagcgccttcctgtctgtggtgggcaagctgcggcggggggccaagccagagggcaaggccatcattgatgaatttgagcagaagctgcgggcctgccacacccggggcctggatggcatcaaggagctggagatcggccaggccggcagccagagggcccccagcgccaagaagcccagcacaggcagccgctaccagcccctggccagcacagccagtgacaatgactttgtgaccccagagcccaggaggaccacccggcggcaccccaacacccagcagagggccagcaagaagaagcccaaggtggtgttcagcagtgatgagagcagcgaggaggacctgtctgctgagatgacagaagatgagacccccaagaagaccacccccatcctgcgggccagcgcccggcggcacaggagctag

SEQ ID NO: 182745 - DNA, 5548 bp, Artificial Sequence
  derived and/or modified sequence
aagttttggagcgccggacaagctgaggtccgcgactcgtcgctaagattccccaaaactgagatttcaagaaaattcaccctttccgctttctttggcgtccttcaaccgtgaaggaaatgaaggttgagaacctggaacccgcttccaatgaccaagccctttctctgtgcctcacaacagtcttccgctgtagctgtttttattacccctattttactactggggaggagatttgaggtcctgaaagtgaagtgacttgctggacgtcacttagcagaggagatggcgaaacctggattagaggcgatgccttctaactcccagcgtggacttgcctcctttcctgggggtgactgaatgcccagccagggacgcgacgtctctggccagcagaaatacggcctcctccccgccgactgggcaaagggggaccttgcggccaaggagggattcgcaggcgggccgggggtgggagcgggggccggagccggagccttggcccgcccccgggcggcgctgtgattggccggccgctccggcgggcgtcgcgattggccgtcctgcagccgttgagatttgaactcggtatttgtggctttgcccgcgcgttgccagactcagaggcggccctttgcctctgcctgccggggattggccggattctccgccgacttgaaaactgccttgctaattggtgcgtgttgtgcacgcgtgttttttccttttcatttcagcctgactgccggaatcagagccgcgggtgagatccccagccctgtgagcctgtaggagtagaatggctccccaaatgtatgagttccatctgccattatccccagaggagttgttgaaaagtggaggggtgaatcagtatgttgtgcaagaggtactgtccatcaaacatcttccaccacagcttagagcttttcaggctgcctttcgagctcaggggcccctggctatgctgcagcactttgatactatctacagcattttgcatcactttcgaagtatagatcctggcctcaaagaagatactctgcaattcctgataaaagtggtatcccgccactcccaggagcttccagctatcctggatgatacaactttgagtggatcagatagaaacgcccatctaaatgccctcaaaatgaactgttatgctctgatacgtctcctggaatcctttgagaccatggccagccagacaaaccttgtggacctggaccttggtgggaagggtaagaaagctcggaccaaggcagcccatggctttgactgggaagaagagaggcaaccaattcttcagcttttaacacagctacttcagttggacatccgtcacctgtggaaccactcaataattgaagaagaatttgtcagtttggttactggctgttgctaccgccttctggagaatcccaccattaatcaccagaagaaccgccccactcgggaagccataacacacctgcttggtgtagccttgacccgttataaccatatgctcagtgctacagtgaagatcatccagatgctgcagcactttgaacacctggcacctgtactggttgcagccgtgagtctatgggcaactgactatggaatgaagagcatagtgggagagattgtaagagagattggacaaaagtgtccccaagagctgagtcgagacccttcagggacaaagggctttgcagcattcctgacagaactagcagaacgtgtcccagctatcctgatgtccagcatgtgcattttgctagatcacctggatggagaaaattacatgatgcgtaatgctgtgctggcagccatggcggagatggtgctgcaggttctcagtggcgatcaactggaagcagcagcccgagacaccagagaccagttcttggatactttacaagcccatggccatgatgtcaactcctttgtgcggagccgtgttttgcagctcttcacccgaattgtccagcagaaggctctccccctgacacgtttccaggcagtggtggctttagctgtgggacgtctggcagacaagtcagtgctagtatgtaaaaatgccatccagctgctggccagttttctagccaataatcctttctcctgcaagcttagtgatgctgaccttgccggaccactgcagaaggagacccagaaattacaagagatgagggcccagaggcgaactgcagcagcttctgcagtgctggacccagaggaggagtgggaagccatgctgccagagttgaagtctaccctgcagcagcttctacagcttccccagggagaggaggagattcctgagcaaattgccaatacagagacaactgaagatgtgaaaggacgcatctatcaactgcttgccaaagctagttacaaaaaggccatcattctcactcgagaagccacaggccacttccaggagtccgaacccttcagtcatatagacccagaggagtcagaggagaccaggctcttgaatatcttaggacttatcttcaaaggcccagcagcttccacacaagaaaagaatccccgggagtctacaggaaacatggtcacaggacagactgtctgtaaaaataaacccaatatgtcggatcctgaggaatccaggggaaatgatgaactagtgaagcaggagatgctggtacagtatctgcaggatgcctacagcttctcccggaagattacagaggccattggcatcatcagcaagatgatgtatgaaaacacaactacagtggtgcaggaggtgattgaattctttgtgatggtcttccaatttggggtaccccaggccctgtttggggtgcgccgtatgctgcctctcatctggtctaaggagcctggtgtccgggaagccgtgcttaatgcctaccgccaactctacctcaaccccaaaggggactctgccagagccaaggcccaggctttgattcagaatctctctctgctgctagtggatgcctcggttgggaccattcagtgtcttgaggaaattctctgtgagtttgtgcagaaggatgagttgaaaccagcagtgacccagctgctgtgggagcgggccaccgagaaggtcgcctgctgtcctctggagcgctgttcctctgtcatgcttcttggcatgatggcacgaggaaagccagaaattgtgggaagcaatttagacacactggtgagcatagggctggatgagaagtttccacaggactacaggctggcccagcaggtgtgccatgccattgccaacatctcggacaggagaaagccttctctgggcaaacgtcacccccccttccggctgcctcaggaacacaggttgtttgagcgactgcgggagacagtcacaaaaggctttgtccacccagacccactctggatcccattcaaagaggtggcagtgaccctcatttaccaactggcagagggccccgaagtgatctgtgcccagatattgcagggctgtgcaaaacaggccctggagaagctagaagagaagagaaccagtcaggaggacccgaaggagtcccccgcaatgctccccactttcctgttgatgaacctgctgtccctggctggggatgtggctctgcagcagctggtccacttggagcaggcagtgagtggagagctctgccggcgccgagttctccgggaagaacaggagcacaagaccaaagatcccaaggagaagaatacgagctctgagaccaccatggaggaggagctggggctggttggggcaacagcagatgacacagaggcagaactaatccgtggcatctgcgagatggaactgttggatggcaaacagacactggctgcctttgttccactcttgcttaaagtctgtaacaacccaggcctctatagcaacccagacctctctgcagctgcttcacttgcccttggcaagttctgcatgatcagtgccactttctgcgactcccagcttcgtcttctgttcaccatgctggaaaagtctccacttcccattgtccggtctaacctcatggttgccactggggatctggccatccgctttcccaatctggtggacccctggactcctcatctgtatgctcgtctccgggaccctgctcagcaagtgcggaaaacagcggggctggtgatgacccacctgatcctcaaggacatggtgaaggtgaaggggcaggtcagcgagatggcggtgctgctcatcgaccccgagcctcagattgctgccctggccaagaacttcttcaatgagctctcccacaagggcaacgcaatctataatctccttccagatatcatcagccgcctgtcagaccccgagctgggggtggaggaagagcctttccacaccatcatgaaacagctcctctcctacatcaccaaggacaagcagacagagagcctggtggaaaagctgtgtcagcggttccgcacatcccgaactgagcggcagcagcgagacctggcctactgtgtgtcacagctgcccctcacagagcgaggcctccgtaagatgcttgacaattttgactgttttggagacaaactgtcagatgagtccatcttcagtgcttttttgtcagttgtaggcaagctgcgacgtggggccaagcctgagggcaaggctataatagatgaatttgagcagaagcttcgggcctgtcataccagaggtttggatggaatcaaggagcttgagattggccaagcaggtagccagagagcgccatcagccaagaaaccatccactggttctaggtaccagcctctggcttctacagcctcagacaatgactttgtcacaccagagccccgccgtactacccgtcggcatccaaacacccagcagcgagcttccaaaaagaaacccaaagttgtcttctcaagtgatgagtccagtgaggaagatctttcagcagagatgacagaagacgagacacccaagaaaacaactcccattctcagagcatcggctcgcaggcacagatcctaggaagtctgttcctgtcctccctgtgcagggtatcctgtagggtgacctggaattcgaattctgtttcccttgtaaaatatttgtctgtctcttttttttaaaaaaaaaaaaggccgggcactgtggctcacgcctgtaatcccagcactttgcgataccaaggcgggtggataacctgaggtagggagttcgagaccagcctgaccaacatggagaaaccccatctctactaaaaataaaaaattagccgggcgtattggcgtgcgcctgtaatcccagctactcaagaggctgaggcaggagaatcgcctgaacccagaggcggaggttgtagtgagccgaaatcacaccattgcactccagcttgggcaacaatagcgaacctccatctcaaattaaaaaaaaaatgcctacacgctctttaaaatgcaaggctttctcttaaattagcctaactgaactgcgttgagctgcttcaactttggaatatatgtttgccaatctccttgttttctaatgaataaatgtttttatatactttta

SEQ ID NO: 182746 - DNA, 3254 bp, Artificial Sequence
  derived and/or modified sequence
ccttttcatttcagcctgactgccggaatcagagccgcgggtgagatccccagccctgtgagcctgtaggagtagaatggctccccaaatgtatgagttccatctgccattatccccagaggagttgttgaaaagtggaggggtgaatcagtatgttgtgcaagaggtactgtccatcaaacatcttccaccacagcttagagcttttcaggctgcctttcgagctcaggggcccctggctatgctgcagcactttgatactatctacagcattttgcatttggttactggctgttgctaccgccttctggagaatcccaccattaatcaccagaagaaccgccccactcgggaagccataacacacctgcttggtgtagccttgacccgttataaccatatgctcagtgctacagtgaagatcatccagatgctgcagcactttgaacacctggcacctgtactggttgcagccgtgagtctatgggcaactgactatggaatgaagagcatagtgggagagattgtaagagagattggacaaaagtgtccccaagagctgagtcgagacccttcagggacaaagggctttgcagcattcctgacagaactagcagaacgtgtcccagctatcctgatgtccagcatgtgcattttgctagatcacctggatggagaaaattacatgatgcgtaatgctgtgctggcagccatggcggagatggtgctgcaggttctcagtggcgatcaactggaagcagcagcccgagacaccagagaccagttcttggatactttacaagcccatggccatgatgtcaactcctttgtgcggagccgtgttttgcagctcttcacccgaattgtccagcagaaggctctccccctgacacgtttccaggcagtggtggctttagctgtgggacgtctggcagacaagtcagtgctagtatgtaaaaatgccatccagctgctggccagttttctagccaataatcctttctcctgcaagcttagtgatgctgaccttgccggaccactgcagaaggagacccagaaattacaagagatgagggcccagaggcgaactgcagcagcttctgcagtgctggacccagaggaggagtgggaagccatgctgccagagttgaagtctaccctgcagcagcttctacagcttccccagggagaggaggagattcctgagcaaattgccaatacagagacaactgaagatgtgaaaggacgcatctatcaactgcttgccaaagctagttacaaaaaggccatcattctcactcgagaagccacaggccacttccaggagtccgaacccttcagtcatatagacccagaggagtcagaggagaccaggctcttgaatatcttaggacttatcttcaaaggcccagcagcttccacacaagaaaagaatccccgggagtctacaggaaacatggtcacaggacagactgtctgtaaaaataaacccaatatgtcggatcctgaggaatccaggggaaatgatgaactagtgaagcaggagatgctggtacagtatctgcaggatgcctacagcttctcccggaagattacagaggccattggcatcatcagcaagatgatgtatgaaaacacaactacagtggtgcaggaggtgattgaattctttgtgatggtcttccaatttggggtaccccaggccctgtttggggtgcgccgtatgctgcctctcatctggtctaaggagcctggtgtccgggaagccgtgcttaatgcctaccgccaactctacctcaaccccaaaggggactctgccagagccaaggcccaggctttgattcagaatctctctctgctgctagtggatgcctcggttgggaccattcagtgtcttgaggaaattctctgtgagtttgtgcagaaggatgagttgaaaccagcagtgacccagctgctgtgggagcgggccaccgagaaggtcgcctgctgtcctctggagcgctgttcctctgtcatgcttcttggcatgatggcacgaggaaagccagaaattgtgggaagcaatttagacacactggtgagcatagggctggatgagaagtttccacaggactacaggctggcccagcaggtgtgccatgccattgccaacatctcggacaggagaaagccttctctgggcaaacgtcacccccccttccggctgcctcaggaacacaggttgtttgagcgactgcgggagacagtcacaaaaggctttgtccacccagacccactctggatcccattcaaagaggtggcagtgaccctcatttaccaactggcagagggccccgaagtgatctgtgcccagatattgcagggctgtgcaaaacaggccctggagaagctagaagagaagagaaccagtcaggaggacccgaaggagtcccccgcaatgctccccactttcctgttgatgaacctgctgtccctggctggggatgtggctctgcagcagctggtccacttggagcaggcagtgagtggagagctctgccggcgccgagttctccgggaagaacaggagcacaagaccaaagatcccaaggagaagaatacgagctctgagaccaccatggaggaggagctggggctggttggggcaacagcagatgacacagaggcagaactaatccgtggcatctgcgagatggaactgttggatggcaaacagacactggctgcctttgttccactcttgcttaaagtctgtaacaacccaggcctctatagcaacccagacctctctgcagctgcttcacttgcccttggcaagttctgcatgatcagtgccactttctgcgactcccagcactttgcgataccaaggcgggtggataacctgaggtagggagttcgagaccagcctgaccaacatggagaaaccccatctctactaaaaataaaaaattagccgggcgtattggcgtgcgcctgtaatcccagctactcaagaggctgaggcaggagaatcgcctgaacccagaggcggaggttgtagtgagccgaaatcacaccattgcactccagcttgggcaacaatagcgaacctccatctcaaattaaaaaaaaaatgcctacacgctctttaaaatgcaaggctttctcttaaattagcctaactgaactgcgttgagctgcttcaactttggaatatatgtttgccaatctccttgttttctaatgaataaatgtttttatatactttt

SEQ ID NO: 182747 - DNA, 4290 bp, Artificial Sequence
  derived and/or modified sequence
tttccttttcatttcagcctgactgccggaatcagagccgcgggtgagatccccagccctgtgagcctgtaggagtagaatggctccccaaatgtatgagttccatctgccattatccccagaggagttgttgaaaagtggaggggtgaatcagtatgttgtgcaagaggtactgtccatcaaacatcttccaccacagcttagagcttttcaggctgcctttcgagctcaggggcccctggctatgctgcagcactttgatactatctacagcattttgcatggtatcccgccactcccaggagcttccagctatcctggatgatacaactttgagtggatcagatagaaacgcccatctaaatgccctcaaaatgaactgttatgctctgatacgtctcctggaatcctttgagaccatggccagccagacaaaccttgtggacctggaccttggtgggaagggtaagaaagctcggaccaaggcagcccatggctttgactgggaagaagagaggcaaccaattcttcagcttttaacacagctacttcagttggacatccgtcacctgtggaaccactcaataattgaagaagaatttgtcagtttggttactggctgttgctaccgccttctggagaatcccaccattaatcaccagaagaaccgccccactcgggaagccataacacacctgcttggtgtagccttgacccgttataaccatatgctcagtgctacagtgaagatcatccagatgctgcagcactttgaacacctggcacctgtactggttgcagccgtgagtctatgggcaactgactatggaatgaagagcatagtgggagagattgtaagagagattggacaaaagtgtccccaagagctgagtcgagacccttcagggacaaagggctttgcagcattcctgacagaactagcagaacgtgtcccagctatcctgatgtccagcatgtgcattttgctagatcacctggatggagaaaattacatgatgcgtaatgctgtgctggcagccatggcggagatggtgctgcaggttctcagtggcgatcaactggaagcagcagcccgagacaccagagaccagttcttggatactttacaagcccatggccatgatgtcaactcctttgtgcggagccgtgttttgcagctcttcacccgaattgtccagcagaaggctctccccctgacacgtttccaggcagtggtggctttagctgtgggacgtctggcagacaagtcagtgctagtatgtaaaaatgccatccagctgctggccagttttctagccaataatcctttctcctgcaagcttagtgatgctgaccttgccggaccactgcagaaggagacccagaaattacaagagatgagggcccagaggcgaactgcagcagcttctgcagtgctggacccagaggaggagtgggaagccatgctgccagagttgaagtctaccctgcagcagcttctacagcttccccagggagaggaggagattcctgagcaaattgccaatacagagacaactgaagatgtgaaaggacgcatctatcaactgcttgccaaagctagttacaaaaaggccatcattctcactcgagaagccacaggccacttccaggagtccgaacccttcagtcatatagacccagaggagtcagaggagaccaggctcttgaatatcttaggacttatcttcaaaggcccagcagcttccacacaagaaaagaatccccgggagtctacaggaaacatggtcacaggacagactgtctgtaaaaataaacccaatatgtcggatcctgaggaatccaggggaaatgatgaactagtgaagcaggagatgctggtacagtatctgcaggatgcctacagcttctcccggaagattacagaggccattggcatcatcagcaagatgatgtatgaaaacacaactacagtggtgcaggaggtgattgaattctttgtgatggtcttccaatttggggtaccccaggccctgtttggggtgcgccgtatgctgcctctcatctggtctaaggagcctggtgtccgggaagccgtgcttaatgcctaccgccaactctacctcaaccccaaaggggactctgccagagccaaggcccaggctttgattcagaatctctctctgctgctagtggatgcctcggttgggaccattcagtgtcttgaggaaattctctgtgagtttgtgcagaaggatgagttgaaaccagcagtgacccagctgctgtgggagcgggccaccgagaaggtcgcctgctgtcctctggagcgctgttcctctgtcatgcttcttggcatgatggcacgaggaaagccagaaattgtgggaagcaatttagacacactggtgagcatagggctggatgagaagtttccacaggactacaggctggcccagcaggtgtgccatgccattgccaacatctcggacaggagaaagccttctctgggcaaacgtcacccccccttccggctgcctcaggaacacaggttgtttgagcgactgcgggagacagtcacaaaaggctttgtccacccagacccactctggatcccattcaaagaggtggcagtgaccctcatttaccaactggcagagggccccgaagtgatctgtgcccagatattgcagggctgtgcaaaacaggccctggagaagctagaagagaagagaaccagtcaggaggacccgaaggagtcccccgcaatgctccccactttcctgttgatgaacctgctgtccctggctggggatgtggctctgcagcagctggtccacttggagcaggcagtgagtggagagctctgccggcgccgagttctccgggaagaacaggagcacaagaccaaagatcccaaggagaagaatacgagctctgagaccaccatggaggaggagctggggctggttggggcaacagcagatgacacagaggcagaactaatccgtggcatctgcgagatggaactgttggatggcaaacagacactggctgcctttgttccactcttgcttaaagtctgtaacaacccaggcctctatagcaacccagacctctctgcagctgcttcacttgcccttggcaagttctgcatgatcagtgccactttctgcgactcccagcttcgtcttctgttcaccatgctggaaaagtctccacttcccattgtccggtctaacctcatggttgccactggggatctggccatccgctttcccaatctggtggacccctggactcctcatctgtatgctcgtctccgggaccctgctcagcaagtgcggaaaacagcggggctggtgatgacccacctgatcctcaaggacatggtgaaggtgaaggggcaggtcagcgagatggcggtgctgctcatcgaccccgagcctcagattgctgccctggccaagaacttcttcaatgagctctcccacaagggcaacgcaatctataatctccttccagatatcatcagccgcctgtcagaccccgagctgggggtggaggaagagcctttccacaccatcatgaaacagctcctctcctacatcaccaaggacaagcagacagagagcctggtggaaaagctgtgtcagcggttccgcacatcccgaactgagcggcagcagcgagacctggcctactgtgtgtcacagctgcccctcacagagcgaggcctccgtaagatgcttgacaattttgactgttttggagacaaactgtcagatgagtccatcttcagtgcttttttgtcagttgtaggcaagctgcgacgtggggccaagcctgagggcaaggctataatagatgaatttgagcagaagcttcgggcctgtcataccagaggtttggatggaatcaaggagcttgagattggccaagcaggtagccagagagcgccatcagccaagaaaccatccactggttctaggtaccagcctctggcttctacagcctcagacaatgactttgtcacaccagagccccgccgtactacccgtcggcatccaaacacccagcagcgagcttccaaaaagaaacccaaagttgtcttctcaagtgatgagtccagtgaggaagatctttcagcagagatgacagaagacgagacacccaagaaaacaactcccattctcagagcatcggctcgcaggcacagatcctaggaagtctgttcctgtcctccctgtgcagggtatcctgtagggtgacctggaattcgaattctgt

SEQ ID NO: 182748 - DNA, 4206 bp, Artificial Sequence
  derived and/or modified sequence
atggccccccagatgtacgagttccacctgcccctgagccccgaggaactgttaaaatcaggaggggtcaaccaatatgtagtgcaggaagtgctgagcattaaacacctcccgccccagctgcgagcctttcaggccgcatttagagcccagggacctttggccatgctccagcactttgacacgatctattcgatactgcaccacttccgctcaatcgatcctggtctcaaagaagacactcttcaattcctgatcaaagtggtctctaggcacagtcaggaactgccggcaattcttgatgacactacactcagcgggagcgacaggaatgcccaccttaatgcactcaagatgaattgctacgcactgatacggttgttagagagctttgagactatggcatcccagaccaatctggtggaccttgatttgggcggaaaaggaaagaaagccaggaccaaagcagcccacggctttgactgggaggaagaacggcagccaattttgcagctgctgactcagctactgcaattagatatccggcatttgtggaaccattctataatcgaggaggaattcgttagcctggtgacaggttgttgttataggctgctcgagaaccccacgattaatcaccagaaaaataggcccactcgagaagccatcacgcatcttctcggtgtggcgctaacccggtacaaccacatgctttctgccacggtgaagattatccagatgcttcagcacttcgagcacctggcaccggtcctggtcgccgcagtctcactgtgggctacagactacggtatgaagtccatcgttggtgaaatcgtccgcgagatcgggcaaaaatgcccccaggaactaagtagggacccatcgggaacaaagggtttcgctgctttccttaccgagctggctgaaagggtgccagctattttgatgagttctatgtgtatcttactggaccaccttgacggggagaactacatgatgcggaatgctgtgctggcggctatggcagaaatggttctgcaggtactgagcggggatcagcttgaggctgctgcaagagacactagggaccagttcttagacaccctacaggcccacggccatgatgtcaatagcttcgtcaggagcagagtacttcagctgttcacacgaatcgttcaacagaaagcccttcctctgacacgtttccaggctgtggttgccctggctgtcggccgcctggctgataaatccgtgctggtatgcaagaacgcaatacagctcttggcctctttcctcgctaataatcctttctcctgtaagctctctgacgctgatttggccgggccccttcagaaagagacacagaagctccaggagatgcgtgctcagcgacgcactgccgcagcctcagccgtgctcgacccagaggaagagtgggaagcgatgctgcctgagttaaaatctacactgcagcagctgctccagctccctcaaggtgaagaagaaattcccgaacagatagctaacacagagacaaccgaagatgtgaaggggcggatataccagctgctcgctaaagcctcctataagaaggctatcatcctgactcgagaagctacaggtcacttccaggaatctgaacctttcagccatatcgaccccgaggagagtgaggagaccagattattaaatatactgggactgattttcaaaggccccgcagcgagcacacaggagaagaatccacgtgagtccaccggcaacatggttacaggccagactgtctgcaaaaataagcccaatatgagtgaccccgaagagtcccgggggaacgacgaactggtcaaacaggagatgctcgttcagtatctccaggacgcttactctttcagcagaaaaataacagaggcaatcggcattattagtaagatgatgtatgagaatacaactaccgtggtgcaggaagtaattgagttcttcgtaatggtgtttcagtttggcgtgcctcaagccctgttcggggtaagaagaatgcttcctctgatttggagcaaggagcccggcgtgcgcgaggctgtactcaacgcatacagacaactgtacctgaacccaaaaggggacagcgcacgggcaaaggcacaggccctgatacagaacctgtccctgttactcgtggatgctagtgtgggcactatacagtgcttggaggaaatcttatgcgagttcgttcaaaaggatgagctcaagcccgccgtaacacagctgctctgggagcgagctaccgaaaaggtcgcctgttgcccgctggagaggtgcagcagtgtgatgctgctgggaatgatggcgcgtgggaaacccgaaatcgtgggtagtaacctcgacaccctggtgagtataggactggatgagaaattcccccaagactatcgcttggcccagcaggtctgtcacgccatcgctaacatctcagaccgacgcaaaccttccctgggcaaaagacacccccccttccgactgccacaagagcaccgcctgtttgagcgcctgcgggaaaccgtgaccaagggcttcgttcacccagatccactgtggattcctttcaaagaggtcgcagtgacgttaatctatcagttagctgaaggccctgaggtgatctgtgcccaaatcctacagggatgcgctaagcaagccctcgagaaattggaggaaaagaggacatcccaagaggacccaaaagagtcaccagccatgctacctacttttctactgatgaaccttctcagtttggctggggatgtggctttacagcaactggtgcatctagagcaggccgtttctggtgagctatgtcgtcggagagtcctgagggaagagcaagaacataagaccaaggaccccaaagaaaagaacacatcttcggagacgacaatggaggaggaattaggcctggtcggcgctacagccgatgacactgaggctgagctcataaggggaatctgtgaaatggaactgttggacggcaagcagacattggctgctttcgtgcccttgctcctgaaggtatgcaataatcccgggctctactctaatccggacctgtccgccgccgcctctctcgccctgggaaagttctgcatgatttccgcaacattttgtgattcacagctccgtcttttgtttaccatgctcgaaaaatcccctctccccatcgtacggagtaatcttatggtggcaacgggcgaccttgctatcaggttccccaacctcgtggacccctggactccccacctttacgcccgtctgagggacccggcccaacaagtgcggaagaccgctggactcgtaatgacccacctgatccttaaggatatggttaaagtgaaggggcaagtctcagagatggcggttttactaatcgacccagagcctcagattgctgcattggctaaaaatttttttaacgagctgagtcacaaaggcaacgcaatttacaacctgttaccagatatcattagtcgcctcagcgacccagagcttggagtggaagaggagccatttcatacaatcatgaaacagctgctgagttacatcacaaaggacaagcagaccgaatccctggtggaaaaactctgtcagagatttcggacctcgaggaccgagagacaacaaagagaccttgcatactgtgtgagtcagctgccgttgaccgagcgcggccttaggaagatgctggataactttgattgcttcggggataaactgagcgatgagagcatctttagcgcatttctcagtgtggtcgggaaattgcggcgaggcgccaagcccgagggtaaggccatcatcgatgaatttgaacaaaagctgcgcgcctgccacaccagaggattggacggcattaaggaattagagatcggccaggcaggttcgcagcgtgctccgtcagctaagaagcccagcaccggcagtcggtaccagccactggcctcaaccgcatctgacaacgattttgtgaccccagagccacggaggaccacaagaaggcacccgaacacccagcagcgagcctcgaaaaaaaagccaaaggtggtatttagctctgacgaatcctctgaggaggacctgagtgccgagatgactgaagatgagacgccgaagaagactacccctatcctccgggcttctgcccggcggcacagaagctag

SEQ ID NO: 182749 - DNA, 2820 bp, Artificial Sequence
  derived and/or modified sequence
atggccccccagatgtacgagttccacctgcccctgagccccgaggagctgctgaagtccggaggcgttaaccaatacgtggtgcaggaagtgcttagtattaaacatttgccaccacagctgcgcgccttccaagctgcttttcgagcccagggacccctggccatgctgcaacatttcgataccatctattctattctacatctggtgacagggtgctgctaccgcttattagagaaccctacgattaaccatcagaagaataggcccacaagagaggccattacgcacctgttaggagttgcacttacccggtacaaccatatgttatccgccaccgttaagattatccaaatgctccagcactttgaacacctggctcctgtcctggtggcggcagtgtccctctgggctacagattacggaatgaagtcaatagtgggagagattgtgagggagatcgggcagaagtgtccacaggaattgtcacgcgaccccagcggcacaaagggttttgcagctttccttactgagcttgccgagagggtgccggcgatcctcatgagtagcatgtgtatactcttggaccacctcgatggggagaattacatgatgagaaatgctgtgttagccgccatggcagagatggtgctacaggttctgtcgggcgatcagttggaggcagccgctcgggacacacgcgatcagttcctggacacgcttcaggcacatggccatgatgtgaattcctttgtgaggagtcgagtcctgcagcttttcacccgcatcgtccagcagaaggcgctgcccctcactcgttttcaggccgtagttgcattggccgtggggcgcttggctgacaagtctgtgctggtatgtaagaacgcaatccagctgctggcaagcttccttgctaacaaccccttctcctgcaaactatccgatgctgacttagccggacctctccagaaggagacccagaagctgcaggagatgcgggcgcagcggcgaacagccgccgcttcggctgtgctagaccccgaggaggaatgggaggccatgctgccggagctgaagagcaccctccagcaactgctccagctcccgcagggtgaagaggaaatcccggagcagattgcaaacacagagactacagaggacgtcaagggcaggatttaccagctcctcgctaaggctagctacaaaaaagccatcatcctaacgagggaggccaccggccacttccaagagtctgagcccttcagccatatagacccagaggaatctgaggaaactagactccttaatatccttggcctaatttttaaaggacctgcagcttctacacaggaaaagaacccaagggagagtaccgggaacatggtgacgggacagactgtgtgcaagaataaacccaacatgtcagatcctgaagagagcagaggcaatgacgagctagtgaagcaagaaatgctggtccagtacttgcaggatgcatacagcttttctcggaagatcaccgaggctattggcataattagcaagatgatgtacgagaacaccaccactgtggtgcaggaggttatagaattttttgtgatggtcttccagtttggtgttccgcaagctttattcggtgtaagacgcatgctgccactaatttggtctaaagaacctggcgtgagggaggccgttctcaatgcttaccggcaactttacctgaacccaaaaggggacagcgcacgagccaaggcacaggcgctaatccagaatctaagcctgctgttagtggacgcaagcgtagggacaattcaatgcctggaggagatactgtgcgagtttgtgcagaaagatgaactgaagcccgctgttactcagttactgtgggagagagccaccgaaaaggtggcatgttgccccctggagagatgttcctcagtgatgttacttggcatgatggccagaggtaagccagagatcgtggggtcaaacctggatacgctggtgtccattggcttggacgagaaatttcctcaagattaccgactggcacagcaggtgtgccacgcaattgctaatattagcgacaggcggaaaccaagccttgggaaacgccaccccccttttcgcctaccacaggagcataggctttttgagagactgcgggagaccgtgacgaagggattcgtgcacccggaccccctttggatcccttttaaagaagtggccgtgacgctgatttaccagctagcggagggccctgaggtaatctgtgcccagatcctgcagggctgtgcgaaacaggctctcgaaaagctggaggagaagcgtacaagccaggaggaccccaaagaaagccccgcgatgctgcccacattcctattgatgaatctgctgagtctcgcaggagacgtcgctctgcagcagctggtccacctggagcaggccgtctccggcgagctgtgtaggagaagagtgttgagggaggaacaggaacacaagaccaaagaccctaaggagaagaacacatcttccgagaccactatggaggaggagctcggtcttgtgggagcgacggcggatgatacagaagccgaactgatccgtggaatctgcgagatggagctccttgacggtaaacagactcttgcagccttcgtccccctgctccttaaggtctgcaacaatccagggctctacagcaacccagacttgtcagcagccgcttccctcgcgcttggcaagttctgcatgatctccgctactttttgtgactcccagcacttcgcaattccacgccgggtggacaacttacggtag

SEQ ID NO: 182750 - DNA, 4071 bp, Artificial Sequence
  derived and/or modified sequence
atgctgtgcaagcggtactgccccagcaacatcttccaccacagcttggagttgttccgcttgccttttgaactgagggggccgtggctctgctgttccaccctgattctaagcaccgccttctgcatggttagcaggcactctcaagagctcccagccatcctcgacgacactactctgagtggttctgatcgtaacgcacatctgaatgctcttaagatgaactgttatgctcttatacgcctcttagagagcttcgagaccatggcctctcagaccaacctggtagatcttgatctcggcggaaaaggcaagaaagccagaaccaaagcggcacatgggttcgattgggaagaagaaagacagcccattctccagctgcttacccagctcctgcagctagatataagacacctctggaaccattcgataattgaggaagaatttgtgtccctagtgactggctgttgctaccgcctgctcgagaatccgaccataaatcaccaaaaaaaccggccaacccgtgaagctatcactcacctacttggcgtagccctgacccgctacaaccatatgcttagtgcaaccgtcaaaatcattcagatgctgcagcacttcgagcatctcgcccccgtgttagtcgctgcagtttctctgtgggcgaccgattacggcatgaaaagcattgtcggggagatcgtgcgcgagataggacagaagtgccctcaggagctctcaagagatccgtcaggaaccaagggctttgctgcttttttaacagaactggcggagagggtacctgccatactgatgtcctccatgtgtattctcctggatcacctagatggagagaactatatgatgcgtaatgcagtcctcgcggcaatggccgagatggtcctgcaggtcttatctggggaccagctggaggccgccgcaagagacactagagaccagttcctggacactctgcaggctcacggccatgatgtaaactcctttgtgagaagtcgcgtgctccagctgtttactcgcatcgtccagcagaaagcgctgcctctcacgaggttccaagccgtagtggccctcgctgtaggacggctcgccgacaagtccgtcctggtttgtaaaaacgccatccagctgctcgcaagctttctcgccaacaatccttttagctgtaaactgtcagacgctgatttggcaggccctctgcagaaggaaacgcaaaagctgcaggagatgagagcccagcgccggacagccgctgcctcagcagtgctggatccagaggaggagtgggaagcaatgttgcccgagctgaagtccacactccagcagctgttgcagttgcctcagggagaggaggagatccccgagcagatcgcgaacaccgaaacgacagaggatgttaaggggagaatttaccaactccttgccaaggcgtcctacaagaaggctattatactaacgcgggaagccaccgggcatttccaagagtcagaaccctttagccacatagaccccgaggagtccgaagagacgagactgttgaacattctgggactgatattcaagggcccggcggcatccacacaggagaaaaatcccagggaatccactggaaatatggtcacaggccagactgtctgcaaaaacaaacctaatatgtcagaccccgaggaaagccgggggaacgacgagttggtgaagcaggaaatgcttgtgcagtacctccaggatgcctactctttcagcagaaaaatcacggaggccatcgggataattagcaagatgatgtatgagaatactaccacagtagtgcaggaggtaattgaattttttgtgatggtctttcaatttggcgttcctcaggctctgtttggagttcggcggatgttgcctcttatctggagtaaggagccaggtgttcgagaggctgtactaaacgcttacaggcagctctacttgaaccccaagggggatagcgccagagccaaagcacaggcacttattcagaatctatcattactgttagttgacgccagcgttggcacaatccagtgcctcgaagagattttgtgtgaattcgttcagaaagatgagctcaaacctgccgtaacgcagctgctgtgggagagagccacggagaaggttgcatgttgccccctggaacggtgcagcagtgtgatgctcctgggcatgatggctcgcggaaaaccagaaattgttggttccaacttggacactctggtctctattggtctggacgaaaagtttccacaggattaccggcttgcgcaacaggtctgccacgcaatagctaatatatcggacaggcgcaaaccaagcctgggtaagaggcacccgccatttagattgccgcaggaacaccgtctcttcgagcgactccgcgagacggtgacaaaagggttcgtccatcccgaccccttgtggatccctttcaaagaggtagcagttaccctgatataccaattagcagagggaccggaggtcatctgtgcgcagatcctgcagggatgcgccaaacaggctttagagaagctggaggaaaaaaggacgtcccaggaagaccccaaagaaagtccggcaatgctgccaactttcctactaatgaatctgttgagccttgccggcgacgtggcccttcagcagcttgtgcacctagaacaggcggtatccggagaattatgtcgtcggcgggttctgcgtgaggagcaggagcacaagacaaaggaccctaaggaaaagaacaccagcagtgagaccacaatggaagaagaacttgggctagtcggagccaccgccgacgacacggaggcagaactaatcaggggtatctgtgaaatggagttgttggacggcaagcaaacactggctgcattcgtcccactgctgctgaaggtgtgcaacaatccgggcctgtattccaatccggacctgtcggccgcggcctccctggccctgggaaaattctgcatgatctctgcaaccttctgcgactcccaactccgactgctgtttacaatgttagaaaaatctcctttgcccatcgtgagatccaatctgatggtggccaccggcgatctggctataaggttccccaatcttgtggatccatggacacctcacctctacgctcggctgagagaccccgctcaacaggtcagaaagacagccggtctcgtgatgactcatctgattctgaaggatatggtgaaggtgaagggacaggtctcagagatggccgtgctgttgattgatccggaaccacagatcgcagcactcgcaaaaaatttcttcaatgagctgtcgcacaaaggtaatgccatctacaacctgctgcccgacatcattagtcgactgtccgatcctgagttgggagtcgaagaagaacccttccacaccatcatgaaacaattactcagctatatcaccaaagacaaacagacagagtcactcgtggaaaagctgtgtcaaaggttccggacgagtagaacagagcggcagcagagagacctcgcttactgcgtgagccagcttcccttaaccgagcgggggttacggaaaatgctggacaacttcgattgctttggcgacaaactgtctgacgagtctatcttctcagcattccttagcgtggtcggcaagctgaggagaggggccaaacctgaagggaaagccatcatcgacgagttcgaacagaaactcagagcttgccatacccgcgggcttgatggaatcaaggagctcgaaatcggtcaggctggttcccagagagcaccctcagcaaaaaaacctagtacaggaagccgttaccagcctctcgcctccacagcatctgacaatgactttgtgacccctgagccacgacgtaccactcggcggcaccccaacacacagcagcgcgcaagtaagaaaaagccaaaggtggtgttctcctccgacgaatcttctgaggaggacctgtctgctgaaatgacagaagacgaaacccctaaaaagaccacacctatcctgagggccagcgctagacggcacaggagctag

SEQ ID NO: 182751 - DNA, 4206 bp, Artificial Sequence
  derived and/or modified sequence
atggccccacagatgtatgagtttcatctcccactttctcctgaagagctgttgaaaagtggcggagtcaaccaatacgtcgtgcaggaggtgctctcgattaaacatttgccaccccagttacgggcatttcaggcggcattcagagcccagggccctttagctatgttgcagcactttgacactatttattcaatcctgcaccatttccgaagtattgatcccggacttaaagaggatactctgcaatttctaattaaggtcgtgtcaagacactcccaagagctgcccgcaattctggacgacactacactctccggatccgatcgaaacgctcatcttaacgccctcaagatgaattgttacgcccttatacgactcctggaaagcttcgaaacaatggctagccagaccaatttagttgacttagacctcgggggtaaaggcaagaaggctagaaccaaagccgcacatggctttgactgggaggaggagaggcagccaattttgcaacttttaactcaactcctgcaactggatattagacatttgtggaatcattctattatcgaagaagagtttgtgtccctggtgacaggctgttgctatagattgcttgagaacccaactataaatcaccagaaaaatcgtcccacccgcgaggctatcacacacctgctcggagtggccctaacgcggtacaatcatatgctgtccgctactgttaaaattatccagatgctccaacatttcgagcacctggctccggtgctggttgccgctgttagtctgtgggccacagattacggaatgaagagtattgtgggagaaatcgttcgagagatcgggcagaagtgcccacaggagctctccagggatccgagcgggaccaaggggttcgcagcgtttcttaccgagcttgccgaaagggtgcctgctatcctgatgagctccatgtgtatcctcctcgatcatcttgatggcgaaaattacatgatgcggaacgctgtcctggcagccatggcagagatggtattgcaggtgctctctggggatcagttggaagccgctgcgcgagacactagagatcagtttttggacaccctacaggcccacggccatgatgtcaatagtttcgttcggagccgagtgctacagctgtttacaaggattgtccagcaaaaagccctaccactgactaggttccaggccgtggtggccttagccgttggacggcttgccgacaagtccgtactcgtgtgcaaaaatgcaatccagctactggcctcttttctggcaaataacccattcagctgtaagctctcagacgctgacctcgctgggccactccagaaggaaacacaaaagctgcaagagatgagagcgcagcgcaggactgccgcagcctctgctgtgctggatcctgaggaggaatgggaagcaatgctccccgagttaaagagcaccttgcagcagctcctgcagctgcctcagggcgaagaagagatcccagaacaaatcgcaaacaccgaaactacagaagacgtgaagggacgcatctaccagctcctggcaaaagcttcttataagaaggcaattatccttactcgcgaggcaacaggacatttccaggagtcggagccattctcacatatcgatcctgaagagagtgaggaaactaggttactgaatattttgggcctcatcttcaaaggacccgctgcatcgacccaggagaagaaccctcgggaatccaccggcaatatggtgaccggtcaaacagtctgcaagaacaaaccaaacatgtccgaccctgaggagtccagggggaatgacgaacttgtgaagcaggaaatgctggtccagtatctgcaggacgcctactctttctctagaaagatcaccgaagccatcggtatcatatctaaaatgatgtacgaaaacacaaccactgtcgtccaagaagtcatcgagttttttgtgatggtgtttcagtttggagtcccgcaggcactttttggagtaaggcgcatgctgcccttaatctggtccaaagagcccggagtaagggaagccgttcttaatgcttatcgccaactgtatctcaacccaaagggtgactctgcccgagctaaggcccaggcccttattcagaacctctccttgctgctggtggacgccagcgtaggaaccattcagtgcctggaggagatcttatgtgaattcgtgcagaaagacgaattaaagcccgcagtgacccagttgctctgggagcgtgcaaccgagaaagtagcgtgttgtcccttggagcgatgctcctcagtgatgctgctcggaatgatggcacgcggtaagccagagattgtagggagcaacttggacactctcgtctcaatcgggctggacgaaaagtttccgcaggactaccgccttgctcagcaagtctgccatgccatcgccaacatttctgatcgcaggaaacctagcctcggaaagcggcaccctccattccggctgccccaggagcaccgactgtttgagcggctgcgcgagacagtcacgaagggcttcgtgcaccccgaccctctgtggattccttttaaggaggtggcagtgacacttatctaccagcttgcagaaggccctgaggttatctgcgctcagattcttcaaggatgcgccaaacaggcactcgaaaaacttgaagagaagcggacgagccaagaggatcccaaagagagccccgctatgctgccgacatttcttctcatgaacctcctaagtttagccggagacgtcgctctgcaacagctggttcatctcgagcaggccgtatctggcgagctctgccgacgcagagtgctgagggaggaacaagagcataaaacaaaggaccctaaagaaaagaatacctcgtccgaaacaactatggaggaggagctcggtttagtgggagccaccgcggatgacacagaggctgaactgataagaggcatttgcgagatggagctgctggatggcaaacaaacgctggcagcttttgttccccttctcctgaaggtgtgtaataatccaggcttgtatagcaacccagaccttagcgcggcagcgtccttagctctcgggaagttctgcatgatttctgccaccttctgcgattcgcaacttcgtctgttattcacaatgctggaaaaaagtccactcccaatcgtaaggagcaacctcatggtcgccacgggagacctggccattcgcttccccaacctggtcgacccctggacgccccacctatacgctcgtcttcgagacccggctcagcaggtgaggaagacagccggactggtaatgacacacttaatacttaaagacatggttaaggtgaagggtcaggtatccgaaatggctgtgctcttgatcgatccggaacctcagattgccgcactagcaaagaatttctttaacgagttgtcacataaagggaacgccatttataatcttctgcccgatattataagtcggttgtctgacccagaactgggagtcgaagaagagccattccatactatcatgaaacagctgctttcttacatcactaaggacaagcaaacagagtcactggtagagaagctgtgccagagattcagaacctctagaaccgaacgtcagcagcgggacctcgcctactgcgtgtcacagctccctctgaccgaacgcggactacgaaagatgctggacaattttgattgttttggggataagctaagcgatgaaagcatttttagcgcttttctgtccgtggttggaaaattaagaagaggcgctaaaccagaagggaaagccataattgacgaatttgaacagaaacttcgggcatgccacaccagaggcttagatgggatcaaggagttagagattgggcaggccggaagccaaagggcaccatcggctaagaaaccgtcaaccgggtcccgctaccagccactggcttcgaccgctagtgacaacgacttcgtaactcccgaacctcggaggaccacccgaagacacccaaatacccaacaaagggccagtaagaagaaacctaaggtggtttttagtagcgatgagagcagtgaagaggacttgtccgcagaaatgactgaggacgagacgccaaagaagaccactcctatcctcagggccagtgctcgcaggcacagaagttag

SEQ ID NO: 182752 - DNA, 2820 bp, Artificial Sequence
  derived and/or modified sequence
atggcccctcaaatgtacgagtttcacctgccactttcgccggaagaactgctgaaatctggcggagtcaaccaatacgtcgtgcaagaagtgctgagcataaagcatctgccaccccagctacgggcttttcaggcagccttccgtgcgcagggaccgctggctatgctacagcattttgacaccatatactctattctgcatctagttaccggatgttgttaccgcctcctcgagaatcccactattaatcaccagaagaaccggccaacgagagaagctataacccatctgttaggcgtggccctcacacgttataaccatatgctatccgctaccgtgaagattattcaaatgctgcagcattttgagcacctcgcgcctgtcttggtggcagcggtctcattatgggcgacggattatggcatgaagagcatcgtcggggaaatcgtgcgggagattggccaaaaatgccctcaggaattgtctagagacccatcaggcacgaaaggcttcgccgcatttctgaccgaactggccgaaagggttccagcaattttaatgtcaagtatgtgtattctgcttgatcatctagatggcgagaattatatgatgcggaatgcagtgctggccgctatggccgaaatggtgttgcaggtactcagcggtgaccaactggaggctgccgctagggacactcgggatcagttcctagacactctgcaggcccacggtcacgatgttaactcttttgtgaggagccgggtactgcagttgttcaccaggatagtgcaacagaaagcattgcccctgaccagatttcaggccgtggtcgctctggcggttggacgactggcagataagtctgtcttagtgtgcaaaaacgcgatccagctcctcgccagttttctggcaaacaatccattctcctgcaaactcagtgacgccgacttggcgggacccctccagaaagagacccaaaaactacaggagatgagagctcagcgtcggaccgcggcagccagtgcagtgttggaccccgaggaggaatgggaagctatgttgcctgagctaaaaagtacactgcaacagctactccagctgccacagggtgaggaggagattccagagcagatcgcaaatactgaaaccacagaggacgttaagggccgaatttaccagctgttggccaaagcctcttacaaaaaagccatcattttaacacgcgaagcaaccggacacttccaagaatctgagccattctcccatatcgatcccgaggaatctgaggagacccgcctgctaaatatcttaggtctgatcttcaagggcccagctgctagtactcaggaaaaaaacccaagggagtcaacaggaaatatggtaactggccagaccgtctgtaagaacaaacctaatatgagtgaccccgaagagagtagagggaacgacgaattagtgaaacaggaaatgttagtccagtacttgcaggacgcatacagtttctcgcgtaagatcacagaggcaatcgggatcatatccaagatgatgtatgaaaatactacaacggtggtacaagaggtgatcgaattcttcgttatggtgtttcagttcggtgtcccccaggctctgttcggggtaaggcgcatgctgcccctgatatggagcaaagagcctggcgttcgggaagctgtgttaaacgcctaccgccagctgtacctgaacccaaaaggcgactctgctagggctaaagcccaggctttgatccagaatctgtcccttctattagtagacgcgtcagtgggaactattcagtgtcttgaggagatcctgtgcgagttcgtacagaaagacgaactcaagccagccgtgacgcaacttctgtgggagagagccacagagaaggtggcatgctgtcctttggagcggtgttcttcagtaatgctcttggggatgatggcccgaggaaagcctgagattgtgggctctaatctggacaccctcgtatctattggcctggatgagaagttccctcaggactacagactggcccagcaggtgtgtcacgctatcgcaaatatatccgaccggaggaagccaagcctgggcaaacggcatccgccattccgactcccacaggaacaccggctctttgagagattaagggagaccgttacgaaaggctttgtgcaccccgaccctctgtggattccattcaaagaagttgccgtcactctcatttatcaactcgcagaggggccagaagtgatatgtgctcagatcctgcagggatgtgcaaaacaagcgctggagaagctcgaggagaagcggacatcacaggaagaccctaaagagagccccgctatgctgccaacatttttgcttatgaatctcctttccctggccggagacgtagcactacagcagttggttcacctcgaacaagccgtgtcaggtgaactatgccgcaggcgggtacttcgcgaagagcaagaacacaagaccaaggatcctaaagaaaaaaatacctcctccgaaacgaccatggaagaagaactcggactggtgggtgcaacggccgacgacactgaggccgaactcatccggggaatttgcgaaatggaactgcttgatggcaagcagactctcgcagctttcgtgccactgctgctgaaggtgtgtaacaaccctggcctgtactccaacccagacctgagtgctgccgcaagtctggctctcgggaaattctgtatgatttcagccacgttctgcgatagtcaacactttgctatacccagaagggtggacaatttgaggtag

SEQ ID NO: 182753 - DNA, 4071 bp, Artificial Sequence
  derived and/or modified sequence
atgctttgtaagcgatactgcccctctaacatatttcaccactcgctggagttgtttcgcctgccctttgagctcaggggtccttggctgtgctgttctactttaatactaagcaccgctttctgcatggtctcccggcattcgcaggagttgcccgcaattctggatgatactacattgagtggttctgatcgcaatgcccacctcaacgcgctcaagatgaactgctatgccctgattaggttgttggagtctttcgaaactatggcctcccagacgaatcttgtcgatctcgacttgggcggtaagggcaagaaagctcggaccaaggccgctcatggttttgattgggaggaagaacggcaacccattcttcagttgcttactcagctgctccagctggatattaggcatctgtggaatcactccattatagaggaggagttcgtgtcactcgtcaccggatgctgttaccgcttgctggaaaaccccacgataaatcatcagaagaacaggcctactagggaggcaattacacatttgctcggcgtggccctaactagatataatcatatgctgagcgccaccgtcaaaattatccagatgctgcagcacttcgaacatctggcccctgtcttagtggccgcagtatccctgtgggccactgattatggaatgaagtctatagtcggggagatagtcagggaaattggccagaagtgtcctcaggagctttcacgcgacccaagcggtacgaaaggcttcgccgcatttctgactgaactcgccgagagagtgccagcaattctgatgtcttcgatgtgcatcctgctggaccatcttgatggtgagaattatatgatgaggaatgcggtactggctgcaatggcggaaatggtccttcaggttttgtcaggggaccagctggaggccgcagctcgggatacaagagatcagttcctggatacgctgcaggctcacggacacgatgtcaactctttcgtgagaagtcgggtgcttcagttgttcacccggatcgttcagcagaaagccctgcccctgacacggttccaggctgtggtcgccttagccgttggcaggctggccgataaatcagtgctagtttgtaagaatgctatacagctactggcttcgtttttggctaataaccccttttcctgtaaactgagcgacgcagacctagctggcccactgcagaaggagacgcagaagctgcaagagatgcgtgctcaaagaaggaccgcggctgcatctgctgtcctcgatccagaagaggagtgggaagcgatgctgcccgaattgaagtcaaccctgcagcagctcctgcaactccctcagggtgaagaggagattcccgaacagattgcaaacaccgagaccaccgaggacgtgaaggggagaatttatcaacttctagcaaaggccagctacaaaaaggcgatcatcctaaccagagaggcaacaggccattttcaggagagtgagcctttctcgcacattgaccctgaagagagtgaagagaccagattactgaatattctcggtctgatttttaagggacccgcagcatcaacacaagagaagaatccaagagagtctaccggaaatatggtaacaggccaaaccgtttgtaagaacaaacctaatatgagcgatcctgaagaatctaggggaaatgatgagctggtgaagcaagaaatgctggtgcagtatcttcaggacgcatattcattttctagaaaaattactgaagctatcggcattatctcaaaaatgatgtacgaaaatactaccaccgtggttcaagaagttatcgaattctttgtcatggtatttcagtttggcgtgcctcaagccctctttggcgtacgtagaatgcttccgcttatatggtccaaggaacccggtgtgagagaagcagtgttgaatgcctaccgccaactttacctcaaccctaagggcgattccgcaagggcaaaggcccaggccctgattcagaaccttagcctccttctcgtcgatgcgtccgtcggcaccattcaatgtctggaagagattctatgcgaattcgtccaaaaggatgagctcaaaccagccgttacacaactactttgggagagagctaccgagaaagtggcctgctgtcccttggagcgatgcagtagcgtgatgcttttggggatgatggcaagagggaagcctgagatcgttgggagtaacctagatacactcgttagcatcggactcgacgagaagtttccgcaggactacagactggctcagcaagtgtgccatgccatcgctaacatcagcgatcgacggaagccttccctgggtaagcggcaccccccatttcgtttgccccaggaacaccgcctgtttgaacggctgagagagaccgtcactaaggggtttgtgcatcctgacccactgtggattccatttaaagaagtagccgtgacattaatctaccagttagccgagggacccgaggtgatctgtgctcagatactacagggctgcgccaagcaggcgctcgagaaactggaagagaaacggacgagtcaggaagatcccaaagaatctccagccatgctgcccacctttttactaatgaatctgctttccctggcaggcgatgtggctctgcagcagctggtccatttggagcaggctgtgtctggtgaactgtgccggagacgcgtcctgagggaggagcaggaacacaagacgaaggaccctaaagagaaaaacacttcgtcagagacgaccatggaagaggaactgggactggttggggctactgccgacgacacggaagccgaactcatcagaggcatttgcgaaatggaactcttggatggcaagcagaccctggccgcttttgtgcccttactactgaaagtttgcaacaaccccggtctatactcaaatcccgacctgagtgctgctgcgagtctcgcattgggcaagttctgcatgatttcagcgacgttctgcgactcccaactgcgactcctatttactatgctggagaagagccctctacctatcgtgcgttctaatctcatggtggccacaggcgatctggcaattcggttccccaacctcgttgacccgtggactccacatttgtacgccagactccgagatcccgcacaacaggtcaggaagacggccggactggtgatgacccatttgatactcaaagacatggtaaaagtgaagggtcaggtctctgaaatggccgtcttactcatcgaccccgagccacagatcgccgcactggcaaaaaatttctttaatgaacttagccacaagggaaacgccatatacaacctgttacccgacatcatcagcaggctgtcggaccctgaactgggggtcgaagaggagcccttccataccatcatgaagcagctcctatcatacatcacaaaagacaaacagacagagtctcttgtcgagaagctgtgccagaggttccggactagcaggaccgaacggcagcagagagacctggcgtattgcgtgtctcagctcccccttactgagagaggcttgcggaagatgcttgacaattttgactgcttcggtgataagctgtcagacgagtcgattttttctgcatttctgtctgtagttgggaagctcaggcgaggggcaaagcccgagggcaaagccatcatagacgagtttgagcaaaagctgagagcctgccacactaggggtctggatggaatcaaagaactcgaaattggccaagccggaagccaaagagcgcctagcgcaaaaaagcctagtacaggatcccgctaccagccacttgcctccacagcctcagataatgatttcgtcaccccagaacccaggcgcacgacaaggagacatcccaacacacagcagcgggcaagcaagaaaaaacctaaggtggtgttcagctctgacgaatcctctgaggaggatctgtccgctgagatgacggaagacgaaacgcctaaaaagactacccccatcctgcgggcttctgctaggagacacaggagctag

SEQ ID NO: 182754 - protein, 623 aa, Artificial Sequence
  derived and/or modified sequence
MEHAVAPCVLYPGTEPGAAGESESEGAASPAQTPCSLGASLCFSSGEESPPQSLASAAEGAATSPPSSGGPRVVERQWEAGSAGAASPEELASPEERACPEEPAAPSPEPRVWLEDPASPEEPGEPAPVPPGFGAVYGEPDLVLEVSGRRLRAHKAVLAARSDYFRARASRDVLRVQGVSLTALRLLLADAYSGRMAGVRPDNVAEVVAGARRLQLPGAAQRATDAVGPQLSLANCYEVLSAAKRQRLNELRDAAYCFMSDHYLEVLREPAVFGRLSGAERDLLLRRRLRAGRAHLLAAALGPAGERAGSRPQSPSGDADARGDAAVYCFHAAAGEWRELTRLPEGAPARGCGLCVLYNYLFVAGGVAPAGPDGRARPSDQVFCYNPATDSWSAVRPLRQARSQLRLLALDGHLYAVGGECLLSVERYDPRADRWAPVAPLPRGAFAVAHEATTCHGEIYVSGGSLFYRLLKYDPRRDEWQECPCSSSRERSADMVALDGFIYRFDLSGSRGEAQAAGPSGVSVSRYHCLAKQWSPCVAPLRLPGGPTGLQPFRCAALDGAIYCVSRAGTWRFQPAREGEAGGDAGQGGGFEALGAPLDVRGVLIPFALSLPEKPPRGEQGAP

SEQ ID NO: 182755 - DNA, 1872 bp, Artificial Sequence
  derived and/or modified sequence
atggagcacgccgtggccccctgcgtgctgtaccccggcaccgagcccggcgccgccggcgagagcgagagcgagggcgccgccagccccgcccagaccccctgcagcctgggcgccagcctgtgcttcagcagcggcgaggagagccccccccagagcctggccagcgccgccgagggcgccgccaccagcccccccagcagcggcggccccagagtggtggagagacagtgggaggccggcagcgccggcgccgccagccccgaggagctggccagccccgaggagagagcctgccccgaggagcccgccgcccccagccccgagcccagagtgtggctggaggaccccgccagccccgaggagcccggcgagcccgcccccgtgccccccggcttcggcgccgtgtacggcgagcccgacctggtgctggaggtgagcggcagaagactgagagcccacaaggccgtgctggccgccagaagcgactacttcagagccagagccagcagagacgtgctgagagtgcagggcgtgagcctgaccgccctgagactgctgctggccgacgcctacagcggcagaatggccggcgtgagacccgacaacgtggccgaggtggtggccggcgccagaagactgcagctgcccggcgccgcccagagagccaccgacgccgtgggcccccagctgagcctggccaactgctacgaggtgctgagcgccgccaagagacagagactgaacgagctgagagacgccgcctactgcttcatgagcgaccactacctggaggtgctgagagagcccgccgtgttcggcagactgagcggcgccgagagagacctgctgctgagaagaagactgagagccggcagagcccacctgctggccgccgccctgggccccgccggcgagagagccggcagcagaccccagagccccagcggcgacgccgacgccagaggcgacgccgccgtgtactgcttccacgccgccgccggcgagtggagagagctgaccagactgcccgagggcgcccccgccagaggctgcggcctgtgcgtgctgtacaactacctgttcgtggccggcggcgtggcccccgccggccccgacggcagagccagacccagcgaccaggtgttctgctacaaccccgccaccgacagctggagcgccgtgagacccctgagacaggccagaagccagctgagactgctggccctggacggccacctgtacgccgtgggcggcgagtgcctgctgagcgtggagagatacgaccccagagccgacagatgggcccccgtggcccccctgcccagaggcgccttcgccgtggcccacgaggccaccacctgccacggcgagatctacgtgagcggcggcagcctgttctacagactgctgaagtacgaccccagaagagacgagtggcaggagtgcccctgcagcagcagcagagagagaagcgccgacatggtggccctggacggcttcatctacagattcgacctgagcggcagcagaggcgaggcccaggccgccggccccagcggcgtgagcgtgagcagataccactgcctggccaagcagtggagcccctgcgtggcccccctgagactgcccggcggccccaccggcctgcagcccttcagatgcgccgccctggacggcgccatctactgcgtgagcagagccggcacctggagattccagcccgccagagagggcgaggccggcggcgacgccggccagggcggcggcttcgaggccctgggcgcccccctggacgtgagaggcgtgctgatccccttcgccctgagcctgcccgagaagccccccagaggcgagcagggcgccccctag

SEQ ID NO: 182756 - DNA, 1872 bp, Artificial Sequence
  derived and/or modified sequence
atggagcatgccgttgctccttgcgtactctatcccgggactgagcccggggcagctggcgaatccgagtcggagggtgctgcgtctccggctcaaacaccatgctccttgggcgcctcgctttgtttctctagcggagaagaatctcctcctcagtctctggcctcagctgcggagggcgcggctacctctcctccgagcagcggaggtccccgcgtcgtggagaggcagtgggaagcaggatcagcaggtgcagcttcccccgaggaactcgcaagtcctgaggagcgggcctgtccggaggaaccagcggctccttctcccgagccgcgagtgtggctagaggatcctgctagcccagaagagcccggcgagcccgcccctgttccccccggttttggggctgtgtacggagaaccggacctggtcctggaggtgagtggaagacgattacgggcacacaaggctgtgctggcagcacgctctgactactttagagcccgggctagcagggatgtcctcagagtgcagggagtgagcttgactgccctacgcttgcttctagccgacgcttactccggacgcatggctggggtgagaccagacaacgtcgccgaggttgtcgcaggcgctaggcgactgcagttgcctggcgccgctcagagagcaaccgacgccgtcggtccccagctgagcctggcgaattgctacgaagtgctgagcgctgctaaaaggcaacggctgaacgagctgcgtgacgccgcatactgtttcatgagcgatcactacctggaggtcttaagagagcccgccgtattcggccgactgtcaggcgcagagcgggaccttctcctccgcaggaggcttagagccgggagggcccacttgctagccgcagctttgggaccagccggcgagagagctggctccagaccccagtcacctagcggcgatgccgacgccaggggggacgccgccgtttactgctttcatgccgccgccggcgagtggagggaactgacaagactaccagagggcgctcctgccaggggttgtggcctgtgcgtactgtataattacctgttcgttgccggcggagttgcccccgccgggcctgacggaagagcccgcccttccgaccaggtcttttgctataatcctgctaccgattcgtggagtgctgtgcgtccccttcgccaagctcgtagccagttgcggctccttgccctggatgggcacctctacgccgtcggcggggaatgtctcctatctgtggagcggtacgaccctagagctgatcgctgggcacctgtggcccctctacctcgcggtgcctttgcagtcgcacacgaggctaccacttgccacggggagatttacgtttctggcgggtccttattttacagattgctgaagtacgacccacggagagatgagtggcaggaatgcccctgtagcagctcacgcgagagaagcgccgacatggtagccctcgacggcttcatctatcggtttgatctttcaggaagtcggggcgaggcacaggctgccggccccagtggggtatctgtgagtaggtatcactgcctagctaaacagtggtcaccctgtgtggcccctctgaggctgcctggtgggcctacaggcctgcaaccgttccggtgtgcagctttggacggagcaatctactgcgtgtcacgggccggcacctggcgatttcagcctgcacgggagggagaagcgggaggtgatgcgggccagggcggagggttcgaggccctgggcgcccccctggatgtcaggggagtcttgattcccttcgcgctgagtcttcccgagaaaccaccaaggggcgaacagggagctccatag

SEQ ID NO: 182757 - DNA, 1872 bp, Artificial Sequence
  derived and/or modified sequence
atggagcacgctgtggccccctgtgtgctgtacccaggcacagagcccggggctgctggggagagcgagagcgagggcgccgccagccctgcccagaccccctgcagcctgggcgccagcctgtgcttcagcagtggagaggagagccccccccagagcctggccagcgctgctgagggcgccgccaccagcccccccagcagcggcggcccccgggtggtggagcggcagtgggaggccggcagcgctggagctgccagccctgaggagctggccagccctgaggagcgggcctgcccagaggagcctgctgcccccagccctgagccccgggtgtggctggaggaccctgccagccctgaggagcctggagagcccgcccctgtgcccccaggctttggagctgtgtatggagagccagacctggtgctggaggtgtctggaagaaggctgcgggcccacaaggctgtgctggccgcccggagtgactacttccgggcccgggccagcagagatgtgctgcgggtgcagggcgtgtccctgacagccctgcggctgctgctggctgatgcctacagcggccgcatggccggcgtgcggccagacaacgtggccgaggtggtggccggggcccggcggctgcagctgcctggagctgcccagagggccacagatgctgtgggcccccagctgagcctggccaactgctatgaggtgctgtctgctgccaagaggcagaggctgaatgagctgagagatgctgcctactgcttcatgtctgaccactacctggaggtgctgcgggagcctgctgtgtttggccgcctgtctggagctgagcgggacctgctgctgcggcggcggctgcgggccggccgggcccacctgctggccgccgccctgggccctgctggggagcgggccggcagccggccccagagccccagcggagatgctgatgcccggggagatgctgctgtgtactgcttccacgccgccgccggggagtggagggagctgacccggctgcctgagggcgccccagcccggggctgcggcctgtgtgtgctgtacaactacctgtttgtggccggcggcgtggccccagctggcccagatggccgggcccggcccagcgaccaggtgttctgctacaacccagccacagacagctggagcgctgtgcggcccctgcggcaggcccggagccagctgcggctgctggccctggatggccacctgtatgctgtgggcggggagtgcctgctgtctgtggagagatatgaccccagggctgaccgctgggcccctgtggcccccctgcccaggggggcctttgctgtggcccacgaggccaccacctgccacggggagatctacgtgtctgggggcagcctcttctaccgcctgctgaagtatgaccccaggagagatgagtggcaggagtgcccctgcagcagcagccgggagaggtctgctgacatggtggccctggatggcttcatctacagatttgacctgagcggcagcagaggagaggcccaggccgccggccccagcggcgtgtctgtgagccgctaccactgcctggccaagcagtggagcccctgtgtggcccccctgcggctgcccggcggccccaccggcctgcagcccttccgctgtgccgccctggatggagccatctactgtgtgtcccgggccggcacctggaggttccagcctgcccgggagggggaggccggaggagatgctggccagggcggcggctttgaggccctgggcgcccccctggatgtgcggggcgtgctgatcccctttgccctgagcctgcctgagaagcccccaagaggagagcagggcgccccctag

SEQ ID NO: 182758 - DNA, 6710 bp, Artificial Sequence
  derived and/or modified sequence
agcccacccgcctggctgcgcgtcccgggcccggcggctgaagaggagccgcggcgaggaacaagagtgtggtgagaggacgcggaaacacctgatatcccagcaaaggaagctgcagaggaagggtcctgccccgtgagcgaggacagcctccaggagcacagcggcttctcctaacatccccctggcagtgaattacggatgaccccgtatatgaggaggtgtggatgccgacacacggggagagctcctgagaccagcacacaggaccagtgtcctccccgtgaccttgcagttgtgtagccacaagtgggagccacagagaaggagagcccataaggggactcttttcaagacacggtgttaaatcaaggctctgaagttggggccacagccggtctcagctttctgtgttctgggggcgcggtgatatgacagcatgtgaagtgagtgggtgagcacggactcctgagagcgagggcgcacccaatacctggttatctggtactgcagagagacacctagtcagccagcgttgcaaagagggatagctagtcactcaggctgcagagagagacacctggtcacccaggctgcagaaacaaccgcagtcaactgcagctccagtcattgctggatgttggctgacgcggtcctggcgccagctggagatccattcaccaagactttctgggcagatttaaagtggctggggttcagaagttcagcaagtcggacacacccctcctcgctggagaggagagggcaaaggcgaggcgggggagcagcgtgtgagattccccccttcacacacacaacaacaaagcgtggacacacagaagtgaaatctgatcgcgtgccaggaaaagctgtgaggctggaaaccccggagtaaggctcgaccttggccagacctgcaggctgcggaaccgggggcgcgcgggcgcagcgcagcacagcccggccatggagcacgcggtggccccctgcgtcctctacccagggactgagcccggggctgccggggagagcgagagcgagggcgccgcgtccccggcgcagacaccctgcagtctcggcgcgtccctgtgcttcagctccggggaagagtccccgccgcagtccctcgcctcagcggcggaaggcgcggccacctccccgccctccagcggtggcccgcgggtggtggagcggcagtgggaggccggcagcgcgggcgccgcgtccccggaggagctcgcgtcccctgaggagcgcgcgtgcccggaagagcccgcggcgccgtcccccgaaccgcgcgtttggcttgaggaccccgcgtcccccgaggagcccggggagcccgcgcccgtacccccggggttcggggcggtgtacggggagccggacctggtgctggaggtgtcggggcgccggctgcgcgcgcacaaggcggtgctggcggcgcgcagcgactacttccgcgcgcgcgcgtcgcgggacgtgctgcgggtgcagggagtgagcctgacggcgctgcggctgctcctcgccgacgcctacagcgggcgcatggcgggcgtgcggcccgacaacgtggccgaggtggtggccggcgcgcgccgcctgcagctgcccggcgccgcgcagcgcgccaccgacgccgtggggccgcagctgagcctggccaactgctacgaggtcctgagcgcggccaagcggcagcggctgaacgagctgcgcgacgccgcctactgcttcatgagcgaccactatctggaggtgctgcgcgagcccgccgtgttcggccgcctgtcgggcgcagagcgggacctgctgctgcgccgccgcctgcgcgccggccgcgcccacctcttggccgcggcgctcgggccggcgggggagcgcgcgggcagccggcctcagagcccctcgggggacgcggacgcgcgcggggacgcggccgtctactgcttccacgcggcggccggagagtggcgcgagctgacgcggctgcccgagggcgcgccggcgcggggctgcggcctgtgcgtcctctacaactacctcttcgtggcgggcggcgtggcgcccgcgggccccgacggccgcgcgcgcccgtccgaccaggtcttctgctacaacccggccacggacagctggagcgccgtgaggcccctgcgccaggcgcgctcgcagctgcggctgctggccctggacggtcacctctacgccgtgggcggcgagtgcctgctcagcgtggagcgctacgacccgcgcgccgaccgctgggcccccgtggcgccgctgccccggggcgccttcgccgtggcgcatgaggccaccacctgccacggcgagatctacgtgtccgggggctccctcttctatcgcctgctcaagtatgacccgcggcgcgacgagtggcaggagtgcccgtgcagcagcagccgcgagcgctcggccgacatggtggctctcgacggcttcatctaccgcttcgatctgagcggcagccgcggcgaggcgcaggcggcggggccgagcggggtcagcgtgtcccgataccactgcctggccaagcagtggagcccgtgcgtcgcgcccctgcgcctccccggcggccccacgggcctgcagcccttccgctgcgccgccctggacggcgccatctactgcgtgagccgcgcgggcacctggcgcttccagcctgcccgggaaggcgaggccggcggcgacgcaggccagggcggcggcttcgaggcgctgggcgcccccttggacgtccggggtgtgctcatcccgttcgctctcagcctgcctgagaagccgccccgaggggagcagggcgccccgtaggccggcggggtcggcgggcgtctccctcggcaggggtttgcggggcccaggtccctttgggcccgcggaggaggacgtggtggggagtcggggccgctggccacgctggtggtttggacacttcgaaggagccccgaggacgctctcagggccgctttcgctttgctttccttttgcttgtctttgcttctgggggtggatgccttgagacccaggaggtgtgcggatgggtcccttgacagacaggacacagagaaggctgtgggatccaaagggtcagcctcagggtacagtgggggttcctgaggcagcctgcagccggccccggggtgtcccgaaccccgcagagcaccgaggctgtgcgcaggagcctgggaccctcaagtaggtcgccgcgaactatcgggggaagcacgcagagagggtcacgccttttatttttggcttgagatttaaaattataactgataagtaaagctctttctgatttagttgaaaatttcgtaccatgtgctcgctttggttggctcaactccaaaaagagtaatttaataagcattaaaggtaaaatctttgattaccagtaaggtttcttgttcaatatgcattggaagtatttccttccccacaccattgctactcaaactcacatgcctagagcagctccgtctcactgttggaccgagggggctttcatattttcagttgaaaggatgttaactgatgtagcgatgatttaccattatttaaattttaagtcttcagtggctaaatgtgaccaaacagcacatcataagtaggaaaaacttaccagggtgcttgtctatctaaaaagcaatctttgatagtccactctgtatgcccagccgctttcataatctggaacgagataaaatattcctaaaaagcggggaaaatcattttgctttgacagttctataaaaaaaagtgtaggcacattttaaacccactgtatatgatgttttcaatgtggatcgtgtagttctgatgagggagattaatttttacaatcagtattctaagtgtggccgagtgacagtgggcatagatttataacaaggaagtgacgtgcttatcaccatagatttgcaagtaaactgcatgtatttaattgtattgaattgagttccaaaataccctaatagaattaacacgaggctcactgcattgacagggtatgaggattaaaaacaaatcagttgggtcgtttctcatttaacattttacttttcaagtgtgtatacagaggacttactattatgactttgaggatgagatccatgctcacaaatagaggcgaacatttgaactccgaatccaacccattttcttactgtaagaggaaaagttactggaacgtaactagttgaaatcctgcctactttaatattatttgtttgttaatccagtaatgggaactgccatctctgtagaaatcagtgggtaattgaaaaataggttatgctttttaaagagtctgtggttatgagaggtctcagttaagtgtgtttagaagtgatcagcttgaaccttatgcatgactcgggggctggaatttatgatctgggttacggtatgttctggggacgtgtctgcttgcccatggttactcatgaactgaggggatagcttggcaacttggttaatcatcttgggaaagaaaaacagacttcatatcgcctgacttgattggccttttataggagtatactggagaaatggttgtagaaacagtatttacagcaaaaggaaacaaataatgttcattttaagcaatgtaccattcacactgtcctgccttttcctctagaattttattaatggtagaaatttttatatgaaatgggaccaggaccaggctaatattttcagtccttaaatatcaaactcatatgctgttatcactgtgattttacttgtgaaatcattcctgtaatgtttattgtttgaaaatgaaatattgaaattaggcttccagagtaacactgtccccggaaaaggatatgagaagtggtggatgttggatgggggtggttgcacagtcctgtgcggttcccatggctttccagcgtttcatttagtgaaggaatgctcacactagatgtagcacagcttcctgtggggcccggcagcaaagccccaggtgctccctgtcacctcacaacaaaatgcactaagaaacgtaaagaataagaggaattaatacccaccattaaaggatgtccggccaacctattgtggaaatttatagaatagtatacaccacagttctgaatagtgatatcacataaaaatacatactagaggacctgccacgccatgagcagtgtttttgctttttgggggccagtccctggggtgtggagccgctagggtttgcacccatgaaacagagaaaagccacaccctccaaggtgtggctttcattttgggactgctgcagggagggcagaggcattgctgagactgcctggcaacggctgatgccccaggtaggaccttttccaattcaaagtggtgttctaagtctgcgtccaacactgtgtaggaaaaaggttggtgcaaaaatattcctggtcatccacccattaaaatagttagatgaggctattgccttgatgacagctgtccacactcctcatgaaattaacccgtatgccggggcatttccaaatgtctgactcgtgaaattaacccatacgcaggggcctttccaaatgtctgaaaaggcagtggtgtcttttggggaaaatgttatgcatggaagcctgaccttttgcttagttgacagcaatcccttctgtattgccaatcaaggttcatttgagatgcagaggaatgagcttgagccttcctccttttccttccggttttattcttcctcttgggaacatccctccactccgcactgcttcctgcagctttgtagagctggatttggaacttcgggatttggtttctgagtctgtggaggcaccgacttctgctgtaagaaaatgaatgttgtggaaattctttggctacttaactaaaactcgtgactgtataagtttggctacaaataagtaagaaattaatcatctgctctgtttctgctaatttctggtgtcacttcagtaattctggtagcagccgttgaatctgtcagtctcttaggtaacttcctgtaaacgatttggaaataggatgttttcaacgttcttttgtcttttgctgaagtcaggatagattcaagacataatctcttgtaagatctaaatagagcaaatgtaaacaaaagtgcatttttgtattcttgttaattttagatgctttcctagcttacaaaaagttctgtttttgggttaaaaatcaatcaactttctgatatttccccttctgcaatgttattgttcataagaaaacacgagctgaaaatggaaatctgcagttgtttcagttgtcttgaatttctttcagtggccacatcatttccacgttttccacatccgggaggaagcctggactgtgcagccttcgggcacccggcacagacactgtgctggcaggagcttcagacacgccaagtggatggatttggattgaacgcatatgaaacaggagacgggttctcatgtgagatcaaagctcctccaaagcctgttcaagctctaagcgattctcaaatgttaccatttattaaaggtaaactacacctgttgaaggccaagttcagggcagctgttgtgatctgtgtagttaatgtatttattaatgcttgacttttaaaatcctgggcataaatagtgcagagcctcgtatgtttgtcagttcatgccgagatgaaataaatcacgcagaaagtgccagtc

SEQ ID NO: 182759 - DNA, 1872 bp, Artificial Sequence
  derived and/or modified sequence
atggagcacgccgtggccccctgcgtgctgtaccccggcaccgagccaggcgcagccggcgagagtgagagcgagggcgcagcctccccagcacaaaccccttgttctctcggggcctcgctgtgtttctcttcaggggaggagtcacccccccagtcactcgcttccgcggccgagggggctgcaacgtcacctccaagctccggcggcccacgtgtggtagagcgtcagtgggaagctggttcagccggagccgctagccccgaagaacttgctagcccggaggaacgggcctgccctgaggaaccggccgctccttcacccgagccgcgcgtttggcttgaggaccccgctagtcccgaggaaccaggcgagccggccccagtgccaccagggtttggggcagtctatggagagcctgacctggtgcttgaggtcagcggccgtcggcttagagcacacaaggccgttttagccgctagaagcgactactttagggcacgtgcttcccgcgatgttctgagagtgcagggggtctcactgaccgccctgcgactcctgctggctgacgcctattccgggaggatggccggcgtccgcccagataatgtggcagaagtcgtcgctggcgctcggcggctccagttacccggggcagcccaaagagcaacagacgccgtcggccctcagctgagtttggcaaattgctatgaggtgttgtcagcagctaagcggcagcgtttaaacgaactcagggacgcagcatactgttttatgtcagaccattatctcgaagtgctgcgggagccggccgtatttggaaggctgagcggcgcagagcgtgatctgctccttcgacggaggctgagagcagggcgagctcatcttctggcagcagctctgggccccgccggcgaacgggcgggctctcgtccccagtccccgagcggtgacgctgacgcccggggtgacgctgctgtatactgtttccacgccgccgcgggggagtggagagaactcacacggctccccgagggcgctcctgccagaggttgcggcttgtgcgtcctgtataactatctcttcgtggccggaggggtggcccctgccggacccgacggacgagcccgcccttctgaccaggtcttctgttacaatcccgccacagattcatggtctgcggtgcggcccctgcgacaggccagaagtcagctcaggctgttagccctggacggccacttgtacgccgtggggggtgaatgcctgctctccgtagagcgttacgaccctcgggctgatagatgggctcccgtcgctcctcttcctaggggcgcattcgctgttgcgcacgaagcgactacttgccacggagagatctatgtgagcgggggctctctattctatcggctcctgaagtacgatcctaggcgggatgagtggcaggaatgtccttgttctagcagccgggaacgcagcgccgatatggttgctctcgacgggtttatctatcgttttgacctctccgggagccggggtgaagcccaagcggctggcccctctggggtcagtgtctccaggtaccactgtctcgctaaacagtggtccccttgcgtcgccccacttcgtctgcccggaggcccaacaggcctgcagccattccgatgcgccgccctggatggggccatctactgcgtgagtcgagctgggacctggagatttcagcctgccagagaaggggaagccggtggagacgccggacagggaggtggttttgaggctctgggcgcccctctcgacgttagaggagtactaataccgtttgcactctccttgcctgaaaaacctccacgcggcgaacagggggcaccttag

SEQ ID NO: 182760 - DNA, 1872 bp, Artificial Sequence
  derived and/or modified sequence
atggagcacgctgtggccccatgtgtcttgtaccctggcaccgagccaggtgccgctggcgagtctgaaagtgagggtgctgcaagccccgcacagaccccgtgtagtcttggggcttcgctgtgcttctcatctggggaagaatcccccccacagtcactcgcttccgcagctgaaggggctgccactagcccgccatcatctggaggtcctcgggtcgtagagcggcagtgggaggccggatcagccggagccgcaagcccagaagagttggcgtctcccgaggagcgtgcgtgtcctgaggaacctgcggctccttcaccagaacctcgcgtctggttggaagatcccgcttcgcccgaagagcccggtgaaccagcgcctgtaccccctggttttggcgctgtttatggagaaccagatttggttctggaggtctccggcaggagactgagagcgcacaaggccgtcctcgctgcacggtcagattatttccgggctagagcatcacgcgatgttttgcgcgtccaaggagtgtctttgaccgctctgcggctcctccttgccgacgcctacagcgggagaatggccggtgtacgtcccgacaacgtagccgaagtggtggccggagcgagaagattgcagttgcccggagctgcccagcgggctacggacgccgtcgggcctcagctaagcctcgcaaattgctatgaggtcctgtctgctgccaagaggcagcgtcttaacgagctccgggacgcagcctattgcttcatgtccgaccactatctggaagtcttgagggagccggcagtgtttggacgtttgagcggggcagagcgggatctcctactcaggcggagactcagagcgggaagagctcatctgctcgcggcagctttggggccagccggagagagagctggctctagacctcaatctccctccggggatgccgatgcacggggtgatgccgcagtgtattgtttccacgcggctgccggtgagtggcgcgagctaacccggctgcctgagggagcccctgctcgcggatgcggactgtgcgtgctttacaactacctcttcgttgccggaggggtggctccggctgggcctgatggcagggcacggcctagtgatcaagtgttttgctacaatcccgcaaccgactcttggagcgcagtccgtcctctgcggcaggccaggtcccagctccgcttgctcgcactggatggtcacctgtacgctgttggcggtgaatgcttattgtccgtggaaaggtatgacccacgcgctgaccgttgggccccagtcgctccgctgcccaggggagcatttgctgtggctcacgaagccacaacttgtcacggagagatctatgtcagtggtggatccttattctaccgcctgctgaaatacgatcccaggagggacgagtggcaggagtgcccatgctcaagtagcagggagcgctctgccgacatggtcgctttggatgggtttatttacaggttcgacctttccggctcccgaggtgaggctcaggccgctggtccttccggggtctctgttagccgataccattgcctggcaaaacaatggagcccctgtgtggcacccttgcgtttaccgggtgggcctactggcctccaaccttttcgctgtgcagcgctggatggcgctatttattgcgtatcccgtgccggaacgtggcgttttcagcctgctcgggagggggaggcaggtggtgacgccggtcaaggcggaggctttgaagccctgggggcacctctcgatgtacgcggtgtgcttatccccttcgctctgtccttgcctgagaagccacctcgcggagagcagggagccccatag

SEQ ID NO: 182761 - protein, 963 aa, Artificial Sequence
  derived and/or modified sequence
MWCLHCNSERTQSLLELELDSGVEGEAPSSETGTSLDSPSAYPQGPLVPGSSLSPDHYEHTSVGAYGLYSGPPGQQQRTRRPKLQHSTSILRKQAEEEAIKRSRSLSESYELSSDLQDKQVEMLERKYGGRLVTRHAARTIQTAFRQYQMNKNFERLRSSMSENRMSRRIVLSNMRMQFSFEGPEKVHSSYFEGKQVSVTNDGSQLGALVSPECGDLSEPTTLKSPAPSSDFADAITELEDAFSRQVKSLAESIDDALNCRSLHTEEAPALDAARARDTEPQTALHGMDHRKLDEMTASYSDVTLYIDEEELSPPLPLSQAGDRPSSTESDLRLRAGGAAPDYWALAHKEDKADTDTSCRSTPSLERQEQRLRVEHLPLLTIEPPSDSSVDLSDRSERGSLKRQSAYERSLGGQQGSPKHGPHSGAPKSLPREEPELRPRPPRPLDSHLAINGSANRQSKSESDYSDGDNDSINSTSNSNDTINCSSESSSRDSLREQTLSKQTYHKEARNSWDSPAFSNDVIRKRHYRIGLNLFNKKPEKGVQYLIERGFVPDTPVGVAHFLLQRKGLSRQMIGEFLGNRQKQFNRDVLDCVVDEMDFSTMELDEALRKFQAHIRVQGEAQKVERLIEAFSQRYCICNPGVVRQFRNPDTIFILAFAIILLNTDMYSPNVKPERKMKLEDFIKNLRGVDDGEDIPREMLMGIYERIRKRELKTNEDHVSQVQKVEKLIVGKKPIGSLHPGLGCVLSLPHRRLVCYCRLFEVPDPNKPQKLGLHQREIFLFNDLLVVTKIFQKKKNSVTYSFRQSFSLYGMQVLLFENQYYPNGIRLTSSVPGADIKVLINFNAPNPQDRKKFTDDLRESIAEVQEMEKHRIESELEKQKGVVRPSMSQCSSLKKESGNGTLSRACLDDSYASGEGLKRSALSSSLRDLSEAGKRGRRSSAGSLESNVEFQPFEPLQPSVLCS

SEQ ID NO: 182762 - DNA, 2892 bp, Artificial Sequence
  derived and/or modified sequence
atgtggtgcctccactgtaactccgagcgtacccagagcttgcttgagttagaactcgactccggtgtggaaggagaagctccgtcaagtgaaaccggaacaagcttggatagcccgagcgcatacccccaagggcctctggtgcccggtagcagcctaagcccagatcactacgagcatacatcagtgggggcttacggcctgtacagtggaccacccggacagcagcagagaactaggagaccaaaactccaacactctacctccatattgcgcaagcaggctgaggaggaggccatcaagcggtctcgttcactctctgagagctatgaactttcctccgacttgcaggataagcaagtcgagatgctcgagcgaaaatacggagggcgactagtgactcgccatgctgccaggaccatccagaccgccttcagacagtaccaaatgaacaagaattttgagcgattgcggagctctatgagtgagaaccggatgagtcgacgcatagtgctgtctaatatgcggatgcaatttagctttgaagggccagaaaaagtgcactctagttattttgaaggaaagcaggtaagcgtgacaaacgatggaagtcaacttggcgccttggtcagccctgagtgtggcgatctttccgagcccacgacccttaaatcaccagctccatcatccgacttcgccgacgctatcactgagttggaggatgctttttcaaggcaggtcaaatctctggcagaatccatagacgacgcattaaactgtcgctccctgcacactgaggaggcccccgctctcgatgcggcccgggccagagacactgaaccacagaccgcgttgcatgggatggaccaccgaaaactcgacgagatgacagcatcgtactctgacgtaactctgtacattgacgaagaggagctttcaccacctctgcctctgagccaggctggagacagaccctctagcaccgaatccgatctgagactccgagctggcggtgcggcacccgactactgggcacttgcccataaggaagataaagctgacaccgatacatcctgtagatcaaccccttctctagaacgtcaggaacaaagactgcgggtagaacacctgcccctcctgaccattgagcctcccagcgattcctctgtggacctcagcgacaggtctgagagggggagcttgaagagacagtcggcctacgagcgatccttgggaggccagcagggctctcctaagcacgggccccactcaggcgctccaaaaagccttccccgggaagagccggagttgaggcctagaccccccagacccctggacagtcatctagcaatcaacggcagcgccaaccgacaaagtaagagtgagagcgactattccgacggcgacaatgattccattaactcgacatcaaacagtaacgataccattaattgttcctccgaatcctcctcacgggatagcctgcgggaacaaacgctgagcaagcagacatatcacaaggaagcgaggaactcctgggattctccggccttctctaatgatgtcatccgcaagcggcactaccgcattggtcttaatctgttcaataaaaaaccagaaaaaggggtccaatacctaattgagcggggctttgtgccagacactcctgttggggtagcacattttctgctacagcggaaagggttgtcacgacagatgattggtgaatttcttggcaatcggcagaaacagttcaatagggatgttttggactgtgtggtcgacgagatggatttctcgactatggagttggacgaggcactcaggaaatttcaggcccacatacgcgtgcagggagaagcccagaaggtggagcgactgatcgaggcattcagccaaaggtattgtatttgcaaccccggagttgtgaggcagttcagaaacccagatacaatattcattctcgcctttgcaatcattctgctgaacactgatatgtactcgccgaacgtgaagcctgagcgtaagatgaagttagaggactttatcaagaatctgcgaggcgtggatgatggagaagatattccacgggagatgcttatgggaatctacgaacgcattaggaaacgagaacttaaaacaaatgaggaccacgtcagccaggtccagaaggtcgagaagctcatagtgggcaaaaagcccataggtagcttgcaccctggcctgggctgcgtccttagtctaccccatcggcgcttggtgtgttattgccgactgttcgaggtacctgaccccaataaaccccagaagttgggacttcaccagagagaaatcttcctcttcaacgacctgctggtggtgacaaaaatcttccagaagaagaaaaatagtgtgacctattcatttcgacaaagtttctcattatatggaatgcaggtgcttttgttcgagaatcaatattatcccaatggaattcgcctcacttcaagtgtaccaggggcagacattaaagtattgataaatttcaatgcgcctaaccctcaggataggaaaaagtttaccgacgatctgagagagtctattgctgaagtccaagaaatggagaaacacagaatagagagtgagctggagaagcagaaaggggtcgtcaggcctagcatgagccaatgtagctctctgaagaaagagagtggcaacgggacgctgtcccgggcttgcttggacgattcctacgcaagcggggaggggctgaagaggtctgccctcagtagctctcttcgggacctgtctgaagccggcaaaagagggcgacggagctcagctggtagtcttgagagtaacgtcgagttccaaccctttgagcctttacagccttctgttctctgtagctag

SEQ ID NO: 182763 - DNA, 2892 bp, Artificial Sequence
  derived and/or modified sequence
atgtggtgcctgcactgcaacagcgagaggacccagagcctgctggagctggagctggacagcggcgtggagggggaggcccccagcagcgagaccggcaccagcctggacagccccagcgcctacccccagggccccctggtgcccggcagcagcctgagcccagaccactatgagcacacctctgtgggcgcctacggcctgtacagcggccccccaggccagcagcagaggacccggcggcccaagctgcagcacagcaccagcatcctgaggaagcaggccgaggaggaggccatcaagaggagccgcagcctgtctgagagctatgagctgagcagtgacctgcaggacaagcaggtggagatgctggagaggaaatatggaggccgcctggtgaccaggcatgctgcccggaccatccagacagccttccggcagtaccagatgaacaagaactttgagcggctgcggagctccatgtctgaaaataggatgagccgccgcatcgtgctgagcaacatgaggatgcagttctcctttgagggccctgagaaggtgcacagcagctactttgagggcaagcaggtgtctgtgaccaatgatggcagccagctgggcgccctggtgtccccagaatgtggggacctgtctgagcccaccaccctgaagagccctgcccccagcagtgactttgctgatgccatcacagagctggaggatgccttcagccggcaggtgaagagcctggccgagagcattgatgatgccctgaactgccgcagcctgcacacagaggaggccccagccctggatgctgcccgggcccgggacacagagccccagacagccctgcacggcatggaccacaggaagctggatgagatgacagccagctacagtgatgtgaccctgtacattgatgaggaggagctgagcccccccctgcccctgagccaggccggggaccggcccagcagcacagaaagtgacctgcggctgcgggccggcggggccgccccagactactgggccctggcccacaaggaggacaaggctgacacagacaccagctgccgcagcacccccagcctggagcggcaggagcagaggctgcgggtggagcacctgcccctgctgaccatcgagccccccagcgacagctctgtggacctgagtgacagaagtgagcggggcagcctgaagaggcagagcgcctatgaaagaagcctgggcggccagcagggcagccccaagcacggcccccacagcggggcccccaagagcctgccccgggaggagcctgagctgcggcccaggcctccccggcccctggacagccacctggccatcaatggcagcgccaaccggcagagcaagtctgagagtgactacagtgatggagacaatgacagcatcaacagcaccagcaacagcaatgacaccatcaactgcagcagcgagagcagcagccgggacagcctgcgggagcagaccctgagcaagcagacctaccacaaggaggccaggaacagctgggacagccctgccttcagcaatgatgtgatcaggaagaggcactaccgcatcggcctgaacctcttcaacaagaagccagagaagggcgtgcagtacctgattgagcggggctttgtgcctgacacccctgtgggcgtggcccacttcctgctgcagaggaagggcctgagccggcagatgattggagagttcctgggcaaccggcagaagcagttcaacagagatgtgctggactgtgtggtggatgagatggacttcagcaccatggagctggatgaggccctgaggaagttccaggcccacatccgggtgcagggcgaggcccagaaggtggagcggctcatcgaggccttcagccagcgctactgcatctgcaaccctggggtggtgcggcagttcagaaatccagacaccatcttcatcctggcctttgccatcatcctgctgaacacagacatgtacagccccaacgtgaagccagagaggaagatgaagctggaggacttcatcaagaacctgcggggcgtggatgatggagaggacatcccccgggagatgctgatgggcatctatgaaagaatcaggaagcgggagctgaagaccaatgaagaccacgtgtcccaggtgcagaaggtggagaagctgattgtgggcaagaagcccatcggcagcctgcaccctggcctgggctgtgtgctgagcctgccccaccggcggctggtgtgctactgccgcctgtttgaggtgcctgaccccaacaagccccagaagctgggcctgcaccagcgggagatcttcctgttcaatgacctgctggtggtgaccaagatcttccagaagaagaagaacagcgtgacctacagcttccggcagagcttcagcctgtatggcatgcaggtgctgctgtttgagaaccagtactacccaaatggcatccggctgaccagctctgtgcctggagctgacatcaaggtgctgatcaacttcaatgcccccaacccccaggacaggaagaagttcacagatgacctgcgggagagcattgctgaggtgcaggagatggagaagcaccgcatcgagagcgagctggagaagcagaagggcgtggtgcggcccagcatgagccagtgcagcagcctgaagaaggagagcggaaatggcaccctgagccgggcctgcctggatgacagctatgccagcggggagggcctgaagaggtctgccctgagcagcagcctgcgggacctgtctgaggccggcaagagaggaagaagaagcagcgctggcagcctggagagcaatgtggagttccagccctttgagcccctgcagcccagcgtgctgtgcagctag

SEQ ID NO: 182764 - DNA, 2892 bp, Artificial Sequence
  derived and/or modified sequence
atgtggtgcctgcactgcaacagcgagcggacccagagcctgctggaactggaactggactccggggtcgagggtgaagctccctcatccgaaaccggaacgtccctggactctccttctgcctacccacaggggcccctggtgccaggctccagcctatcaccggaccattatgagcataccagtgttggagcctacggattgtactctggaccacccggtcagcagcaaaggacccgccgacccaagttgcagcactccaccagcattttgcgcaaacaggccgaggaggaggccatcaagaggtcccggagcttgagcgaaagctacgaactgtctagtgatctccaggacaaacaggtcgagatgttagaacggaagtatggggggcgattagtcaccaggcacgctgcacggacaatacagacagcattccgccagtatcagatgaacaagaattttgagcggttaagaagctccatgtctgaaaatcgaatgtcccgccgcatagttctgtctaacatgagaatgcaattctccttcgaaggacccgaaaaagtgcattcctcttactttgaggggaaacaagtgtccgttacgaacgatggtagccaactcggagcgctggtcagtcccgagtgcggggacctttccgagcccacaacattaaaatcacctgccccctcatctgatttcgcggatgcgattactgagctggaggacgccttctcacggcaggtcaaatccttggctgagtcgatcgatgatgctctgaattgccgctctctgcacaccgaagaggcacctgcccttgatgcggctagagccagagacacagagcctcagacagctctgcacggtatggatcaccggaaactcgacgagatgactgcttcgtattcagatgtcacactttatatagacgaagaggagctgtccccaccattgcccttgtcacaggccggggataggccttccagtactgagtcagatctcaggctgcgggcaggcggagcagcgccagactattgggccctggcacacaaggaagataaagcagacaccgatacatcatgcaggtccactccctctctggaacggcaggaacagcggctccgagtcgaacacctacctctgctcacaatagagccaccaagtgattccagtgtcgatttaagtgatcggtccgagcggggcagcctcaaacggcagtccgcctatgaaaggtcattgggagggcaacagggctctcctaagcatgggcctcatagtggggcacctaagagtctgccacgggaggagcccgagcttcggcctagacctccaaggccactggattcacacttggccattaacggcagcgcaaaccgccagtctaaaagcgaatccgactatagtgacggtgacaacgattctatcaattctacttctaattcaaacgacaccatcaattgctcatcagaatcgtcctccagagactccctgagagagcagacgcttagcaagcagacataccacaaggaggctcgtaactcttgggactcccctgcgtttagcaatgatgtcattcgaaaacgccactaccggattgggctaaatctgttcaataagaaaccagagaaaggcgtccagtatctgatcgaacgagggtttgtgcccgacacacctgtcggcgtggcccactttttgttgcagcgaaagggcctcagcagacagatgatcggcgagttcctggggaacaggcaaaaacagttcaaccgcgacgtcctcgattgcgttgttgacgaaatggactttagtacgatggaattggacgaggctctgcggaaattccaggcccacattagagtccaaggcgaggcgcagaaggttgagcggttgatcgaagccttctcccaaaggtactgcatttgcaatccaggggtcgtgcggcagttcaggaatccggacaccattttcatcttggccttcgccataattttgctcaacacagatatgtatagccctaacgttaagccagaacgtaagatgaagttagaggactttataaagaacttgcgtggggtcgacgacggcgaggatattccgcgcgaaatgctgatgggcatatacgagaggatcagaaagcgggaactgaaaacaaatgaagaccacgtttcccaagtccagaaagtggaaaaattgatcgtcggtaagaaacccatcgggtccctgcatcccggtttggggtgtgttctgagcctgcctcaccgaaggcttgtctgttactgtaggttgttcgaagtccccgatccaaacaagcctcaaaaactgggcttgcaccagcgtgagatttttctattcaacgacctgctagtggtcaccaaaatttttcagaagaagaaaaatagcgtaacttacagtttccggcagtccttctctctgtacgggatgcaggtgctgctctttgagaatcaatattatcctaatggaatcaggctgacttcctccgtgccgggcgccgatattaaggtgctcatcaactttaatgcccccaacccacaggaccggaagaaatttacagatgacctacgcgagtctatcgccgaggtgcaggagatggagaagcatcgcatagaatcagagctcgagaagcagaaaggtgtggtgaggccttcaatgagtcagtgttcttcacttaagaaagagtccgggaacggcaccctgtcacgggcttgtctcgatgactcatatgctagcggagagggcctgaagagatctgctctatcatcatccctacgggacctctccgaagcgggcaagcgcggacgacgatcatccgctggaagccttgaaagcaatgtcgaattccagccttttgaaccactgcaaccaagcgtgctatgcagttag

SEQ ID NO: 182765 - DNA, 2892 bp, Artificial Sequence
  derived and/or modified sequence
atgtggtgcttgcattgcaattctgagagaactcagagcctattggagttggaattggattccggcgtggagggagaagcaccatctagcgaaaccggtactagtcttgacagtccttccgcttatccgcaaggccctcttgtccctggatcgtccctgagtcccgatcattatgagcataccagcgtgggagcttacggactttactcagggccaccagggcagcaacaaagaaccagaaggcctaagttacagcacagcacctcaatcctgcggaagcaggcagaagaagaggcaattaagcggtcgcgatctctcagtgaatcatatgagttgagctctgacctccaggacaagcaagttgagatgctggagagaaaatatgggggacgcttggtcacacgccatgcagcaagaaccatacaaacagccttccgccagtatcagatgaacaagaactttgagaggcttcggagtagcatgtccgaaaatcgcatgtcaagacgcatcgtcctcagcaatatgaggatgcagttctcgttcgagggtccagaaaaggtgcatagttcctattttgagggcaaacaggtgtcagttacaaacgatggctcccagctcggcgcacttgtgtcccccgaatgcggcgatctttcagagcccactacacttaagtccccagccccttcttccgacttcgctgacgccatcaccgagctggaggacgcattcagccgccaagtgaaatccttagcagagagcatcgatgatgccctcaattgtcgcagcctccacaccgaggaggcccctgccctggatgccgcacgcgcaagagatactgagccgcaaactgccctccatggcatggaccatagaaaactggacgaaatgacggccagctactcagatgttaccctgtatatcgatgaagaggaactgtccccacctctaccactgtcccaggcaggagaccggccttcaagcactgaatccgacctgagactgcgggcaggaggagctgctcccgactactgggctctcgctcacaaagaagacaaagcggatacagatacatcctgccgctccacgccaagcttggaaagacaagaacagagactgcgtgtggagcatctcccccttctcacaatcgagcccccatcagacagcagcgtcgacctatcagataggagcgaacggggaagtttgaaaaggcagagtgcttacgagagatcactgggaggacaacagggcagccctaagcacgggccacattctggagcaccgaaatctctgcctcgcgaagagcctgagctgcggccacgcccacccagaccactcgacagccacctggctataaacggcagcgcaaatcgccagtccaaaagcgaaagcgattactcggatggggacaatgatagtattaacagcacttcaaattcaaacgacactattaattgctcatccgaaagttcctccagggattctctgcgggagcagacgctgagtaagcaaacttatcataaggaggctagaaatagttgggacagcccagctttctcaaatgacgtcataagaaagagacactatcgcatcggtctgaacctgttcaacaaaaagccagagaaaggggtgcagtacctgattgaaagggggttcgtaccagatacaccagtcggcgtggcccatttcctcctgcaacgcaagggcctgtctcggcagatgatcggagagttcctgggtaaccggcaaaaacaatttaaccgcgacgtcctagattgtgttgtcgatgagatggatttcagcacaatggagttagacgaggcccttaggaagtttcaggcacatatccgggttcagggcgaagctcaaaaggtggagaggctgatcgaagctttctcacaacgctactgcatatgcaatccaggtgttgttcgccagttcagaaacccagacactatctttattctagccttcgcaattatactgctgaacacggacatgtattcaccaaacgtgaaacctgagcgtaaaatgaagctcgaggatttcataaaaaacttgcgtggggtggacgatggggaggatatcccacgggaaatgctcatgggaatctacgagcggataagaaagcgagaactgaagacaaacgaagaccatgtaagccaagtgcagaaggtcgagaaactgattgtaggaaaaaaacctataggcagtctccaccccggactgggctgtgtgctctcactcccacatcggaggctggtgtgttattgccgcttgtttgaggtgccagaccctaacaaacctcagaagctggggcttcatcagagagagattttcttgttcaatgaccttcttgtcgtgacaaagatatttcaaaaaaaaaagaacagcgtcacatattcctttagacaaagcttctccctgtatggcatgcaggtgctactgttcgagaatcagtactaccctaatggaattaggctgacttcttcggtgccaggagccgacattaaggttctcattaatttcaatgcccctaatccccaagacaggaaaaagttcaccgacgacttgcgggagagtatcgctgaggtgcaagaaatggagaaacaccgcatcgagtcggagttggagaagcagaagggtgtggtcaggccttccatgtcccagtgcagtagcctgaagaaggaaagtggcaacggcaccttgtcccgagcttgtctggatgactcctacgccagcggcgagggtcttaagagatctgccttgtcctcctccctacgggatctgtcggaagcgggaaaacgcggaaggagatccagcgccggttccctggaatcaaatgtggagttccaaccctttgaaccccttcagccctctgttctgtgcagctag

SEQ ID NO: 182766 - DNA, 5279 bp, Artificial Sequence
  derived and/or modified sequence
gcgggcttggctggcctggggctcggacttggggccggagccgcgggagccggcggacgctggaccaggagccccgacgtgatcgcgtggcgggtggtcgggtctccgggtggccgggtgtcggccccgggatccggcggctcgctggcgggagtcggcggcctctgctgggcctgggtcccggctcccggcccggcccgctcccactgcggccgccatgtggtgcctgcactgcaactcggagaggacccagtcccttctggagctagagcttgacagcggcgtcgagggcgaggcccccagcagtgagactggcacatccctggacagcccctcagcctacccccagggccccttggtgcccggttccagcctgagcccggatcactacgagcacacgtcagtgggagcctatgggctgtactcggggccgccggggcaacagcagcgcacgcggaggcccaagctgcagcactcgacctccatcctgcgcaagcaggctgaggaggaggccatcaagcgctcacgctcactctccgagagctatgagctctcctcggacctgcaggacaagcaggtggagatgctagaacgaaagtatggggggcgcctggtaacccgccatgcggcccgcaccatccagacggcgtttcgccagtaccagatgaacaagaacttcgagcgcttgcgcagctccatgtcagagaaccgcatgtcacgccggattgtgctgtccaacatgaggatgcagttctcctttgaggggcctgagaaagtgcacagctcctacttcgaggggaagcaggtctcagtgactaacgacggctcccagctgggagccctggtgtcccctgagtgtggtgacctcagcgagcccaccaccctcaagtctccggccccctccagtgactttgcggacgccatcaccgagctggaggacgccttctctaggcaagtgaaatcactggccgagtccatcgacgatgccctcaactgccgcagcctgcacactgaggaggcaccggccctggatgcggcgcgggcccgggacaccgaaccccagacagccctgcacggcatggaccaccgcaaactggacgagatgacggcctcgtacagtgatgtcaccctgtacatcgatgaggaggagctgtcgccccctctgcccctctcgcaggcaggggaccggccgtccagcaccgagtcggacctgcggctacgggctgggggcgcagccccagactactgggccctggcccacaaagaggacaaggctgacacggacacgagctgccggagcacgccgtcgctggagcggcaggagcagcggctgcgggtggagcatctgccgctgctcaccatcgagccacccagcgacagctctgtggaccttagtgaccgctcggagcgggggtcactcaagaggcagagtgcttacgagcgcagccttggcgggcagcagggcagtcccaagcatggtccccacagcggcgcccccaagagcctcccccgggaggagcctgagttgcggccccggccccccaggcccctggacagccacttggccatcaatggctcagccaaccggcagagcaagtctgagtcggactactcagacggtgacaatgacagcatcaacagcacgtccaactccaacgataccatcaactgcagctccgagtcatcgtcccgtgacagcctgcgggagcagacgctcagcaagcagacctaccacaaggaggcccgcaacagctgggactcgcctgcctttagcaacgatgtcatccgcaagaggcactaccgcatcggcctgaacctcttcaacaagaagcctgagaagggagtccagtacctcatcgagcgtggctttgtgcccgacacgcccgtcggggtggcccacttcctgctgcagcgcaagggcctcagccggcagatgatcggcgagttcctgggcaaccggcagaagcagttcaaccgtgacgtgctcgactgcgtcgtggacgagatggacttctctaccatggagctggatgaggccctcaggaaattccaggcgcacatccgtgtccaaggggaggctcagaaagtggagcggctcatagaggcgttcagccagcgctactgcatctgcaaccctggggtggtgcggcaattccggaacccagacaccattttcatcctggccttcgccatcatcctgctgaacaccgacatgtacagccccaatgtcaagcccgagcggaaaatgaagctagaggacttcatcaagaacctccgaggtgtggacgatggtgaggacattccccgtgagatgctgatggggatctatgaacggatccgtaagcgagagctaaagaccaatgaggaccatgtgtcccaggtgcagaaggtggagaagctcattgtggggaaaaagccgatcggatccctgcatcccgggctcggctgtgtgctctctctgccccaccgtcggttggtctgctactgccggctctttgaggttccagacccaaacaagccccagaaactcggactacaccagcgagaaatcttcctgttcaacgacctcctggtggtcaccaagatcttccagaagaagaagaactcggtgacgtacagcttccgacagtccttctccttgtacggcatgcaggtcctgctcttcgagaaccagtactaccccaatggcatccggctcacctcgtctgtccccggagcagatatcaaagtgttaataaacttcaacgcccccaaccctcaagaccggaagaaattcaccgatgacctgcgggagtccattgcggaagtccaagagatggagaagcacaggatagagtcggagctcgagaagcagaaaggcgtcgtgcggcccagcatgtcccagtgctctagcctcaaaaaggagtcgggcaacggaacactgagccgggcctgcctggacgacagctatgccagcggtgagggcctcaagcgcagcgccctcagcagctccctgcgggacctctcggaagccgggaagcgagggcgtcgcagcagtgcgggatcgctagagagcaatgtggaatttcagcctttcgagccactgcagccgtcagtgctgtgctcctaagccatgggacccgaggactgccccccggcgcctgcccaggcggaggccctttcagaaagggcgaagctcacgcctgactctgcgggccgcggggccgcgttcccagtggacagcgtggtgagccgtggccggacggcaggaggagaggggagccccctctggctgtgtgtcaccttggctggctggctggccagggttttgccgatttccctcctcacatccctcccaccctcggtcatatcattgagatcaccgtaccagcaaatctgcaaaccaagcactttgttaatctccagagagagcaaatacagcaatctagagtttagcctttttaaaaatgtgactttaacccgcccacctgtgtcctcccattggcgtggcatttctttggtgtctgctcagaaagaaacagcatgggaccgtgtgattgggtccaggctgggctgtcagggaagcgccctggtgtctccgactcatcaattctcgggtcttttttaaaagccaggctccccaaagcactctgtctcgcaattttgaggaggctgttccgacctggaagcgttaaactgctgcatgtcatctggcgtcagctgtgaggctgcgctctgcgtgttgtgcgtttgcaaaatgtattggcgtgactgtaaacacatcgttgaagtaaagcgattacatattgagtatgtcagcttttctcaccctcttctgtgctgggaggagagtctaactgtaacctttaggttgttccagaaaagattcaggccgtttggcacagaattgctctttctgaagggtagcagtaatgaataggaacagacagaaaaccccaggaggggctttcaggaaactctccctctccatcgccatcctgcaagctccacagcctcgggctgccagcctgtggcactgtcctcggtgtgtcctggagctgtgctgggcagcagggcctcgcgtaaggaactgctggaacccactgagcccttcccggggtttcccgccgcactcagtgtgttccttcaggctagtgaggtttcattctgttttatttgcaagcttatcaaaagtttgtggaagatacattgttgggttccagaggctggagtcatgctgcccacatcttgtttgggaaagcaaaagctcccagtgagctggtgtccccgtgtgtctttcatgggactgtcccctttagagatcccacctgtcagagccacagcttcggggtcctgtcatcacatcccctgggaggggaggcaggaggaggccgagggccccaggatgtctgcctggtcccttctcactgtgaggacgcccttggcacacctttctcaagtcacacaaattactgcagttacatacagaattgctgacaggagcaggagacgctgagggaaacagctggcaatgtgacaaaagtcttttctgggacaacaatcaaatcatgtatttgtatttttttaagtttaccaatgaattgtacaacaatgtaaaaataaagttcatcctaatatgctgtgcacatcttgcttaaaaatgtcttcagcacccagtgcagtgatctttccctcacacactgcatgcagcaggagcctcttgtttttcttaatgagctgaaaagacagcagatgttcacagctgatgctgggtgttgactcagcgccacgggaagctctgtgcccgcaggtaagcacgcacagtcttacagttctccttgtaaaatatcatcacccttcctgcctgagaaacgagtacatttgtattttatgtaacaacaatagtcaaggcagcattgcaacactgagcagggtgaggtgggggtgctgagcacaggacaagagggaggaggcctgccctccattcagatgcatctgcatcgcccttctgtgtgcagtcacatcgagactgcacacagcatgcatctcctcttggaaaatatcttttgcctccgagttgttttaagcaattagaatcaggtcctgaatccccagactgttcagagacttcaagggacacctccctcacaagaagcctggcacccccactgtgtacctttgagaggaaaggagtgcgtttgttttcatctgcattctgtttgtcagtggcaacagactctatcaatgtaaaaccatggttgtgatcatgtggggaaatcaaataaatcctttgaaactct

SEQ ID NO: 182767 - DNA, 2892 bp, Artificial Sequence
  derived and/or modified sequence
atgtggtgcctgcactgcaacagcgagagaacccagagcctgctggagctggagctggacagcggcgtggagggcgaggcccccagcagcgagaccggcaccagcctggacagccccagcgcctacccccagggccccctggtgcccggcagcagcctgagccccgaccactacgagcacaccagcgtgggcgcctacggcctgtacagcggcccccccggccagcagcagagaaccagaagacccaagctgcagcacagcaccagcatcctgagaaagcaggccgaggaggaggccatcaagagaagcagaagcctgagcgagagctacgagctgagcagcgacctgcaggacaagcaggtggagatgctggagagaaagtacggcggcagactggtgaccagacacgccgccagaaccatccagaccgccttcagacagtaccagatgaacaagaacttcgagagactgagaagcagcatgagcgagaacagaatgagcagaagaatcgtgctgagcaacatgagaatgcagttcagcttcgagggccccgagaaggtgcacagcagctacttcgagggcaagcaggtgagcgtgaccaacgacggcagccagctgggcgccctggtgagccccgagtgcggcgacctgagcgagcccaccaccctgaagagccccgcccccagcagcgacttcgccgacgccatcaccgagctggaggacgccttcagcagacaggtgaagagcctggccgagagcatcgacgacgccctgaactgcagaagcctgcacaccgaggaggcccccgccctggacgccgccagagccagagacaccgagccccagaccgccctgcacggcatggaccacagaaagctggacgagatgaccgccagctacagcgacgtgaccctgtacatcgacgaggaggagctgagcccccccctgcccctgagccaggccggcgacagacccagcagcaccgagagcgacctgagactgagagccggcggcgccgcccccgactactgggccctggcccacaaggaggacaaggccgacaccgacaccagctgcagaagcacccccagcctggagagacaggagcagagactgagagtggagcacctgcccctgctgaccatcgagccccccagcgacagcagcgtggacctgagcgacagaagcgagagaggcagcctgaagagacagagcgcctacgagagaagcctgggcggccagcagggcagccccaagcacggcccccacagcggcgcccccaagagcctgcccagagaggagcccgagctgagacccagaccccccagacccctggacagccacctggccatcaacggcagcgccaacagacagagcaagagcgagagcgactacagcgacggcgacaacgacagcatcaacagcaccagcaacagcaacgacaccatcaactgcagcagcgagagcagcagcagagacagcctgagagagcagaccctgagcaagcagacctaccacaaggaggccagaaacagctgggacagccccgccttcagcaacgacgtgatcagaaagagacactacagaatcggcctgaacctgttcaacaagaagcccgagaagggcgtgcagtacctgatcgagagaggcttcgtgcccgacacccccgtgggcgtggcccacttcctgctgcagagaaagggcctgagcagacagatgatcggcgagttcctgggcaacagacagaagcagttcaacagagacgtgctggactgcgtggtggacgagatggacttcagcaccatggagctggacgaggccctgagaaagttccaggcccacatcagagtgcagggcgaggcccagaaggtggagagactgatcgaggccttcagccagagatactgcatctgcaaccccggcgtggtgagacagttcagaaaccccgacaccatcttcatcctggccttcgccatcatcctgctgaacaccgacatgtacagccccaacgtgaagcccgagagaaagatgaagctggaggacttcatcaagaacctgagaggcgtggacgacggcgaggacatccccagagagatgctgatgggcatctacgagagaatcagaaagagagagctgaagaccaacgaggaccacgtgagccaggtgcagaaggtggagaagctgatcgtgggcaagaagcccatcggcagcctgcaccccggcctgggctgcgtgctgagcctgccccacagaagactggtgtgctactgcagactgttcgaggtgcccgaccccaacaagccccagaagctgggcctgcaccagagagagatcttcctgttcaacgacctgctggtggtgaccaagatcttccagaagaagaagaacagcgtgacctacagcttcagacagagcttcagcctgtacggcatgcaggtgctgctgttcgagaaccagtactaccccaacggcatcagactgaccagcagcgtgcccggcgccgacatcaaggtgctgatcaacttcaacgcccccaacccccaggacagaaagaagttcaccgacgacctgagagagagcatcgccgaggtgcaggagatggagaagcacagaatcgagagcgagctggagaagcagaagggcgtggtgagacccagcatgagccagtgcagcagcctgaagaaggagagcggcaacggcaccctgagcagagcctgcctggacgacagctacgccagcggcgagggcctgaagagaagcgccctgagcagcagcctgagagacctgagcgaggccggcaagagaggcagaagaagcagcgccggcagcctggagagcaacgtggagttccagcccttcgagcccctgcagcccagcgtgctgtgcagctag

SEQ ID NO: 182768 - protein, 1198 aa, Artificial Sequence
  derived and/or modified sequence
MNFEGLDPGLAEYAPAMHSALDPVLDAHLNPSLLQNVELDPEGVALEALPVQESVHIMEGVYSELHSVVAEVGVPVSVSHFDLHEEMLWVGSHGGHATSFFGPALERYSSFQVNGSDDIRQIQSLENGILFLTKNNLKYMARGGLIIFDYLLDENEDMHSLLLTDSSTLLVGGLQNHIIEIDLNTVQETQKYAVETPGVTIMRQTNRFFFCGHTSGKVSLRDLRTFKVEHEFDAFSGSLSDFDVHGNLLAACGFSSRLTGLACDRFLKVYDLRMMRAITPLQVHVDPAFLRFIPTYTSRLAIISQSGQCQFCEPTGLANPADIFHVNPVGPLLMTFDVSASKQALAFGDSEGCVHLWTDSPEPSFNPYSRETEFALPCLVDSLPPLDWSQDLLPLSLIPVPLTTDTLLSDWPAANSAPAPRRAPPVDAEILRTMKKVGFIGYAPNPRTRLRNQIPYRLKESDSEFDSFSQVTESPVGREEEPHLHMVSKKYRKVTIKYSKLGLEDFDFKHYNKTLFAGLEPHIPNAYCNCMIQVLYFLEPVRCLIQNHLCQKEFCLACELGFLFHMLDLSRGDPCQGNNFLRAFRTIPEASALGLILADSDEASGKGNLARLIQRWNRFILTQLHQDMQELEIPQAYRGAGGSSFCSSGDSVIGQLFSCEMENCSLCRCGSETVRASSTLLFTLSYPDDKTGKNYDFAQVLKRSICLDQNTQAWCDTCEKYQPTIQTRNIRHLPDILVINCEVNSSKEADFWRMQAEVAFKMAVKKHGGEISKNKEFALADWKELGSPEGVLVCPSIEELKNVWLPFSIRMKMTKNKGLDVCNWTDGDEMQWGPARAEEEHGVYVYDLMATVVHILDSRTGGSLVAHIKVGETYHQRKEGVTHQQWYLFNDFLIEPIDKHEAVQFDMNWKVPAILYYVKRNLNSRYNLNIKNPIEASVLLAEASLARKQRKTHTTFIPLMLNEMPQIGDLVGLDAEFVTLNEEEAELRSDGTKSTIKPSQMSVARITCVRGQGPNEGIPFIDDYISTQEQVVDYLTQYSGIKPGDLDAKISSKHLTTLKSTYLKLRFLIDIGVKFVGHGLQKDFRVINLMVPKDQVLDTVYLFHMPRKRMISLRFLAWYFLDLKIQGETHDSIEDARTALQLYRKYLELSKNGTEPESFHKVLKGLYEKGRKMDWKVPEPEGQTSPKNAAVFSSVLAL

SEQ ID NO: 182769 - DNA, 3597 bp, Artificial Sequence
  derived and/or modified sequence
atgaactttgaaggcctggaccctgggctggcagaatatgcccctgccatgcactccgccctggatccagtgctcgacgctcatctgaacccgtccctgttgcagaacgtggaattagaccctgagggagttgcactggaggcactccctgtgcaggaatcggtgcacattatggaaggggtctattccgagttgcattcggttgttgcagaagtgggagtaccggtctccgtgtcacacttcgacctgcacgaagagatgttatgggtggggagtcatggcggacatgccaccagcttttttggccctgccctggaaaggtattctagctttcaggtgaatggaagtgacgacattaggcagatccagagcctggagaatgggattctctttctgactaagaataacttgaagtacatggcccgagggggattgattatattcgattatctgctggacgagaacgaggatatgcattcgttattgctcaccgattcctcaacactcctggtgggcggcttgcagaaccatataattgagatcgatctgaatacagttcaggaaacacagaagtatgcagtggagaccccaggagtgactataatgaggcagacaaatagattctttttttgcggccatacttctgggaaggtgtccctaagggacttgcgaaccttcaaagtggaacacgaattcgatgcgtttagcggcagtctgtctgacttcgacgtgcacgggaaccttctcgctgcctgcgggtttagcagtcgactcactggcttggcatgtgaccggtttctgaaggtttatgacttgcggatgatgcgagctatcacccccctccaggtgcatgtcgatcccgcatttttgagattcattccaacatatacgagtcgccttgccataatcagccagtcgggccagtgccagttttgtgagcctactggtcttgctaaccctgccgacattttccatgttaaccctgtgggccccctcttgatgacctttgatgtgtcagccagtaagcaggcacttgccttcggtgacagtgaaggatgcgtgcatctttggacagacagtccagagccctcgtttaatccatactctagggaaaccgaattcgcactgccgtgccttgtggatagcctgccacccctcgactggagccaggatctgctcccactgagccttattccagtacccctcacaaccgacacactgctctccgactggcctgccgccaacagtgccccggcgccccgaagagctccaccggtggatgcagagattcttagaacgatgaagaaggtcggttttatcggatatgcccctaaccctaggacaagactcaggaatcagatcccgtaccgtctgaaggagtccgactcagagttcgactctttttcccaagtgaccgagtcacccgtcgggcgcgaagaagagccacacctgcacatggtgagcaagaagtatcgtaaggttacaatcaagtattccaaattgggcctggaagatttcgatttcaaacactacaacaaaacactatttgctgggcttgagcctcatatacccaacgcgtactgtaactgcatgatccaggtcctctatttcctggaacctgtccggtgtctgattcaaaaccacctctgccagaaggaattttgtctggcttgtgagctggggtttctgtttcatatgcttgatctcagtcggggggacccatgccagggcaacaactttcttcgagccttccgcactatcccggaggcatcagcactgggcctgatcctggctgattcagacgaggcttccgggaagggcaacctggcccgcctaattcaacgctggaaccgcttcatcctgacacaattacaccaagacatgcaggagttagagatccctcaggcgtacaggggagccggcggctcaagcttctgcagtagcggtgacagcgtgattggacagctctttagttgtgagatggagaactgctctctgtgtcgctgcggctctgaaaccgttcgggcgtctagtaccttactcttcacactgagttatcccgatgataagaccgggaaaaattacgattttgcccaggtacttaaaaggagtatctgtctggaccagaacacccaagcctggtgcgacacatgtgagaaatatcagccaaccatccagacgagaaacattagacatcttcctgatatactggtgatcaactgcgaagttaactcctctaaggaagcggatttctggcgcatgcaagcggaagtggcctttaagatggcggtgaagaaacatggcggcgaaatttccaaaaataaggagttcgcactcgcagactggaaggagctgggctctcccgagggagtgctcgtgtgcccatcaatcgaagaattaaagaatgtttggctcccctttagtatccgcatgaagatgaccaagaataagggtcttgatgtttgtaactggacagacggcgacgaaatgcagtgggggcctgcccgagccgaagaagaacacggcgtgtatgtatatgatttgatggcaactgtggtgcacatcttagactctcgcaccggcggtagtcttgtcgcacacattaaagtcggtgaaacctatcaccaacgcaaggaaggcgtgacgcatcagcagtggtatctgtttaacgattttctgatagagccaatcgacaaacatgaagctgttcagttcgacatgaactggaaggtgcccgccattctctattacgttaaaaggaacctgaattcccgatacaaccttaacattaaaaaccctatagaagcgagtgtactgcttgccgaagcgagcctggccagaaagcagcgtaagacacacacgacctttatccctttgatgctgaatgagatgcctcagataggggatcttgtgggacttgatgccgagttcgtcacactgaacgaagaggaggctgagctgagaagtgacggaacgaagtctaccataaagccttcacagatgagtgtcgctcggataacctgtgtccgcggacagggaccaaatgagggtatcccattcattgatgactacatttctacacaggagcaggttgttgattatcttacacagtattctggtatcaagcccggcgacctagacgccaaaatctcatccaaacacttgaccacgctgaaaagcacttacctgaaacttcgattcttgatagatatcggagtgaagtttgttggccatggactccagaaagacttccgcgtcattaacctgatggtgcctaaagaccaggtcctggatactgtctatttgttccatatgccccgcaagcgcatgatatcactacgcttcttggcatggtattttctcgatctgaaaattcagggggaaactcatgacagcattgaagatgcgaggacagcattgcagctatatcggaagtaccttgaactgtccaagaatgggaccgagccggaatcttttcataaggtacttaaaggcctgtatgagaagggtcggaagatggactggaaggtgcctgagccggagggccagaccagccccaagaacgctgcggttttctcctctgtgttggcgctctag

SEQ ID NO: 182770 - DNA, 3597 bp, Artificial Sequence
  derived and/or modified sequence
atgaactttgagggcctggaccccggcctggccgagtatgccccagccatgcacagcgccctggaccctgtgctggatgcccacctgaaccccagcctgctgcagaatgtggagctggaccctgagggcgtggccctggaggccctgcctgtgcaggagagcgtgcacatcatggagggcgtgtacagcgagctgcacagcgtggtggccgaggtgggcgtgcctgtgtctgtgagccactttgacctgcacgaggagatgctgtgggtgggcagccatggaggccacgccaccagcttctttggacctgccctggagcgctacagcagcttccaggtgaatggaagtgatgacatccggcagatccagagcctggagaatggcatcctcttcctgaccaagaacaacctgaagtacatggcccggggcggcctcatcatctttgactacctgctggatgaaaatgaagacatgcacagcctgctgctgacagacagcagcaccctgctggtgggcggcctgcagaaccacatcattgaaattgacctgaacacagtgcaggagacccagaagtatgctgtggagaccccaggagtgaccatcatgaggcagaccaaccgcttcttcttctgtggccacaccagcggcaaggtgtccctgcgggacctgcggaccttcaaggtggagcacgagtttgatgccttcagcggcagcctgagtgactttgatgtgcacggcaacctgctggccgcctgtggcttcagcagccggctgaccggcctggcctgtgaccgcttcctgaaggtgtatgacctgaggatgatgagggccatcacccccctgcaggtgcacgtggaccctgccttcctgcgcttcatccccacctacaccagccggctggccatcatcagccagagcggccagtgccagttctgtgagcccaccggcctggccaacccagctgacatcttccacgtgaaccctgtgggccccctgctgatgacctttgatgtgtctgccagcaagcaggccctggcctttggagacagcgagggctgtgtgcacctgtggacagacagccctgagcccagcttcaacccctacagccgggagacagaatttgccctgccctgcctggtggacagcctgccccccctggactggagccaggacctgctgcccctgagcctcatccctgtgcccctgaccacagacaccctgctgagtgactggccagctgccaacagcgccccagccccccggcgggcccctcctgtggatgctgagatcctgcggaccatgaagaaggtgggcttcatcggctacgcccccaaccccaggacccggctgaggaaccagatcccctaccgcctgaaggagagtgacagcgagtttgacagcttcagccaggtgacagagagccctgtgggccgggaggaggagccccacctgcacatggtgtccaagaagtacaggaaggtgaccatcaagtacagcaagctgggcctggaggactttgacttcaagcactacaacaagaccctgtttgctggcctggagccccacatccccaatgcctactgcaactgcatgatccaggtgctgtacttcctggagcctgtgcgctgcctgatccagaaccacctgtgccagaaggagttctgcctggcctgtgagctgggcttcctgttccacatgctggacctgagcagaggagacccctgccagggcaacaacttcctgcgggccttccgcaccatccctgaggccagcgccctgggcctcatcctggccgacagtgatgaggccagcggcaagggcaacctggcccggctcatccagcgctggaaccgcttcatcctgacccagctgcaccaggacatgcaggagctggagatcccccaggcctacagaggagctgggggcagcagcttctgcagcagcggggacagcgtgattggccagctgttcagctgtgagatggagaactgcagcctgtgccgctgtggcagcgagaccgtgcgggccagcagcaccctgctcttcaccctgagctacccagatgacaagacaggcaagaactatgactttgcccaggtgctgaagaggagcatctgcctggaccagaacacccaggcctggtgtgacacctgtgagaagtaccagcccaccatccagaccaggaacatccgccacctgcctgacatcctggtgatcaactgtgaggtgaacagcagcaaggaggccgacttctggaggatgcaggccgaggtggccttcaagatggctgtgaagaagcatggaggagagatcagcaagaacaaggagtttgccctggccgactggaaggagctgggcagccctgagggcgtgctggtgtgccccagcattgaggagctgaagaatgtgtggctgcccttcagcatccgcatgaagatgaccaagaacaagggcctggatgtgtgcaactggacagatggagatgagatgcagtggggccctgcccgggcagaggaggagcacggcgtgtatgtgtatgacctgatggccaccgtggtgcacatcctggacagcaggactggaggcagcctggtggcccacatcaaggtgggggagacctaccaccagaggaaggagggcgtgacccaccagcagtggtacctgttcaatgacttcctgattgagcccatcgacaagcatgaggccgtgcagtttgacatgaactggaaggtgcctgccatcctgtactacgtgaagaggaacctgaacagccgctacaacctgaacatcaagaaccccatcgaggcctctgtgctgctggccgaggccagcctggccaggaagcagaggaagacccacaccaccttcatccccctgatgctgaatgagatgccccagattggagacctggtgggcctggatgctgagtttgtgaccctgaatgaggaggaggccgagctgcggagtgatggcaccaagagcaccatcaagcccagccagatgtctgtggcccgcatcacctgtgtgcggggccagggccccaatgaaggcatccccttcattgatgactacatcagcacccaggagcaggtggtggactacctgacccagtacagcggcatcaagccaggggacctggatgccaagatcagcagcaagcacctgaccaccctgaagagcacctacctgaagctgcgcttcctgattgatattggagtgaagtttgtgggccacggcctgcagaaggacttccgggtcatcaacctgatggtgcccaaggaccaggtgctggacacagtgtacctgttccacatgcccaggaagaggatgatcagcctgcgcttcctggcctggtacttcctggacctgaagatccagggcgagacccatgacagcattgaagatgccaggacagccctgcagctgtacaggaagtacctggagctgagcaagaatggaacagagcctgagagcttccacaaggtgctgaagggcctgtatgaaaaaggaaggaagatggactggaaggtgcctgagcctgagggccagaccagccccaagaatgctgctgtgttcagctctgtgctggccctgtag

SEQ ID NO: 182771 - DNA, 3597 bp, Artificial Sequence
  derived and/or modified sequence
atgaacttcgagggcctggaccccggcctggccgagtacgcccccgccatgcattccgctttagaccctgtactcgatgcccatctgaatccctctctcttacagaatgtggaattggaccccgaaggtgtagctctggaggctctcccagtgcaggagtctgttcacattatggaaggagtttactccgagttacactcagtcgtggcggaggtgggggtgcctgtttccgtaagtcacttcgacctgcacgaagagatgctatgggtgggtagccatgggggccacgccacatctttctttggtccagctctagaacggtactcgtcgtttcaggtcaacggaagtgacgacatccggcagatacagtccctagaaaacggcatcctgttcttgactaaaaataacctgaagtacatggctcggggcggtctgatcatctttgactatctcttggatgagaacgaagacatgcattcattgctgctgaccgacagtagtacacttcttgtgggagggctacagaatcacatcattgagattgatctgaacactgtccaggagacacagaagtatgcggtagaaacgcccggggtaaccattatgcggcagacaaataggttctttttctgtggccacacttcaggcaaggtgtccctgagggacttacgaacgtttaaagtcgaacatgaatttgatgctttcagcggctcgctgtccgatttcgatgtgcatggaaatctcttagccgcgtgtggttttagttcacggctaaccggtctggcctgcgataggtttctgaaggtctacgatcttcgtatgatgcgcgccataacgcccctgcaagttcacgtggatcctgcctttctccgctttattccgacatacacgtctcgactggctattatctcacagtccgggcagtgccaattctgtgaaccaactggcctggcgaatcccgccgatatcttccatgtcaatccagtaggcccactgctgatgacttttgacgtgagcgcctccaagcaggctctcgctttcggagattccgagggctgcgtgcatctctggaccgacagccctgagccatcatttaatccctatagccgcgagaccgagttcgcccttccctgtttagtggactctttgccgccactggattggagccaggatctactcccgctgtcactgatccccgtgcccctgaccacagacacgttactgtccgactggcctgccgcaaatagtgctcctgcacctagaagagcacctcccgtggacgccgagatcctgaggacaatgaagaaggtgggcttcatcggctacgcacccaatccgcgcacacgactgcggaaccagataccatacagactgaaagaatccgactccgaattcgactcattctcccaagtgaccgaatcccccgtcggcagagaggaggagccacacctgcacatggtgtccaagaaatatagaaaggtaacaatcaagtattctaagctgggcctggaagatttcgatttcaagcactacaataagacattatttgcaggcctggaaccccatatcccaaacgcctactgcaattgtatgatacaagtcctgtattttctcgaacctgtgagatgcctcatacaaaatcatttgtgccagaaggagttttgcctggcttgcgaactcggcttcctctttcatatgcttgacctgagcagaggcgacccctgtcagggaaacaacttcctgcgcgcctttagaactatacccgaagcaagtgcactgggtctgattcttgctgactccgatgaggcatccgggaaaggcaatctggcgagactaattcagaggtggaaccgctttattttgacacagttgcaccaagatatgcaagaacttgaaattccccaggcctaccgcggagctgggggatcttctttctgcagctctggcgactcagttattggacagctgttctcctgcgagatggagaactgcagtctgtgtaggtgtgggagtgaaacggtgcgagcctcttcaaccctgctgttcactctgtcttatcccgacgataaaacgggcaagaattatgacttcgctcaggttctgaaacgaagcatttgcctcgatcagaacacacaggcttggtgtgacacatgtgaaaagtaccagcccacaatccagacccggaatattagacacctccctgatattctcgtcattaattgcgaggtaaattcatccaaagaggcagacttttggaggatgcaggctgaggtcgcctttaagatggctgtgaaaaaacacgggggcgagatctcaaagaacaaagagttcgccctggcagattggaaggagttgggatctccagagggggtactggtgtgccccagcatcgaagagctcaagaacgtctggttacctttctctattcggatgaagatgacaaagaacaaaggtcttgatgtttgcaattggaccgacggggacgagatgcaatgggggcctgctcgggcagaggaggagcatggcgtttacgtgtatgatctgatggcaactgtagtccacatattggacagtcggactggcgggtcacttgtcgcacatatcaaagttggtgagacctaccaccagcggaaggaaggagtgacccaccagcagtggtacctatttaacgattttctgattgaacccattgacaaacacgaagctgtccagtttgacatgaactggaaggtacccgccattctctattatgtgaagcgtaacctcaacagcaggtataacctgaatatcaagaaccccatcgaggcttccgtcttactggccgaggccagcctggctcgtaaacagcgcaagacacacactacattcattccactgatgctcaacgaaatgccccagataggcgatctggtggggctggacgccgaatttgttacactcaacgaagaagaggctgaactgaggtcggacggcacaaagtccactatcaagccaagccagatgagcgtagctaggataacctgcgtgcgggggcagggcccaaacgaaggcatcccattcatagacgattatatctccacacaggagcaggttgtcgactatcttacccagtatagcggcattaaaccgggagatctggatgccaagatcagctccaaacatttgacaactctcaaatcaacttacctgaagctgcgcttcctcatcgatatcggcgtcaagtttgtaggacacggactacaaaaggactttagggtcattaatctgatggtaccaaaggaccaggtccttgacactgtgtacctgtttcacatgccgagaaagaggatgattagcctccgatttcttgcttggtacttcctcgatctgaagattcagggcgagacgcacgacagcatcgaggacgctaggactgcactacagctctacaggaaatacctcgagctgagcaaaaatggcactgagcctgagagttttcacaaagtcctgaagggattgtatgaaaaaggtcggaagatggactggaaggtgcccgaacctgagggacagacttcacctaaaaacgccgctgtgttttctagcgtgctggccctgtag

SEQ ID NO: 182772 - DNA, 4576 bp, Artificial Sequence
  derived and/or modified sequence
atgccccgagcccttcttgattggaagaagcgcctcggaccccggtccttggcgccgtagtggttaggttgagccctaggcgtgggggagaactggggaaactggaatttcccgcggagctgacagcgcttgcgctccccctactcgttctaattccacgcgctccaaaatatccgccatggagaaatcttggccaggatgtccattctaggcccatcggtgctgtcttgctgaaggttgggtcaggcatctaaagggactgtggtaagggagggtgtgacacaggtgtaagctgccatcgtcatcatgaactttgagggtctggaccctggactggcagaatatgccccagccatgcattctgccctggaccctgtcttggatgcccacctgaacccaagtctgctacagaatgtggagctggacccagagggagtggccttggaggctcttcccgtccaggaatcagtgcacataatggaaggtgtctactctgaattgcacagcgtggtggctgaagtgggtgtacctgtttccgtctcccactttgacttgcacgaggagatgctgtgggtggggagccacgggggccatgccacttcattttttggcccagccttggagcgctactcatcctttcaagtcaatggcagtgatgatattcggcagatccagagcctggagaatggtatcctttttctcaccaagaacaacctcaagtatatggcccgtgggggcctcattatatttgattacctgctggatgagaatgaggatatgcacagtctcctactgactgacagcagcactctactcgttggtgggctgcagaatcacataatagagattgatcttaacactgtccaggagactcagaagtatgcagtagagacgcctggagtcaccatcatgagacagacaaatcgcttcttcttctgcggccacacgtctggcaaggtttccctgagagacctccgtacttttaaggtggaacatgagtttgatgccttctcaggaagtctgtcagactttgatgtgcatggcaacctgctagctgcctgtggcttctccagccgcctcactggcctggcctgcgaccgtttcctcaaggtgtatgatttgcgcatgatgcgtgccatcacaccacttcaagtacatgtggatcctgccttcttgcgcttcattcctacatatacttctcgtcttgctatcatctctcagtcagggcagtgccaattctgtgaacccacaggcctggccaacccagccgatatctttcatgtgaatcctgtggggcctctgctaatgacatttgatgtgtcagccagcaagcaggctctggcctttggggattctgagggctgtgtgcacctctggactgattccccggagccttccttcaacccctactcccgtgagactgagtttgctttgccgtgtctcgtggactcactgcctcctctggactggagccaggacctgctgcctctttccctcatccctgtcccactcaccactgacacacttctctctgattggcctgctgccaactctgctccagctcccaggcgagcaccacccgtggatgcagagattctgcgcaccatgaagaaggtgggcttcattggctatgcgcccaatccccgcaccaggctgcgcaatcagataccctacagactcaaggagtcagacagtgaatttgacagcttcagccaggtcactgagtcaccagtaggacgagaagaggaaccacatctccacatggtttctaagaaataccgcaaggtgaccatcaaatattccaagctagggctggaggactttgacttcaaacactacaataagaccttgtttgctggattagagccccacattcccaacgcctactgtaactgcatgatccaggtgctctatttcctggagcctgtacgctgtctaattcaaaaccacctttgccagaaggagttctgtctggcatgtgagctgggcttcctgtttcacatgttggacctctctcgtggtgacccttgccagggcaataattttcttcgggcattccgtactattcctgaggcctcagccctcggtctaatcctggctgactcagatgaggcctcaggcaagggcaatctggccaggctcattcagaggtggaatcgcttcattctcactcaactgcatcaagatatgcaggagctggaaataccacaggcttatcgaggtgctggaggcagcagcttttgctcatcgggggactctgttattgggcagctcttcagctgtgagatggagaactgcagcctctgccgctgtggcagtgagaccgtgcgagcctcatccactctgcttttcacactctcctaccctgatgataaaactgggaagaactatgactttgctcaggtgctgaagcgaagcatctgcctggaccagaatacacaggcctggtgtgacacctgtgaaaagtaccagcccacgattcagacccgcaacatccgccatctgccagatattcttgtcatcaattgtgaggtgaacagctcaaaagaggctgatttctggagaatgcaggctgaggttgccttcaagatggcagtaaagaaacacggtggggaaatctccaagaacaaggaatttgctttggctgattggaaggaactagggagtccagagggtgtgctggtgtgtccctccattgaggagttgaagaacgtctggcttcctttctccattcgcatgaagatgaccaaaaacaaagggctggatgtttgcaattggactgatggggatgagatgcagtggggcccagccagggcagaggaggagcatggtgtctatgtgtatgacctgatggctactgtggtacacatcctggactcacgcacagggggcagcctggtggctcacatcaaagttggagagacctaccaccagcgcaaggagggcgttactcaccagcagtggtatctgttcaatgactttcttattgaacctattgataagcatgaagctgtgcagtttgacatgaattggaaagtacctgcaatcctttattatgtcaaacggaatctcaattccagatacaacctgaacatcaagaaccctattgaggcaagtgtcttgctggctgaagcctcgctggcacggaagcagcggaaaacacatactacctttattccactgatgctgaatgagatgccacagattggggacctggtgggtctggatgctgagtttgtcacccttaatgaggaggaagcagagttacgcagtgatggtaccaagtctaccattaaaccaagccagatgtcagtagccaggattacctgtgttcggggccagggacccaatgagggtatccccttcattgatgactacatctctacccaggagcaggtggtggattacttgactcaatactcgggtataaagcctggtgacctcgatgccaaaatttcctccaagcacctaacaactctcaagtctacctacttaaagcttcgttttctcattgacattggagtcaagtttgtgggtcatggcctgcagaaggacttccgggtcatcaacctgatggtgcccaaggaccaagtccttgacactgtctacctgttccatatgccccgaaaacgaatgatttccctgcgattccttgcttggtactttctggacctgaagattcaaggggaaacccatgacagtattgaggatgcccgcacagcccttcagctgtaccgaaagtatctggagctaagcaaaaatggcactgagcctgagtctttccacaaggtgctcaagggtctttatgagaagggcagaaagatggactggaaggtgcctgagcctgagggccaaacaagtcccaagaatgcagctgtcttctcctcagtgctggcgctctgactacccttcccaaagaaccacggccctctccctttactgttctatagccccagaactgggagatggcttcctaagttggctataccttgtccacttccagtactggacgtgctcagggtctagggtcacagatggtgctattaattgaactggaacacagcagaattgttgcaaaggttctaggagccagattcattccttcttcattctttgcaaaacagtggtacagacatggagtctagaattgacccagatggaaagtaattggtattcttaatatcctgggtgactaatatccaggcagagaagctcctggaaccataactgtaagttcctagctggctagggattgaagtcctggacagtgacagaggataccacagtagttcaagacttagcacaagtcaccaactgcttcagggatacctggaggggccagcaagtagagtgttggtggcccaagcaaaccagtgttgccaataccattgccaaaagggcctttggatcctggacaaagcttggctgccggcttcatttattcctgctgatggctgagaagcatctgtcttccatcccacttgcctgtcccaagttttgttccattttttaaaaatttgttgtaaactgcatgttttataaaataaaaataaaatatcgtttgttatttatctca

SEQ ID NO: 182773 - DNA, 3597 bp, Artificial Sequence
  derived and/or modified sequence
atgaattttgaaggtctggaccctggactggcggaatatgcacctgcaatgcatagcgcgctggaccctgttctggatgcgcacctgaatccgtcattgctccagaatgtggagctcgatcctgagggagttgccctcgaggcactgccagtgcaggaatccgtgcacatcatggagggcgtgtatagcgaactgcacagtgtggtggcggaagtaggggtccctgtctccgtgagccacttcgacctgcacgaagaaatgctatgggtaggcagtcacgggggtcatgccacaagtttcttcggccctgccctggaacgctattccagctttcaggtgaatgggtcagacgatatccgccaaatccagtcccttgaaaatggcatactgtttctgaccaagaacaatctaaagtacatggccaggggagggcttatcatatttgattacctgcttgatgagaacgaggatatgcattctttactcctgactgacagttccaccctattggtggggggattacagaatcacataatcgagattgacctgaacacagtccaagaaactcaaaagtacgcagtggaaacacctggggtgactataatgcggcagactaaccgcttctttttctgtggacacactagcggcaaagtatccctgcgagacctcagaactttcaaagtagaacacgaatttgatgcgttttctgggagtctgtctgatttcgacgtgcacggtaatctattagcagcctgtggtttctcctcacgactgaccggcctcgcttgcgatcgtttcttgaaggtgtacgatctgcgtatgatgcgtgcaatcacgcccctgcaggttcacgtggatccagcctttctgcggttcatcccaacatataccagccggctggctattatctcccagtctgggcaatgccagttctgcgaacccacaggccttgccaatcctgccgatatctttcatgttaacccagtgggccctctgctcatgaccttcgatgtgagtgcaagtaaacaggctttggccttcggagactccgaaggatgcgtgcacctgtggactgattctccagagccatcatttaatccttactcgcgcgaaaccgagttcgcgctaccgtgtctggtcgacagtctgccacctctagattggtcccaggatctgctccccctttccctgattcctgttcccctgactactgacaccttgcttagcgattggcccgcagctaattctgcaccagcgcctcgcagagccccaccagtcgatgcggagatcttaaggacaatgaaaaaggtaggattcattggttacgctccaaaccctaggacaagactgaggaatcagattccctatcgcctgaaggagagcgatagcgagtttgactcttttagccaggtaacagaaagtccagtgggtcgggaagaagagcctcatctccacatggtgtctaagaaatacagaaaagttaccataaagtactctaagctcggtttggaggacttcgattttaaacactataataaaaccctatttgccggtctggagcctcacatccccaacgcttattgtaactgtatgatacaggtgctttactttttggagcccgtgcgttgcttgatccagaaccatctctgccaaaaagaattttgcctggcttgtgaactcggtttcctgtttcacatgctcgatctgtcaagaggggacccttgtcaaggaaacaattttctgcgcgctttccgcaccataccagaggcatcagctctgggcctgatattggcagactcggacgaggctagtggtaaagggaatctggccagactcattcagcgctggaaccggttcatactgacccagctccaccaggacatgcaggaacttgaaattccgcaagcataccggggagctggaggctcctctttttgctccagcggggacagtgtgatcgggcagttgttcagttgtgaaatggagaattgttcattgtgtcggtgcggaagcgaaacggtgagagcatcttcaacgctgttgttcacattatcctacccagacgacaaaacaggtaaaaattacgacttcgcgcaggtacttaagcggagcatatgtttagaccagaatactcaggcctggtgcgacacatgcgaaaaataccaaccaaccatccaaactcggaacatcagacatcttccagatatcctggttatcaactgtgaggtgaacagttcaaaggaggctgacttttggaggatgcaggctgaggtggcgttcaagatggcagttaagaagcatggaggagagatttctaaaaacaaggagttcgcgttggcagattggaaagaacttggctcgccggagggagtgctcgtctgcccatctatcgaggagctcaaaaatgtatggctgccctttagtattaggatgaaaatgaccaagaacaaaggtctcgatgtctgcaattggactgacggcgacgaaatgcagtggggccctgcacgggctgaagaagaacatggagtgtatgtctacgatctcatggccacggtggtgcacatactagattcacgcacgggcggatctttggtggcacacattaaggtgggggagacctatcaccagaggaaggaaggagttacccaccagcaatggtacctgttcaacgactttctgattgaacccatcgacaaacatgaggcagtgcagtttgacatgaactggaaagttccggctatcttatactacgtgaagagaaatctgaatagccgttacaacttgaatattaagaacccaattgaagccagcgtgttgctggctgaggcttcgctggccagaaagcagcgtaaaacacacaccaccttcataccattgatgctcaatgagatgccacagatcggcgatctggtgggcctggatgcggaatttgtgaccctgaatgaggaagaggctgagctgagaagcgatggaactaaatccactattaagccaagtcaaatgtcagttgcacggatcacttgtgtgaggggacagggacctaatgaggggatacccttcatcgatgattacatatcgactcaggaacaagtggttgactacctgacacagtacagtggaatcaagcccggagacctcgatgccaagatcagctcaaagcacctcacaactctcaaaagtacttaccttaagctgcgctttctaatcgatattggcgttaagttcgtcggccacgggctgcaaaaagatttcagagtgattaacctgatggtgccgaaagaccaggtgctcgatactgtttacctattccatatgccccgaaagcgcatgatctctcttcggtttttagcgtggtacttcttggatttaaaaatacagggagagacgcatgatagtatcgaggacgccagaaccgctttacagctctaccgcaagtatctagaactttcaaaaaatggcacagagcccgagtcgtttcacaaagtcctcaagggactctatgaaaaaggcagaaagatggattggaaggtgccagaaccagaaggccaaacgtcacccaaaaacgccgctgtattctcatcggtgctcgccttgtag

SEQ ID NO: 182774 - DNA, 3597 bp, Artificial Sequence
  derived and/or modified sequence
atgaacttcgagggcctggaccccggcctggccgagtacgcccccgccatgcacagcgccctggaccccgtgctggacgcccacctgaaccccagcctgctgcagaacgtggagctggaccccgagggcgtggccctggaggccctgcccgtgcaggagagcgtgcacatcatggagggcgtgtacagcgagctgcacagcgtggtggccgaggtgggcgtgcccgtgagcgtgagccacttcgacctgcacgaggagatgctgtgggtgggcagccacggcggccacgccaccagcttcttcggccccgccctggagagatacagcagcttccaggtgaacggcagcgacgacatcagacagatccagagcctggagaacggcatcctgttcctgaccaagaacaacctgaagtacatggccagaggcggcctgatcatcttcgactacctgctggacgagaacgaggacatgcacagcctgctgctgaccgacagcagcaccctgctggtgggcggcctgcagaaccacatcatcgagatcgacctgaacaccgtgcaggagacccagaagtacgccgtggagacccccggcgtgaccatcatgagacagaccaacagattcttcttctgcggccacaccagcggcaaggtgagcctgagagacctgagaaccttcaaggtggagcacgagttcgacgccttcagcggcagcctgagcgacttcgacgtgcacggcaacctgctggccgcctgcggcttcagcagcagactgaccggcctggcctgcgacagattcctgaaggtgtacgacctgagaatgatgagagccatcacccccctgcaggtgcacgtggaccccgccttcctgagattcatccccacctacaccagcagactggccatcatcagccagagcggccagtgccagttctgcgagcccaccggcctggccaaccccgccgacatcttccacgtgaaccccgtgggccccctgctgatgaccttcgacgtgagcgccagcaagcaggccctggccttcggcgacagcgagggctgcgtgcacctgtggaccgacagccccgagcccagcttcaacccctacagcagagagaccgagttcgccctgccctgcctggtggacagcctgccccccctggactggagccaggacctgctgcccctgagcctgatccccgtgcccctgaccaccgacaccctgctgagcgactggcccgccgccaacagcgcccccgcccccagaagagccccccccgtggacgccgagatcctgagaaccatgaagaaggtgggcttcatcggctacgcccccaaccccagaaccagactgagaaaccagatcccctacagactgaaggagagcgacagcgagttcgacagcttcagccaggtgaccgagagccccgtgggcagagaggaggagccccacctgcacatggtgagcaagaagtacagaaaggtgaccatcaagtacagcaagctgggcctggaggacttcgacttcaagcactacaacaagaccctgttcgccggcctggagccccacatccccaacgcctactgcaactgcatgatccaggtgctgtacttcctggagcccgtgagatgcctgatccagaaccacctgtgccagaaggagttctgcctggcctgcgagctgggcttcctgttccacatgctggacctgagcagaggcgacccctgccagggcaacaacttcctgagagccttcagaaccatccccgaggccagcgccctgggcctgatcctggccgacagcgacgaggccagcggcaagggcaacctggccagactgatccagagatggaacagattcatcctgacccagctgcaccaggacatgcaggagctggagatcccccaggcctacagaggcgccggcggcagcagcttctgcagcagcggcgacagcgtgatcggccagctgttcagctgcgagatggagaactgcagcctgtgcagatgcggcagcgagaccgtgagagccagcagcaccctgctgttcaccctgagctaccccgacgacaagaccggcaagaactacgacttcgcccaggtgctgaagagaagcatctgcctggaccagaacacccaggcctggtgcgacacctgcgagaagtaccagcccaccatccagaccagaaacatcagacacctgcccgacatcctggtgatcaactgcgaggtgaacagcagcaaggaggccgacttctggagaatgcaggccgaggtggccttcaagatggccgtgaagaagcacggcggcgagatcagcaagaacaaggagttcgccctggccgactggaaggagctgggcagccccgagggcgtgctggtgtgccccagcatcgaggagctgaagaacgtgtggctgcccttcagcatcagaatgaagatgaccaagaacaagggcctggacgtgtgcaactggaccgacggcgacgagatgcagtggggccccgccagagccgaggaggagcacggcgtgtacgtgtacgacctgatggccaccgtggtgcacatcctggacagcagaaccggcggcagcctggtggcccacatcaaggtgggcgagacctaccaccagagaaaggagggcgtgacccaccagcagtggtacctgttcaacgacttcctgatcgagcccatcgacaagcacgaggccgtgcagttcgacatgaactggaaggtgcccgccatcctgtactacgtgaagagaaacctgaacagcagatacaacctgaacatcaagaaccccatcgaggccagcgtgctgctggccgaggccagcctggccagaaagcagagaaagacccacaccaccttcatccccctgatgctgaacgagatgccccagatcggcgacctggtgggcctggacgccgagttcgtgaccctgaacgaggaggaggccgagctgagaagcgacggcaccaagagcaccatcaagcccagccagatgagcgtggccagaatcacctgcgtgagaggccagggccccaacgagggcatccccttcatcgacgactacatcagcacccaggagcaggtggtggactacctgacccagtacagcggcatcaagcccggcgacctggacgccaagatcagcagcaagcacctgaccaccctgaagagcacctacctgaagctgagattcctgatcgacatcggcgtgaagttcgtgggccacggcctgcagaaggacttcagagtgatcaacctgatggtgcccaaggaccaggtgctggacaccgtgtacctgttccacatgcccagaaagagaatgatcagcctgagattcctggcctggtacttcctggacctgaagatccagggcgagacccacgacagcatcgaggacgccagaaccgccctgcagctgtacagaaagtacctggagctgagcaagaacggcaccgagcccgagagcttccacaaggtgctgaagggcctgtacgagaagggcagaaagatggactggaaggtgcccgagcccgagggccagaccagccccaagaacgccgccgtgttcagcagcgtgctggccctgtag

SEQ ID NO: 182775 - protein, 677 aa, Artificial Sequence
  derived and/or modified sequence
MDFPGHFEQIFQQLNYQRLHGQLCDCVIVVGNRHFKAHRSVLAACSTHFRALFSVAEGDQTMNMIQLDSEVVTAEAFAALIDMMYTSTLMLGESNVMDVLLAASHLHLNSVVKACKHYLTTRTLPMSPPSERVQEQSARMQRSFMLQQLGLSIVSSALNSSQNGEEQPAPMSSSMRSNLDQRTPFPMRRLHKRKQSAEERARQRLRPSIDESAISDVTPENGPSGVHSREEFFSPDSLKIVDNPKADGMTDNQEDSAIMFDQSFGTQEDAQVPSQSDNSAGNMAQLSMASRATQVETSFDQEAAPEKSSFQCENPEVGLGEKEHMRVVVKSEPLSSPEPQDEVSDVTSQAEGSESVEVEGVVVSAEKIDLSPESSDRSFSDPQSSTDRVGDIHILEVTNNLEHKSTFSISNFLNKSRGNNFTANQNNDDNIPNTTSDCRLESEAPYLLSPEAGPAGGPSSAPGSHVENPFSEPADSHFVRPMQEVMGLPCVQTSGYQGGEQFGMDFSRSGLGLHSSFSRVMIGSPRGGASNFPYYRRIAPKMPVVTSVRSSQIPENSTSSQLMMNGATSSFENGHPSQPGPPQLTRASADVLSKCKKALSEHNVLVVEGARKYACKICCKTFLTLTDCKKHIRVHTGEKPYACLKCGKRFSQSSHLYKHSKTTCLRWQSSNLPSTLL

SEQ ID NO: 182776 - DNA, 2034 bp, Artificial Sequence
  derived and/or modified sequence
atggacttccccggccacttcgagcagatcttccagcagctgaactaccagagactgcacggccagctgtgcgactgcgtgatcgtggtgggcaacagacacttcaaggcccacagaagcgtgctggccgcctgcagcacccacttcagagccctgttcagcgtggccgagggcgaccagaccatgaacatgatccagctggacagcgaggtggtgaccgccgaggccttcgccgccctgatcgacatgatgtacaccagcaccctgatgctgggcgagagcaacgtgatggacgtgctgctggccgccagccacctgcacctgaacagcgtggtgaaggcctgcaagcactacctgaccaccagaaccctgcccatgagcccccccagcgagagagtgcaggagcagagcgccagaatgcagagaagcttcatgctgcagcagctgggcctgagcatcgtgagcagcgccctgaacagcagccagaacggcgaggagcagcccgcccccatgagcagcagcatgagaagcaacctggaccagagaacccccttccccatgagaagactgcacaagagaaagcagagcgccgaggagagagccagacagagactgagacccagcatcgacgagagcgccatcagcgacgtgacccccgagaacggccccagcggcgtgcacagcagagaggagttcttcagccccgacagcctgaagatcgtggacaaccccaaggccgacggcatgaccgacaaccaggaggacagcgccatcatgttcgaccagagcttcggcacccaggaggacgcccaggtgcccagccagagcgacaacagcgccggcaacatggcccagctgagcatggccagcagagccacccaggtggagaccagcttcgaccaggaggccgcccccgagaagagcagcttccagtgcgagaaccccgaggtgggcctgggcgagaaggagcacatgagagtggtggtgaagagcgagcccctgagcagccccgagccccaggacgaggtgagcgacgtgaccagccaggccgagggcagcgagagcgtggaggtggagggcgtggtggtgagcgccgagaagatcgacctgagccccgagagcagcgacagaagcttcagcgacccccagagcagcaccgacagagtgggcgacatccacatcctggaggtgaccaacaacctggagcacaagagcaccttcagcatcagcaacttcctgaacaagagcagaggcaacaacttcaccgccaaccagaacaacgacgacaacatccccaacaccaccagcgactgcagactggagagcgaggccccctacctgctgagccccgaggccggccccgccggcggccccagcagcgcccccggcagccacgtggagaaccccttcagcgagcccgccgacagccacttcgtgagacccatgcaggaggtgatgggcctgccctgcgtgcagaccagcggctaccagggcggcgagcagttcggcatggacttcagcagaagcggcctgggcctgcacagcagcttcagcagagtgatgatcggcagccccagaggcggcgccagcaacttcccctactacagaagaatcgcccccaagatgcccgtggtgaccagcgtgagaagcagccagatccccgagaacagcaccagcagccagctgatgatgaacggcgccaccagcagcttcgagaacggccaccccagccagcccggccccccccagctgaccagagccagcgccgacgtgctgagcaagtgcaagaaggccctgagcgagcacaacgtgctggtggtggagggcgccagaaagtacgcctgcaagatctgctgcaagaccttcctgaccctgaccgactgcaagaagcacatcagagtgcacaccggcgagaagccctacgcctgcctgaagtgcggcaagagattcagccagagcagccacctgtacaagcacagcaagaccacctgcctgagatggcagagcagcaacctgcccagcaccctgctgtag

SEQ ID NO: 182777 - DNA, 2034 bp, Artificial Sequence
  derived and/or modified sequence
atggattttccaggacacttcgagcagatatttcagcagctcaattaccaaaggcttcacggacagctgtgcgactgtgtgattgtcgtgggaaatcgccattttaaggcccaccgctccgtcctagcagcctgctccacccactttcgggccctcttctcagttgctgaaggagatcagactatgaacatgattcagttggattctgaggtagttacagctgaggccttcgctgccctcatcgacatgatgtacacttccacgcttatgcttggggaatccaacgtgatggacgtcttactggctgcctcccatctccacctgaacagcgttgtgaaggcatgcaagcactatcttaccacccggaccctgcccatgtccccacctagcgaacgcgtgcaggagcagtctgcccggatgcaaaggtccttcatgttgcagcagctcggtctctccatcgtatcctccgcccttaacagttcacaaaacggagaagagcagcccgcccccatgtcttcttctatgagaagcaacctggaccaaaggaccccatttcctatgcggagactgcataaaagaaagcagtctgcagaggagcgagcccgacaacgcctgaggcccagcatagatgagtccgccatcagtgacgtcaccccagaaaatggaccttcaggagtccatagcagagaagaattcttttcccctgatagcctgaaaatcgtcgataatccgaaggcagacggaatgactgataaccaggaggactctgctatcatgttcgatcaatcctttggaacccaagaagatgcgcaagtgccctcccagtcagataacagcgccgggaatatggcccagctctccatggcctcaagggcaacccaggtcgagacctcattcgaccaagaggctgcgccggagaaaagtagctttcagtgtgagaaccctgaggttggtctgggggagaaagagcatatgagggtcgtcgtcaagagtgagcccctttcctctccagaaccgcaggacgaagtttccgacgtgacttcgcaagccgaaggtagcgagagcgtcgaagttgagggcgtcgtcgtatccgcagagaagattgacctctcccccgaatcatcagaccggagcttctccgacccacagtcttctactgatcgcgtgggtgatatccatatcttggaggttactaacaacctcgagcacaagagcacattctccattagcaactttttaaataagtcccgcgggaacaatttcaccgcgaaccagaacaacgatgacaacattccaaacaccaccagtgattgtaggctggaatctgaggcgccgtacctcctatctccagaggctggaccggcaggggggcctagtagcgcacccggctcccacgtggagaacccctttagcgaaccagcagactcacattttgtacgccccatgcaggaagtgatggggctgccatgtgtacagactagtgggtatcagggcggcgaacagttcggtatggatttcagcagatctgggctcggccttcactcttctttttcaagagtcatgattggatcgcctagaggtggggcgtctaacttcccttactaccgccgcatcgctcccaagatgcccgtcgtcacttctgtgcgatcttcgcaaattccggagaactccacttcgtcccagctcatgatgaatggagccacctcgagttttgagaatggccacccttcccagccaggacctcctcagctgacccgggcctccgctgatgttctgagcaagtgcaaaaaagcactgtcagagcataacgtgctcgtagtggaaggagccagaaaatacgcatgtaaaatctgctgcaaaacatttctaacgctcaccgactgtaaaaaacacatccgagtccacactggcgaaaaaccatatgcctgtctgaagtgcggaaaacgttttagccaatcttcccatctctacaagcacagtaagacaacatgccttaggtggcagtcttctaatcttccatccaccctcttgtag

SEQ ID NO: 182778 - DNA, 2034 bp, Artificial Sequence
  derived and/or modified sequence
atggacttccctggccactttgagcagatcttccagcagctgaactaccagaggctgcacggccagctgtgtgactgtgtgattgtggtgggcaacagacacttcaaggcccacaggtctgtgctggccgcctgcagcacccacttccgggccctcttctctgtggccgagggggaccagaccatgaacatgatccagctggacagcgaggtggtgacagctgaggcctttgctgccctgattgacatgatgtacaccagcaccctgatgctgggggagagcaatgtgatggatgtgctgctggccgccagccacctgcacctgaacagcgtggtgaaggcctgcaagcactacctgaccaccaggaccctgcccatgagcccccccagcgagcgggtgcaggagcagagcgccaggatgcagaggagcttcatgctgcagcagctgggcctgagcatcgtgagcagcgccctgaacagcagccagaatggagaggagcagcctgcccccatgagcagctccatgaggagcaacctggaccagaggacccccttccccatgaggcggctgcacaagaggaagcagagcgctgaggagcgggcccggcagaggctgcggcccagcattgatgagagcgccatcagtgatgtgaccccagaaaatggccccagcggcgtgcacagccgggaggagttcttctccccagacagcctgaagatcgtggacaaccccaaggcagatggcatgacagacaaccaggaggacagcgccatcatgtttgaccagagctttggcacccaggaggatgcccaggtgcccagccagagcgacaacagcgctggcaacatggcccagctgtccatggccagccgggccacccaggtggagaccagctttgaccaggaggccgcccctgagaagagcagcttccagtgtgaaaatcctgaggtgggcctgggggagaaggagcacatgagggtggtggtgaagtctgagcccctgagcagccctgagccccaggatgaggtgtctgatgtgaccagccaggccgagggcagcgagagcgtggaggtggagggcgtggtggtgtctgctgagaagattgacctgagccctgagagcagtgacaggagcttcagtgacccccagagcagcacagacagagtgggggacatccacatcctggaggtgaccaacaacctggagcacaagagcaccttcagcatcagcaacttcctgaacaagagccggggcaacaacttcaccgccaaccagaacaatgatgacaacatccccaacaccaccagtgactgccgcctggagagcgaggccccctacctgctgagccctgaggccggccctgctgggggccccagcagcgcccctggcagccacgtggagaaccccttcagcgagcctgctgacagccactttgtgcggcccatgcaggaggtgatgggcctgccctgtgtgcagaccagcggctaccagggcggggagcagtttggcatggacttcagccgcagcggcctgggcctgcacagcagcttcagccgggtgatgattggcagcccccggggcggggccagcaacttcccctactaccgccgcatcgcccccaagatgcctgtggtgacctctgtgcgcagcagccagatccctgagaacagcaccagcagccagctgatgatgaatggagccaccagcagctttgaaaatggccaccccagccagcccggccccccccagctgacccgggccagcgcagatgtgctgagcaagtgcaagaaggccctgtctgagcacaacgtgctggtggtggagggcgccaggaaatatgcctgcaagatctgctgcaagaccttcctgaccctgacagactgcaagaagcacatccgggtgcacactggagagaagccctatgcctgcctgaagtgtgggaagcgcttcagccagagcagccacctgtacaagcacagcaagaccacctgcctgcgctggcagagcagcaacctgcccagcaccctgctgtag

SEQ ID NO: 182779 - DNA, 2034 bp, Artificial Sequence
  derived and/or modified sequence
atggacttccccggccacttcgagcagatcttccagcagctgaactaccaaagattgcacgggcagttgtgcgactgcgtaattgtcgtgggcaacaggcacttcaaggcacacaggagcgtgctcgctgcgtgtagcacacactttcgagccctgtttagtgtagcggagggcgatcagactatgaacatgatccaactagattctgaggtagtgaccgcagaggcattcgcagcactgattgatatgatgtatacaagtactcttatgttaggagaatcgaacgtaatggacgtgttgctggctgcctcacacttgcatctcaattccgttgtgaaagcttgcaagcactatctgaccacgagaaccctccccatgtctccaccatccgagagggtgcaagaacagtcagctagaatgcaaagatctttcatgctccaacagctgggtctttcaattgttagctctgccctgaattccagccagaatggtgaggaacagccagcacccatgtcctcatcaatgcgtagcaatctggatcagcgcacacctttcccaatgaggagactgcacaagcggaaacagtcggccgaggaaagggcaagacagcgtctcaggccatccattgacgagtctgctatctccgacgtcacccccgagaacggcccaagcggagttcatagccgagaggagttcttctcacccgattccttgaagatcgtggataatcccaaggcagacggaatgaccgacaaccaagaagattcagccatcatgtttgatcagagcttcggaacgcaagaagatgcacaagttccaagccaatcagataattcagcgggaaacatggcgcaactgagcatggcgtctagagcaacgcaggttgagacatcttttgaccaagaagccgctccagaaaaatcctctttccagtgcgagaacccagaagtgggccttggtgagaaggagcatatgagggtagtcgtaaagtcggagcccctgagttcaccagagccacaggatgaggtgagcgacgttacgagccaggctgaagggtccgaatccgtggaagttgagggggtcgtggtgtccgcagagaaaattgatctgagtcctgagtccagtgataggagctttagtgacccacaaagctctaccgatagggtaggagatattcatatcttggaggtgaccaataacctggagcataaaagtacttttagcatctccaacttcctgaataagagtcgtggcaacaactttaccgccaatcagaataatgatgacaacattcccaacacaaccagcgactgtcgtttggaatctgaggctccttacctgctatcacccgaggcagggcccgccggcggcccctcctcagctccaggatcccatgtggaaaatccattttcagaaccagccgatagccacttcgtgagaccgatgcaggaagttatgggattgccctgcgtacagacatccggctatcaggggggcgagcaattcgggatggatttctctcgttcagggctggggttacactcaagctttagtagagtcatgatcggctcaccaagaggtggcgctagcaatttcccatattataggagaattgcaccaaagatgcccgtcgtaaccagtgtcagaagcagccagatccctgagaactcaaccagttcccagttgatgatgaacggggctacctcctcctttgagaatggccacccctcacagccaggtccacctcaactcacccgtgcttcggcagatgtcctgtctaagtgcaagaaggccctgtccgaacataatgtgctagtggtggagggagctcggaaatatgcgtgcaagatttgctgcaaaacattcctgacacttacagactgtaaaaaacacatccgggtccacaccggggagaaaccatatgcatgtctgaaatgcggaaagcggttctcccagtccagccacttgtataaacattctaaaaccacctgtctgagatggcaatcctcaaatctgccttccaccctactttag

SEQ ID NO: 182780 - DNA, 2034 bp, Artificial Sequence
  derived and/or modified sequence
atggactttcctggacactttgaacagatttttcagcagctcaactaccagaggttgcacgggcagctctgcgattgcgtgatcgttgtggggaacagacattttaaggcacacagatcagtgctggctgcctgttcaacccacttccgggcactcttttcggtggcagagggcgaccaaacaatgaatatgatccaactcgatagcgaggtggtcactgctgaggccttcgcggctctgattgacatgatgtacaccagcaccctgatgctcggggagagcaatgttatggatgtgctgctggcagcctcacacctccacctgaactcagtggttaaagcttgcaaacactatctgaccacccgaacactccccatgtctccgccttcagagagggtgcaggagcaatcagccaggatgcagcggtcatttatgctgcagcagcttgggctgtccattgtgtcgagtgctttgaactctagccagaatggtgaagaacagccagcgcctatgtctagttctatgcgttcaaacttggatcagcgaaccccatttccgatgcgacgcttgcacaagcggaaacagtcagcagaagagagagccagacagaggttgaggccttccatcgacgaatccgctatcagcgacgtgacacctgagaatggcccatccggagtccatagtcgggaggagttcttcagcccagattcattgaaaattgtagataacccaaaggctgacggcatgaccgataatcaagaagactctgcaattatgtttgaccagtccttcggtactcaggaggatgcgcaagtgcccagtcagtcagacaatagcgctgggaacatggcacaactgtccatggcttcacgggctactcaggttgaaacgtctttcgaccaggaggctgccccagaaaagtcctcatttcagtgcgagaatccagaggttgggcttggagagaaggaacacatgagggtggtcgttaagagcgagccgttgtcctctcctgagcctcaggatgaagtctccgacgtgacatcccaggctgaggggagcgagagcgtggaagtggagggggtagttgtcagcgctgaaaagattgacctcagcccagagtcctctgataggagcttttccgatccacagagctccacagatcgggtgggggacatccacatactggaggtcactaataatctggagcataagtcaaccttcagcatcagcaattttctgaataagagccggggaaacaatttcactgcaaatcaaaataacgacgataacattccaaatacaactagcgactgtcgactggaatccgaggctccttacctgttgagtcccgaagctggcccagcaggaggcccttcttctgcaccaggatcgcatgtggagaaccccttcagcgagcctgcagacagccactttgttcgtcccatgcaggaagtgatgggcctgccttgtgtccaaacttcaggataccaaggaggagaacagttcggaatggacttcagtaggtccgggcttggactacactcttcctttagccgcgtaatgataggttcacctcggggaggagccagtaacttcccatattataggcgtatagcgcctaagatgcccgtagtaacgtcagtgagaagctctcaaatccccgaaaactcaacatctagtcaactcatgatgaacggggctacgagcagctttgaaaacggccacccatctcagccaggtcccccacagttgacccgagcgtccgctgacgtcctgagtaagtgtaaaaaagctctaagtgagcacaacgttctggttgtggaaggtgcgagaaagtatgcatgtaaaatctgctgcaagacattcctgaccttgaccgattgcaagaagcatatccgggttcacactggcgagaaaccctacgcttgcctgaagtgcgggaaacgcttcagccagtcctctcacctctacaaacacagtaagacaacctgtttgcgatggcaatcgtcaaatctgccatcgaccctgctctag

SEQ ID NO: 182781 - DNA, 4627 bp, Artificial Sequence
  derived and/or modified sequence
gcgaactggctggaggagctaggggactagaggcggggtgggaggggggcgggtggaagggggaggaagtcccgtaacggagacgctggtcaggacgttcccacctcctctgacactgccgagtccgatcggagaggggtcaccgcctccttcagcgaggaggaggggggcggagcccgactcaggatcatggattttcctggtcactttgaacaaatcttccagcagctgaactaccagagacttcatggccagctctgtgattgtgtcattgtagtggggaatagacactttaaagcccaccgctccgtgctggcagcatgcagcacgcatttccgagccctgttctcagtggcagaaggagatcagaccatgaacatgatccagctggatagcgaggtggtgacagcagaggcctttgctgcactgattgacatgatgtatacctccaccctcatgctgggggagagcaatgtaatggatgtcttattggcagcctctcacctgcatttgaactctgttgttaaggcatgtaaacattacttaacgacaaggacgctgcccatgtctccccccagtgagcgcgttcaggagcagagcgcccgcatgcagcgctcctttatgctacagcagctgggactaagcatcgtgagctcagccctcaattccagccagaatggcgaggagcagccagcccccatgagctcttccatgcgcagtaacctggatcagcgcacgcccttccccatgagacgccttcataagcgcaagcagtctgcagaggagcgggccaggcagcgcctccgaccctccatagatgagtctgccatttcagatgttacaccggagaatgggccttcaggggttcattctcgggaggagttcttttcaccagattctctgaaaattgtggataatcctaaagctgatggaatgactgataaccaggaagatagtgcgatcatgtttgatcagtcttttggcactcaagaagatgcccaggtgcccagccagtctgataacagtgctggcaacatggcacagttgtccatggcctctcgtgcaactcaggttgagactagttttgatcaggaagctgcacctgagaaaagtagttttcagtgtgaaaaccctgaggttggccttggtgagaaggagcacatgagagtggtggttaaatctgagcccctgagctcacctgagcctcaggatgaagtgagcgatgtgacctcacaagcagaaggcagcgagtctgtggaagtggaaggagttgtggtcagtgccgagaagatagacctcagccctgaaagcagtgatcggagtttttcagatccccagtctagcacagacagggtaggtgatatccatattttggaagtcacaaataacctagagcataagtccacttttagtatttcgaattttcttaacaagagcagaggaaataactttactgcaaatcagaacaatgatgataatattccaaacaccactagtgactgcaggctggagagtgaggccccctatttgttgagtccagaggctgggcctgcaggtgggccctcctctgcccctggctcccatgtagagaacccatttagtgaacctgcagactcccacttcgtcaggcctatgcaggaggtgatgggcctgccgtgtgtgcagacttcaggctaccaaggaggagaacagtttgggatggacttttccaggtctggtttgggcctccactcctccttctccagggtaatgataggttccccaaggggaggagccagtaactttccttactaccgccgcatagctcccaaaatgccagttgtaacttccgtcaggagctcacagatcccagaaaactctaccagttctcagctaatgatgaatggagctacgtcctcatttgaaaatggccatccttcccagcctggccctccacagttgaccagggcatctgcagatgttctgtcaaagtgcaagaaggccttatcagagcacaatgttttggttgtagagggagctcgcaagtatgcctgcaaaatctgctgcaaaacttttctgactttgacagattgcaagaagcacatccgtgttcacacaggtgaaaagccttacgcctgcctgaagtgtggcaagaggtttagtcagtccagccacctgtataagcactcaaagactacctgcctgcgctggcagagcagcaatcttcccagcactttgctctagctgtttgtccttacaagacaacgctgaggccagttgtcagactgaatttcttttggtaagcagttaatgcctttgggttcgaggcttccagctgcccagtggctcttaaacagtttagcaactaataaccggagaactaacatgtagtatttgtgctgctgcatttctgagtgaagtgcacgtcttgggaaagggatgcaatccctgaaaccaggtgcttccttggggttgagtaatgcagtcagaaagtagtttgtaattgatattaaaagtggcacatttaaaaatttaaaaattgaagtgcaaaaaaaattttttagcaatttttgtaaaactgtgtagcatttaaatttcctataccttctgatgggagtattatatccctgtatagtgatgcaaaatgcacttatgtgtaaccagtggtgatttggtgcctgtcttaaaggaaggcctttgaggacacacctgtctgccacaaatgctttaaagtgtatcatgagctagtcctaggcctcaaagtactgtattttttatttttacctgatttgcagtcataaacactgcactttggtgctgacactgggtccagagtgagcattctcttggactattagatgtatatacttttgaatacatcactgttggatagatgttttaacagttttttctggtttaaaaaccaaattgtaaatggagtgtgtacttgtagagagtgacaaggtattgtttccctatgtgctgtttgagcagtattttaaccaacttgtattacagatgttacagttccatgttaggaagtcagaaaagacttgtgtttgtctttgttctgctgatgtggagtcatgttttgtggggtcttccatggcacatttacctgttgctccgtccagatgttgagggccagtctaggctgacacatcctacccgaggacaagcctgttctccatttcttcactctcccctccccatatagcaactctcccaggtttagattaccgttttcgacgacagattaaccaaaaatgccccacacaggttttattactgttatatactatacttttaacagtacagaccctaaattttattatttgttgctcccccaatctgataccaaatgtttaaagttgtttgaaatccaaacatggtagtgttcatgggtaaatattttctaggctatgtaagagttagcagcccatagcatagaagtaatcaagtagcatctgagactgttggaggcactagggcctctctgggccctacagcctcacttccccagcctcaccttgctgtcctctgacactgccatcagggctgttagtggcacctgtatgaggccaagtgtgcgtccaggggaacagcacaggttaatgcgtctccctagaactcatgaagtcagtttaattcatgcatgaacatgagttcattttatgttttatatagctttcttagacataccaaaccatcattcataaatcagataaattattcagtttttgtgtttagaaagctaagtatgtgtagctggaaacaaaaatgagcgtgttttctctcctgttaatctagagtgtgcagttacacatgtgtggataatttcatgttccaggggcgcttggcatctcccatggactgattcccaggaagaaaagcccaaagggaaacccacgattcctttcgagtagatgtgggaaagagcccattggaggatatgaggtcctgtgaaattcagttgtgtgtgtggctccttgttagcagtcatgttgacatggtgttaggaggctccccatccaccctttacatgatgtagggaccagtgtcttgtgagattaaccttgggacacagtgggttagcctggagaaaatgagaggccctgcctggacccagggagaggagccagtgacacaggcagagcggtgcagccctccttcccttccatttggaggaggtggtgccaggagcctgcccgcttacctctgctgaagcataagtggactttgcttttggggcttatctctgatacatgctggagccctgcctctccactgctagatggaacctggaatctctcatctacctcttagtctgtcagtttctacgtgtgagaagcaagcttgtgggccagtgtccttgtacatgctgtagcacttaaaaaataattccagggttccctggaaaaccagtcccagggttcctatgatctgtagtttctacctggattataactggttttgggtacctgaattttgattggttagccttaattatagtctggcgtgatcatgtagaatcttttctggtgaacagatcataaagttctatcaaggagttctatcaaggcatccatgtcagtggtgctatgctggttacaacttgagatttttgaaataaaaaatttgtcatatt

SEQ ID NO: 182782 - DNA, 1113 bp, Artificial Sequence
  derived and/or modified sequence
atggccatcaccctggaggaggccccctggctgggctggctgctggtgaaggccctgatgagattcgccttcatggtggtgaacaacctggtggccatccccagctacatctgctacgtgatcatcctgcagcccctgagagtgctggacagcaagagattctggtacatcgagggcatcatgtacaagtggctgctgggcatggtggccagctggggctggtacgccggctacaccgtgatggagtggggcgaggacatcaaggccgtgagcaaggacgaggccgtgatgctggtgaaccaccaggccaccggcgacgtgtgcaccctgatgatgtgcctgcaggacaagggcctggtggtggcccagatgatgtggctgatggaccacatcttcaagtacaccaacttcggcatcgtgagcctggtgcacggcgacttcttcatcagacagggcagaagctacagagaccagcagctgctgctgctgaagaagcacctggagaacaactacagaagcagagacagaaagtggatcgtgctgttccccgagggcggcttcctgagaaagagaagagagaccagccaggccttcgccaagaagaacaacctgcccttcctgaccaacgtgaccctgcccagaagcggcgccaccaagatcatcctgaacgccctggtggcccagcagaagaacggcagccccgccggcggcgacgccaaggagctggacagcaagagcaagggcctgcagtggatcatcgacaccaccatcgcctaccccaaggccgagcccatcgacatccagacctggatcctgggctacagaaagcccaccgtgacccacgtgcactacagaatcttccccatcaaggacgtgcccctggagaccgacgacctgaccacctggctgtaccagagattcgtggagaaggaggacctgctgagccacttctacgagaccggcgccttcccccccagcaagggccacaaggaggccgtgagcagagagatgaccctgagcaacctgtggatcttcctgatccagagcttcgccttcctgagcggctacatgtggtacaacatcatccagtacttctaccactgcctgttctag

SEQ ID NO: 182783 - DNA, 1113 bp, Artificial Sequence
  derived and/or modified sequence
atggccatcactttagaagaggctccatggctgggctggcttctggttaaagctctcatgcgcttcgcctttatggttgtcaacaacctcgtagcgataccgtcctacatatgttatgtaatcattctccaaccgctgcgcgtgcttgacagcaagaggttttggtacattgaaggcataatgtacaaatggctgctagggatggttgcttcctggggatggtatgctgggtacacagtgatggagtggggagaggacatcaaggcggtatccaaagacgaagcggtcatgctcgtgaatcatcaggctactggggacgtttgcaccctgatgatgtgtctgcaagacaaagggttggtagtcgctcaaatgatgtggctgatggaccacatctttaaatacacaaattttggcatcgtgagtctcgtacatggggatttcttcatacgccagggacgctcataccgagaccaacaactgctcttgcttaaaaagcacctggaaaataactatcgaagcagggacaggaaatggatcgtcctgtttcccgagggcggattcttgagaaagcgccgggaaacatcacaagccttcgccaagaagaataacctaccttttttgaccaacgtgaccctgcccaggagcggggccacaaaaattatcctgaacgccctcgttgcccagcagaaaaatggatcccccgcaggcggagatgctaaggagctggactccaagagcaaagggctacagtggattattgacacaaccatagcttaccctaaagcagagcccatagacatccagacctggatcttggggtacaggaagcctacagtgacccatgttcactacaggattttccccatcaaggacgtgcctctggaaacagacgatctgacaacttggctgtatcagaggtttgttgaaaaggaggacctgctgtctcacttctacgaaaccggagcctttcccccctccaaaggacacaaggaggcagttagcagggagatgaccttgtccaatctttggattttcctgattcagagtttcgcctttctttccggctatatgtggtacaatataattcagtacttttatcattgtctgttctag

SEQ ID NO: 182784 - DNA, 1113 bp, Artificial Sequence
  derived and/or modified sequence
atggctatcaccctcgaggaggctccatggctggggtggcttctggtaaaagctctgatgcgcttcgctttcatggtggtcaacaacttggtggctatcccgtcttacatatgctacgtgatcatattgcaacccctgagagtcctggacagcaaaagattctggtacatcgaaggcattatgtataaatggctgttaggaatggtggcttcatggggttggtacgccggctataccgtgatggaatggggggaggatataaaggctgtgagtaaggatgaagctgtgatgttggtaaaccatcaggctaccggagatgtgtgtacactgatgatgtgtctgcaggacaagggcttagtggtagcccagatgatgtggctgatggaccacatctttaagtacactaacttcggtatcgtgagtttagtccacggagatttcttcattcggcaaggccggtcgtacagggatcagcaactattgctcttaaaaaagcacttggagaataactacagatccagggaccggaaatggattgtgctattccctgaaggcgggttcctacgaaaacgccgcgaaacctcccaagcatttgcaaagaaaaataatctgcccttcttgacaaacgtgacacttccaaggagcggcgcaactaaaattattctgaatgctcttgtagcccagcagaaaaatggaagcccggctgggggtgatgctaaagagctggattccaaaagcaagggacttcagtggattatcgacacaaccatcgcttacccgaaagctgaacctattgatatacagacatggatactggggtataggaaacccaccgtgacgcatgtacactatcgcatctttcccatcaaagacgtaccgttggagacagacgacttgacgacctggttgtatcagcgcttcgtcgaaaaggaagacttattgagccatttttacgagactggagcttttccaccctctaagggtcacaaagaggccgtttcccgcgagatgaccctcagcaatctgtggatctttttgatccagagttttgcctttctatccggttacatgtggtacaatatcatacagtacttttaccattgtctgttctag

SEQ ID NO: 182785 - DNA, 1113 bp, Artificial Sequence
  derived and/or modified sequence
atggccatcaccctggaggaggccccctggctgggctggctgctggtgaaggccctgatgagatttgccttcatggtggtgaacaacctggtggccatccccagctacatctgctacgtgatcatcctgcagcccctgcgggtgctggacagcaagcgcttctggtacatcgagggcatcatgtacaagtggctgctgggcatggtggcctcctggggctggtacgccggctacacagtgatggagtggggcgaggacatcaaggctgtgtccaaggatgaagctgtgatgctggtgaaccaccaggccactggagatgtgtgcaccctgatgatgtgcctgcaggacaagggcctggtggtggcccagatgatgtggctgatggaccacatcttcaagtacaccaactttggaattgtgtccctggtgcacggggacttcttcatccggcagggccgcagctacagagaccagcagctgctgctgctgaagaagcacctggagaacaactaccgcagccgggacaggaagtggatcgtgctcttccctgagggcggcttcctgaggaagagaagagagaccagccaggcctttgccaagaagaacaacctgcccttcctgaccaacgtgaccctgcccaggtctggggccaccaagatcatcctgaatgccctggtggcccagcagaagaatggcagccctgctggaggagatgccaaggagctggacagcaagagcaagggcctgcagtggatcatcgacaccaccatcgcctaccccaaggccgagcccatcgacatccagacctggatcctgggctacaggaagcccaccgtgacccacgtgcactaccgcatcttccccatcaaggatgtgcccctggagacagatgacctgaccacctggctgtaccagagatttgtggagaaggaggacctgctgagccacttctatgagaccggggccttcccccccagcaagggccacaaggaggccgtgtcccgggagatgaccctgagcaacctgtggatcttcctgatccagagctttgccttcctgagcggctacatgtggtacaacatcatccagtacttctaccactgcctcttctag

SEQ ID NO: 182786 - DNA, 1113 bp, Artificial Sequence
  derived and/or modified sequence
atggccatcaccctggaggaggccccctggctgggctggctgctggtaaaggctctgatgcggtttgctttcatggtagtaaataatctcgtcgcaatcccctcctatatctgctacgtcatcattctgcagccactgcgggtgcttgattctaagcggttctggtatatcgaagggattatgtacaagtggctcctggggatggtggccagctggggttggtacgccgggtacacggttatggaatggggggaggatataaaggccgtgagcaaggacgaagctgtcatgctggtgaaccaccaagcaacaggggacgtgtgtacattaatgatgtgcctccaggataagggtttagttgtggcacagatgatgtggttgatggatcacatatttaagtatactaacttcggtatcgtatccctcgtccatggagactttttcattcgccagggacggtcgtaccgcgaccaacagctgcttctccttaagaagcacctggaaaacaactaccgtagccgggacaggaaatggattgttctgtttccagaggggggctttcttcgtaagcgaagggagacaagtcaggcctttgcaaaaaagaataacttaccgtttctaacaaacgtaaccctgccacgttcaggggcaaccaaaatcatcttgaatgcgctggtggcccaacagaagaacggaagcccagccgggggggacgccaaggaattggacagtaaatcaaaagggcttcagtggatcatcgatactaccatcgcctaccccaaggctgaaccaattgatatccagacatggatactgggatatcgtaagccaaccgtgactcacgtacactacagaatctttcctattaaagacgtgcctcttgagacagacgatttaaccacctggctataccaacgattcgtggaaaaggaagacctgctgtcgcacttttacgagactggtgcctttccacctagtaagggacataaagaggctgtctctagagaaatgacgttgtcaaacctttggattttcttaatccagtcatttgccttcctgtctggctacatgtggtataatataatccagtatttctaccattgcttgttctag

SEQ ID NO: 182787 - DNA, 1113 bp, Artificial Sequence
  derived and/or modified sequence
atggccatcaccctggaggaggccccctggctgggctggctgctggtcaaagctttaatgcgatttgcatttatggtcgttaacaatttggtggcaattccatcttacatttgttatgtcattatcctccaacctctgcgtgtgctggattctaaaagattttggtatattgaaggcatcatgtataagtggctccttggtatggtcgctagttggggttggtacgctggttataccgtgatggaatggggggaggatatcaaagctgtcagtaaagacgaagcagttatgctggtcaaccatcaggctacaggcgacgtttgcacactgatgatgtgtctccaagacaagggcctggtggtcgcccagatgatgtggctcatggaccatatttttaagtatacgaatttcggcattgtatctctggtgcacggcgattttttcattcggcaaggaagatcttaccgggatcaacagttactacttttgaagaaacacctagaaaataactataggagccgtgacagaaaatggattgtcctatttcctgagggcgggttccttaggaagcggcgtgagacatcccaggcttttgcaaaaaagaataatctcccctttctgaccaacgtcactctgccgagaagcggcgctaccaagattatcctgaacgcactcgtggcacagcaaaagaacggaagccctgccgggggcgatgcaaaggaactggattccaagagtaagggtttacagtggatcatcgacactactatcgcttaccctaaggccgagccaatcgatattcagacatggattttaggatatcgaaagcccacagtgacccacgtgcattaccgaatatttcccatcaaggatgtgccgctcgagaccgacgatctaacgacatggctgtatcagcgcttcgtggaaaaagaagacctactgagccacttttatgagaccggtgcgtttcctccttctaagggccacaaggaggctgtctctagagagatgaccctctcaaacctatggattttcctgattcagtccttcgccttcctgtctggctacatgtggtacaacataatacaatacttctatcactgtcttttttag

SEQ ID NO: 182788 - DNA, 1113 bp, Artificial Sequence
  derived and/or modified sequence
atggcgatcacactggaagaagcaccctggctgggttggcttttagtaaaagcgcttatgcgctttgccttcatggtcgtgaataatttagtcgccatcccatcatatatttgctacgttattatactgcagccactccgtgtgctggactccaaacgtttctggtatatcgaagggatcatgtacaagtggctccttggcatggtggcatcatggggctggtatgcaggatatactgtgatggagtggggagaggatatcaaagccgtgagtaaggacgaggcagtcatgctggtgaatcaccaggccacaggggacgtctgtaccttgatgatgtgtctgcaagataagggcttggtggtagctcagatgatgtggttgatggatcacatcttcaagtacaccaacttcgggatcgtttcactcgtgcacggtgatttctttattcggcagggacggtcgtatagggaccagcaactgctcttgttgaaaaagcatttggaaaacaattatcgaagcagggaccggaagtggattgttttatttccagaagggggattcctgaggaagaggagggaaacctcccaggcattcgcgaagaagaacaacctccccttcctgacaaatgttacgttacctcggtccggcgctacaaagatcatattaaacgctctcgtggcgcaacagaagaacggcagccccgcagggggagatgcaaaggagcttgatagtaagagtaaaggcttacagtggataatcgacaccaccattgcgtatcctaaggctgaacccattgacatacaaacctggattctgggatacaggaaaccaaccgtcacacacgtacactacagaatttttccaattaaagacgtgccactggaaactgacgatctaacaacttggctctaccagagatttgtcgaaaaagaggacttgttatcccatttctacgagactggggcattccctccgagcaaaggccataaagaggctgtcagccgggaaatgactttgtctaacctctggatcttcctgatccagagctttgccttcctctccgggtatatgtggtacaacattatacaatacttctatcattgcctgttttag

SEQ ID NO: 182789 - DNA, 1113 bp, Artificial Sequence
  derived and/or modified sequence
atggccattacactcgaagaagcgccatggttgggatggctgctcgtgaaggctttgatgagattcgcgtttatggtagtgaacaaccttgtggcaatccccagctacatatgctacgtgatcatactccagcctctcagggtccttgattccaagcgcttctggtacatcgagggaattatgtacaagtggctgctgggaatggtggcctcatggggatggtacgccggatacacagtaatggaatggggcgaagacatcaaggccgttagcaaagacgaggctgtgatgctggtgaaccaccaagcgaccggagacgtgtgtaccctaatgatgtgtctccaagacaaaggactggtcgtggcccagatgatgtggctaatggatcacatcttcaagtacactaacttcggcatcgtgagccttgtgcacggcgatttttttatcaggcaaggtcgtagctaccgcgaccagcagctgctgttactcaagaagcacctggagaataactaccgatcccgggaccgtaaatggattgttctattccctgagggcggtttcctgcgcaagcgcagggagacttctcaagcctttgcaaagaaaaacaatctgccttttttgacaaatgtgaccctgcctcgttctggcgcaaccaaaatcatccttaacgcattagtagcccagcaaaagaacggaagtcctgctggcggagacgcaaaggaactggacagtaagtcgaaggggctccagtggatcatcgacacaacaatagcctaccctaaggctgaacccattgatattcagacatggatcctgggctaccgcaagcccaccgtgacccacgtgcattaccggatttttcccatcaaagacgtgcccttagaaacagacgatctaacgacttggttgtaccagcgcttcgtcgagaaggaggacctactgagtcacttttacgaaactggggctttccctccaagcaagggtcataaagaggctgtgtctcgtgaaatgactctctctaatctttggattttcctcatccagtcgttcgccttcctttctgggtatatgtggtataacataattcaatatttttatcattgtctgttttag

SEQ ID NO: 182790 - protein, 1648 aa, Artificial Sequence
  derived and/or modified sequence
MSLHSTHNRNNSGDILDIPSSQNSSSLNALTHSSRLKLHLKSDMSECENDDPLLRSAGKVRDINRTYVISASRKTADMPLTPNPVGRLALQRRTTRNKESSLLVSELEDTTEKTAETRLTLQRRAKTDSAEKWKTAEIDSVKMTLNVGGETENNGVSKESRTNVRIVNNAKNSFVASSVPLDEDPQVIEMMADKKYKETFSAPSRANENVALKYSSNRPPIASLSQTEVVRSGHLTTKPTQSKLDIKVLGTGNLYHRSIGKEIAKTSNKFGSLEKRTPTKCTTEHKLTTKCSLPQLKSPAPSILKNRMSNLQVKQRPKSSFLANKQERSAENTILPEEETVVQNTSAGKDPLKVENSQVTVAVRVRPFTKREKIEKASQVVFMSGKEITVEHPDTKQVYNFIYDVSFWSFDECHPHYASQTTVYEKLAAPLLERAFEGFNTCLFAYGQTGSGKSYTMMGFSEEPGIIPRFCEDLFSQVARKQTQEVSYHIEMSFFEVYNEKIHDLLVCKDENGQRKQPLRVREHPVYGPYVEALSMNIVSSYADIQSWLELGNKQRATAATGMNDKSSRSHSVFTLVMTQTKTEFVEGEEHDHRITSRINLIDLAGSERCSTAHTNGDRLKEGVSINKSLLTLGKVISALSEQANQRSVFIPYRESVLTWLLKESLGGNSKTAMIATISPAASNIEETLSTLRYANQARLIVNIAKVNEDMNAKLIRELKAEIAKLKAAQRNSRNIDPERYRLCRQEITSLRMKLHQQERDMAEMQRVWKEKFEQAEKRKLQETKELQKAGIMFQMDNHLPNLVNLNEDPQLSEMLLYMIKEGTTTVGKYKPNSSHDIQLSGVLIADDHCTIKNFGGTVSIIPVGEAKTYVNGKHILEITVLRHGDRVILGGDHYFRFNHPVEVQKGKRPSGRDTPISEGPKDFEFAKNELLMAQRSQLEAEIKEAQLKAKEEMMQGIQIAKEMAQQELSSQKAAYESKIKALEAELREESQRKKMQEINNQKANHKIEELEKAKQHLEQEIYVNKKRLEMETLATKQALEDHSIRHARILEALETEKQKIAKEVQILQQNRNNRDKTFTVQTTWSSMKLSMMIQEANAISSKLKTYYVFGRHDISDKSSSDTSIRVRNLKLGISTFWSLEKFESKLAAMKELYESNGSNRGEDAFCDPEDEWEPDITDAPVSSLSRRRSRSLMKNRRISGCLHDIQVHPIKNLHSSHSSGLMDKSSTIYSNSAESFLPGICKELIGSSLDFFGQSYDEERTIADSLINSFLKIYNGLFAISKAHEEQDEESQDNLFSSDRAIQSLTIQTACAFEQLVVLMKHWLSDLLPCTNIARLEDELRQEVKKLGGYLQLFLQGCCLDISSMIKEAQKNAIQIVQQAVKYVGQLAVLKGSKLHFLENGNNKAASVQEEFMDAVCDGVGLGMKILLDSGLEKAKELQHELFRQCTKNEVTKEMKTNAMGLIRSLENIFAESKIKSFRRQVQEENFEYQDFKRMVNRAPEFLKLKHCLEKAIEIIISALKGCHSDINLLQTCVESIRNLASDFYSDFSVPSTSVGSYESRVTHIVHQELESLAKSLLFCFESEESPDLLKPWETYNQNTKEEHQQSKSSGIDGSKNKGVPKRVYELHGSSPAVSSEECTPSRIQWV

SEQ ID NO: 182791 - DNA, 4947 bp, Artificial Sequence
  derived and/or modified sequence
atgagtttgcacagtacccacaatcgtaataatagcggtgatatcctggacattccatcgagccagaactcttcttctttgaatgccctcactcatagctctcgcttaaaactgcacctgaagtctgatatgtccgagtgcgaaaatgacgatccactattacggtccgcaggcaaggtgcgcgatatcaaccggacctatgttatctccgcatcccggaagaccgctgatatgcctctaacgcctaatccagttggccggctcgccttgcagcgccgcactacccgcaataaagaatcaagtctgctggtgtccgagttggaagacactaccgagaaaacagctgagaccaggttgaccttgcaaaggcgggccaaaactgattctgcggaaaagtggaagacagcagagatcgacagcgttaagatgacactgaacgttggtggtgaaactgaaaataacggtgtcagcaaagaatcacggaccaatgtgaggatcgtcaacaacgcaaaaaactccttcgtggcctcatcggtccccctcgatgaggaccctcaggtgattgaaatgatggccgataagaagtataaggagactttcagcgcgccctcccgggcgaatgagaacgttgcactcaaatattcttccaatcgaccgcctatagctagcctgtcacagacagaagtagtgcgcagcggtcacctgactaccaaacccacccagtccaaactggatatcaaagtcctggggacagggaacctgtatcacagatccattgggaaggagatagccaaaacaagtaataagttcggtagtttagaaaaacggacgccaaccaagtgcactactgaacacaagcttactactaagtgctccctgccccagttgaagagtccagctccctcgatcctgaagaaccggatgagtaacctccaagtgaagcagcggcctaaatcaagcttcttagccaacaagcaagaacgctctgctgagaacactatacttcccgaagaagaaactgtggtgcagaatacatctgccgggaaagatccactaaaagtggagaactctcaagtgacggtcgctgtgcgtgtgagaccctttactaaacgggagaagatcgagaaagccagccaagtggtctttatgtccggcaaggagatcaccgtggaacatcctgataccaaacaggtgtataacttcatttatgatgtttcattttggtcatttgatgaatgccatccacattatgcgagtcagactacggtgtacgaaaagctcgctgcccccctgctggagcgggcattcgaagggtttaacacgtgcctgtttgcatatggacagactggaagtggcaaatcctacacaatgatgggtttttcagaggaaccaggcattattccgagattctgcgaggatctgttttctcaagtagcaaggaaacaaacccaagaggtcagctatcatatcgagatgtccttcttcgaggtgtacaatgagaagatacacgaccttctggtgtgcaaggacgagaacgggcagaggaagcagccgttgcgtgtgcgcgagcacccagtctacggaccgtacgtagaggcgttaagcatgaacatagtctcatcgtacgcggacatccagagctggctcgagctgggaaacaagcagcgagcgactgctgccacaggcatgaacgataagtcatcacggtcccatagcgtctttacgctggtcatgacccagacaaaaacagagttcgtggagggagaggagcacgaccaccgcatcacctcaagaatcaacctgattgacctcgccggcagtgaaaggtgtagcactgcccatacaaatggagatcgactgaaagaaggggtgtccattaacaagtccctgctgacattggggaaagttatctccgcgctgagcgaacaagcgaatcagagatcggtatttattccttatcgggagtctgtgttgacttggttgctcaaagaatccctcgggggaaactccaaaaccgcaatgatcgcaactattagccctgctgcatcaaatatcgaggagaccctgagtaccctgcgctatgcgaatcaagctaggttgattgtcaatattgctaaggttaacgaggatatgaacgctaagctaattagggaactcaaggccgaaatcgcgaagttgaaggcggctcagagaaattcccggaacattgatccagaaaggtacagactctgccgacaggagatcacctctctccggatgaagctgcatcagcaggagagagatatggccgagatgcagagagtctggaaggaaaagtttgaacaggccgaaaagaggaagctgcaggagacaaaggagttgcagaaagctggcataatgtttcagatggacaaccaccttcccaacctcgtcaacttgaatgaggaccctcaactctccgaaatgctgctctacatgatcaaggaaggaacaaccacggtaggcaagtataagccaaattcttcccatgacatccagctcagcggtgtgctcatcgctgacgatcattgcaccatcaagaattttggtggaactgtcagcatcatacctgttggggaggcgaagacgtacgtgaacggaaagcatatcctcgagatcactgttttaagacatggggaccgtgttatactagggggtgatcattacttcagattcaatcacccagttgaggtacagaaaggcaaaagaccatcaggacgggacacccctatcagcgagggacccaaagactttgaattcgcaaaaaatgaattgctgatggcacaaagaagccagctcgaggctgaaatcaaagaggctcagctgaaggctaaggaagagatgatgcaggggatccaaattgcaaaagagatggctcagcaggagttgagctcccagaaggccgcttacgagtccaaaataaaagcactggaggctgagctgcgagaagagagccaacggaaaaaaatgcaggagataaataatcagaaagccaaccacaaaatagaggagttagagaaagctaagcaacacctggagcaagagatttatgtgaacaagaagcgcctcgagatggagacgctggccaccaagcaggccctcgaagatcactccatccgccacgctcgaatcttggaagctcttgagactgagaagcagaaaattgccaaagaggtgcagattttgcaacagaatcgcaataacagggataaaaccttcactgtgcaaaccacctggagctcgatgaagctatccatgatgatccaggaagccaacgctatctcctccaagcttaaaacttattacgtattcggtcgtcacgatattagtgataaatcgtcatccgacaccagcatccgggtgcgaaaccttaagctgggaatcagtacattctggtctttagaaaaattcgagtcaaagctcgctgccatgaaagaactttacgaatcaaatggttcaaaccggggggaagacgcattttgcgaccctgaagacgagtgggaaccggatataaccgacgcccccgtctctagtctctcaagaagacgcagtagatcgctgatgaaaaatcgtcggattagcggatgcctgcatgacattcaagtgcatccaataaagaacttacactcatctcacagtagcggcctgatggacaaatcctcaacaatatactccaatagcgcagagtccttcctaccaggaatctgcaaggaactgatcgggtccagtctagactttttcggccagtcttatgatgaggagcgcaccatcgccgacagccttatcaactcatttctaaaaatctataacggcctctttgctatctcaaaagcccacgaggagcaggacgaggaatcccaggataacctgttctcctcagacagggccattcaatcactgacgattcagactgcgtgtgcattcgaacagctcgtggtgttaatgaaacattggctgtctgaccttcttccatgtactaacattgcacgactggaggatgagctccgccaggaagtaaagaagttgggcggatacctgcagctgtttcttcagggttgctgcctcgatatcagttcaatgataaaggaggcacagaagaatgcgatccagattgttcagcaggccgtgaagtatgtgggtcagctcgcagttctaaagggaagcaaacttcactttctagaaaacggcaacaataaggctgcctctgtccaggaggaattcatggatgccgtgtgcgatggggtggggctgggcatgaagatacttctggacagcggactggagaaggcgaaagagcttcaacacgagctcttccgccagtgtaccaaaaatgaagtcactaaggaaatgaagacaaatgccatggggctgattaggagtctcgagaatatctttgcagagtccaaaataaagagctttcgtaggcaggttcaggaagagaacttcgagtatcaggattttaaacgaatggttaatcgggctcctgagttcctgaaactgaaacactgcctggagaaggctatagaaatcatcatatctgcccttaagggctgtcactcagatatcaacttgctccagacttgtgtggagagcattcggaatcttgcaagtgatttctactctgattttagcgtaccgagtacctctgtgggttcctacgaaagccgcgtcacccacatcgtacaccaggagctggagtctctggctaaatcactccttttctgctttgagtctgaagagtcccctgatctactgaagccatgggagacttataatcaaaatacaaaagaagagcatcaacagtccaagtcgtcaggcatcgacgggtcaaaaaacaaaggcgtgcccaagcgggtctacgagctgcacgggagctccccagcggtatcttcagaggagtgcaccccatcaaggattcagtgggtgtag

SEQ ID NO: 182792 - DNA, 7274 bp, Artificial Sequence
  derived and/or modified sequence
ctggggagccggcgctggaggtggtgagtggcgtggggactgtgtcgagggggtccccaaggtgccggaccctgcggaggggcgaagtttcggcactggggagggcgtgcggacgctttccctacaggcgaccactgctctgcgggcgggtggtcttagctccagtcccccattcagttcctcagcattccaggtcggcggcgaaggggtccccgaacgaagggcgcaaggcagcgtctctgctgggaccgggaagccggacttcagggcctctcggcccgtgggcttctccccgagtctccccgagtcggttggcattaagagtttagcagatactttcagaaatggatacataagaaatggctggaaatcaaatgaatgtccaaagaagagcttagggtcttagtaacattcttttttaaaataactgtctgccaaaatgtcattacacagtactcataatagaaataacagcggtgatattcttgatattccttcttcccaaaatagttcatcactgaatgccctcacccacagtagccgacttaagctgcatttgaagtcggatatgtcagaatgtgaaaatgatgatccattattgagatctgcaggtaaagtcagagacataaatagaacttatgttatttctgccagtagaaaaacagcagacatgccccttacccctaatcctgtaggtagattggcacttcagaggagaactacaaggaacaaagaatcatctttgcttgttagtgagttggaagacacaactgaaaaaacagcagaaacacgtcttacattacaacgtcgtgctaaaacagattctgcagaaaagtggaaaacagctgaaatagattctgtcaaaatgacactgaatgtgggaggtgaaacagaaaataatggtgtttctaaggaaagtagaacaaatgtaaggattgtaaataatgctaaaaactcttttgttgcctcttctgtacctttagatgaagatccacaggtcattgaaatgatggctgataagaaatacaaagaaacattttctgcccccagtagagcaaatgaaaatgttgcacttaagtactcaagtaatagaccacccattgcttccctgagtcagactgaagttgttagatcaggacacttgacaacgaaacctactcagagcaagttggatatcaaagtgttgggaacaggaaacttgtatcatagaagtattgggaaggaaattgcaaaaacttcaaataaatttgggagcttagaaaaaagaacacctacaaaatgtacaacagaacacaaactgacaacaaagtgcagcctgcctcagcttaagagcccagctccatcaatactgaagaatagaatgtctaaccttcaagttaaacaaagaccaaaaagttcctttcttgcaaataaacaggaaagatccgcagaaaatacaattcttcccgaagaagaaactgtagttcagaacacctctgcaggaaaagaccccttaaaagtagagaatagtcaagtgacagtggcagtacgcgtaagacctttcaccaagagagagaagattgaaaaagcatcccaggtagtcttcatgagtgggaaagaaataactgtggaacaccctgacacgaaacaagtttataattttatttatgatgtttcattctggtcttttgatgaatgtcatcctcactacgctagccagacaactgtctatgagaagctagcagcaccactcctagaaagagccttcgaaggcttcaatacctgtctttttgcttatggtcagactggctctggaaaatcatatacgatgatgggatttagtgaagaaccaggaataattccaagattttgtgaagatcttttttctcaagtagccagaaaacaaacccaagaggtcagctatcacattgaaatgagcttctttgaagtatataatgaaaaaattcacgaccttctggtttgtaaagatgaaaatgggcagagaaagcaaccactgagagtgagggaacatcctgtttatggaccatatgttgaagcactgtcaatgaacattgtcagttcttacgctgatatccagagttggctagaattgggaaataaacaaagagctactgctgctactggtatgaatgataaaagttcccgatctcattcagttttcaccctggtgatgacccagaccaagacagaatttgtggaaggggaagaacacgatcacagaataacaagtcgaattaacctaatagatctggcaggcagtgagcgctgctctacggctcacactaatggagatcgactaaaggaaggtgtgagtattaataagtccttgctaactttgggaaaagttatatctgcactttcggaacaagcaaaccaaaggagtgtttttattccttatcgtgaatctgttcttacatggctgttaaaagaaagtctgggtggaaattcaaaaactgcaatgattgctacgattagtcccgctgccagcaacatagaagaaacattaagcacacttagatatgctaaccaagcccgtttaatagtcaacattgctaaagtaaatgaagatatgaacgctaagttaattagagaattgaaggcagaaattgcaaagctaaaagctgctcagagaaacagtcggaatattgaccctgaacgatacaggctctgtcggcaagaaataacatccttaagaatgaaactgcatcaacaggagagagacatggcagaaatgcaaagagtgtggaaagaaaagtttgaacaagctgaaaaaagaaaacttcaagaaacaaaagagttacagaaagcaggaattatgtttcaaatggacaatcatttaccaaaccttgttaatctgaatgaagatccacaactatctgagatgctgctatatatgataaaagaaggaacaactacagttggaaagtataaaccaaactcaagccatgatattcagttatctggggtgctgattgctgatgatcattgtactatcaaaaattttggtgggacagtgagtattatcccagttggggaagcaaagacatatgtaaatggaaaacatattttggaaatcacagtattacgtcatggtgatcgagtgattcttggtggagatcattattttagatttaatcatccagtagaagtccagaaaggaaaaaggccatctggaagagatactcctataagtgagggtccaaaagactttgaatttgcaaaaaatgagttgctcatggcacagagatcacaacttgaagcagaaataaaagaggctcagttgaaggcaaaggaagaaatgatgcaaggaatccagattgcaaaagaaatggctcagcaagagctttcttctcaaaaagctgcatatgaaagcaaaataaaagcactggaagcagaactgagagaagagtctcaaaggaaaaaaatgcaggaaataaataaccagaaggctaatcacaaaattgaggaattagaaaaggcaaagcagcatcttgaacaggaaatatatgtcaacaaaaagcgattagaaatggaaacattggctacaaaacaggctttagaagaccatagcatccgccatgcaagaattctggaagctttagaaactgaaaagcaaaaaattgctaaagaagtacaaattctacagcagaatcggaataatagggataaaacttttacagtgcagacaacttggagctctatgaaactctcaatgatgattcaggaagccaatgctatcagcagcaaattgaaaacatactatgtttttggcagacatgatatatcagataaaagtagttctgacacttctattcgggttcgtaacctgaaactaggaatctcaacattctggagtctggaaaagtttgaatctaaacttgcagcaatgaaagaactttatgagagtaatggtagtaacaggggtgaagatgccttttgtgatcctgaagatgaatgggaacccgacattacagatgcaccagtttcttcactttctagaaggaggagtaggagtttgatgaagaacagaagaatttctggttgtttacatgacatacaagtccatccaattaagaatttgcattcttcacattcatcaggtttaatggacaaatcaagcactatttactcaaattcagcagagtcctttcttcctggaatttgcaaagaattgattggttcttcgttagatttttttggacagagttatgatgaagaaagaactatagcagacagcctaattaatagttttcttaaaatttataatgggctatttgccatttccaaggctcatgaagaacaagatgaagaaagtcaagataacttgttttcttctgatcgagcaatccagtcacttactattcagactgcatgtgcttttgagcagctagtagtgctaatgaaacactggctgagtgatttactgccttgtaccaacatagcaagacttgaggatgagttgagacaagaagttaaaaaactgggaggctacttacagttatttttgcagggatgctgtttggatatttcatcaatgataaaagaggctcaaaagaatgcaatccaaattgtacaacaagctgtaaagtatgtggggcagttagcagttctgaaagggagcaagctacattttctagaaaacggtaacaataaagctgccagtgtccaggaggaattcatggatgctgtttgtgatggtgtaggcttaggaatgaagattttattagattctggactggaaaaagcaaaagaacttcagcatgaactctttaggcagtgtacaaaaaatgaggttaccaaagaaatgaaaactaatgccatgggattgattagatctcttgaaaacatctttgctgaatcgaaaattaaaagtttcagaaggcaagtacaagaagaaaactttgaataccaagatttcaagaggatggttaatcgtgctccagaattcttaaagttaaaacattgcttagagaaagctattgaaattattatttctgcactgaaaggatgccatagtgatataaatcttctccagacttgtgttgaaagtattcgcaacttggccagtgatttttacagtgacttcagtgtgccttctacttctgttggcagctatgagagtagagtaactcacattgtccaccaggaactagaatctctagctaagtctctcctcttttgttttgaatctgaagaaagccctgatttgttgaaaccctgggaaacttataatcaaaataccaaagaagaacaccaacaatctaaatcaagcgggattgacggcagtaagaataaaggtgtaccaaagcgtgtctatgagctccatggctcatccccagcagtgagctcagaggaatgcacacccagtaggattcagtgggtgtgaatactgatgtgtaggcacttttatgaccacccatgaaagaaaaagaacacttgctcggtaattttctttatgcaggagagtttaagagaaatcagcacagatatttcaaaaaagtccatgtctttttatctttaaaatatctatttatcaaaggccagacacagtggctcacgcctgtaatcccagcactttgggaggcgggcagatcacaaggtcaggagtttgagaccggcctggccaacatggcgaaaccccgtctctactaaaaatacaaaaatttgctgggcatggtggcgcgtgcctgtaatcccagctactaggggggctgaggcaggaggatcgcttgaacctgagaggcagaggttgcagtgagccaagatcatgccactttactccagtctgagcaacagaacgagacttagtcaaaataaataaataaataaataaataaataaataaataaataaataaaatatatttttatctttaaagtgtttaacattggtatactgtctgtagttggttcattagtcgtttataaagggttattttctcatgagtggaaacctgaacaatcagttacctttgtgcctatgccttctctctcctcagacagctgggatgtttatggtgaaatggcctgtacaagtttaactaagacaacttaacttgcattgttaatcaaaaattcttttctcaaagggttaactggttgccattttgaatagtatgttcaagggtgtagcttcctgtttctttccaaattataagtagctacctaaatatagtataattatatattaataatatggcttgctggcacagtagtttaccctgttatctgtgtttcataatgggggctgtatgaatattatttaaaactaataaaatgttgccagaattatactaaactgttggatgagattaggagatcagaggctggaccttctcttgataatgcttgttttgttaaaggtataatgaaataatttgtatatgatttgatgaagattaaagacccttattttccacagctttaaaaaaaaacctttatttatgatcaagtaataaagataatattctacttgtgggatcttacattacggaaatagtttgacgtttttgacctcaagagtatgtataatttgaagagatactttgtaactatgcttgggtgatattgagcagttcctaaagaataattcatttaaaaaaaaagaagaaaaaaaaagaagaattcatttaaataacctgatcctttcatttgcccttttcgaatttacagatactacttgtacatttggcataactagttgaaattggccattcgtaccatgaataaatctgatagtttccttgttaggaagagattgtaagtaaatacagtcattgcagtcagaacagtattagtgaaccttgtgtggtgttttcaagctctttaaaatggtacaatgtagcacatttgctttcatttctttttttatttttggcatttgaccttgtattctttctgaagctctatatgtgtttttattagtcaataatctggcaagtagcactttgcctgtgcagtttgctggagtgtagatgtacatatgaggatttcccgggaggtgcacttctttgaagaacttcctaaagtacctgtatagtagttttcatcttaatattcagtatttaatcttcagtttgtgctttgtaaactcatgacttaattggtcagaaactttttagtgtctttataaaattttgtatacatatttatactaaacacattgtgatactgtatttgaatgaatggtgaaaaaatatttgctattggaattatgtgcactgacaagaaatgttataaagagaatgcctttaataaatcttttcagcattagaa

SEQ ID NO: 182793 - DNA, 4947 bp, Artificial Sequence
  derived and/or modified sequence
atgagcctgcacagcacccacaacagaaacaacagcggggacatcctggacatccccagcagccagaacagcagcagcctgaatgccctgacccacagcagccggctgaagctgcacctgaagagtgacatgtctgaatgtgaaaatgatgaccccctgctgcggtctgctgggaaggtgcgggacatcaacagaacctacgtgatcagcgccagcaggaagacagctgacatgcccctgacccccaaccctgtgggccgcctggccctgcagaggaggaccaccaggaacaaggagagcagcctgctggtgtctgagctggaggacaccacagagaagacagctgagacccggctgaccctgcagaggcgggccaagacagattctgctgagaagtggaagacagctgagattgacagcgtgaagatgaccctgaatgtgggcggggagacagagaacaacggggtgtccaaggagagcaggaccaacgtgcgcatcgtgaacaatgccaagaacagctttgtggccagctctgtgcccctggatgaggacccccaggtgattgagatgatggctgacaagaagtacaaggagaccttcagcgcccccagccgggccaatgaaaatgtggccctgaagtacagcagcaacagaccacccatcgccagcctgagccagacagaggtggtgcgcagcggccacctgaccaccaagcccacccagagcaagctggacatcaaggtgctgggcactggaaacctgtaccacaggagcatcggcaaggagatcgccaagaccagcaacaagtttggcagcctggagaagaggacccccaccaagtgcaccacagagcacaagctgaccaccaagtgcagcctgccccagctgaagagccctgcccccagcatcctgaagaacaggatgagcaacctgcaggtgaagcagaggcccaagagcagcttcctggccaacaagcaggagaggtctgctgagaacaccatcctgcctgaggaggagaccgtggtgcagaacaccagcgctgggaaggaccccctgaaggtggagaacagccaggtgacagtggccgtgcgggtgcggcccttcaccaagcgggagaagattgagaaggccagccaggtggtgttcatgtctgggaaggagatcaccgtggagcacccagacaccaagcaggtgtacaacttcatctatgatgtgtccttctggagctttgatgagtgccacccccactacgccagccagaccaccgtgtatgagaagctggccgcccccctgctggagcgggcctttgagggcttcaacacctgcctgtttgcctacggccagacaggcagcggcaagagctacaccatgatgggcttcagcgaggagcccggcatcatcccccgcttctgtgaggacctcttcagccaggtggccaggaagcagacccaggaggtgtcctaccacatcgagatgtccttctttgaggtgtacaatgagaagatccatgacctgctggtgtgcaaggatgaaaatggccagaggaagcagcccctgcgggtgcgggagcaccctgtgtatggcccctacgtggaggccctgtccatgaacatcgtgtcctcctatgctgacatccagagctggctggagctgggcaacaagcagagggccacagctgccaccggcatgaatgacaagagcagccgcagccacagcgtcttcaccctggtgatgacccagaccaagacagaatttgtggagggggaggagcatgaccaccgcatcaccagccgcatcaacctgattgacctggccggcagcgagcgctgcagcacagcccacaccaacggggaccggctgaaggagggcgtgtccatcaacaagagcctgctgaccctgggcaaggtgatcagcgccctgtctgagcaggccaaccagaggagcgtcttcatcccctaccgggagagcgtgctgacctggctgctgaaggagagcctgggcggcaacagcaagacagccatgattgccaccatcagccctgctgccagcaacatcgaggagaccctgagcaccctgcgctatgccaaccaggcccggctgattgtgaacatcgccaaggtgaatgaagacatgaatgccaagctgatccgggagctgaaggccgagatcgccaagctgaaggccgcccagaggaacagcaggaacatcgaccctgagcgctaccgcctgtgccggcaggagatcaccagcctgaggatgaagctgcaccagcaggagcgggacatggccgagatgcagagggtgtggaaggagaagtttgagcaggccgagaagaggaagctgcaggagaccaaggagctgcagaaggccggcatcatgttccagatggacaaccacctgcccaacctggtgaacctgaatgaagacccccagctgtctgagatgctgctgtacatgatcaaggagggcaccaccaccgtgggcaagtacaagcccaacagcagccatgacatccagctgtctggagtgctgattgctgatgaccactgcaccatcaagaactttggaggcaccgtgtccatcatccctgtgggggaggccaagacctacgtgaatggcaagcacatcctggagatcaccgtgctgcggcacggggacagagtcatcctgggcggggaccactacttccgcttcaaccaccctgtggaggtgcagaagggcaagaggccttctggccgggacacccccatcagcgagggccccaaggactttgaatttgccaagaatgagctgctgatggcccagaggagccagctggaggccgagatcaaggaggcccagctgaaggccaaggaggagatgatgcagggcatccagatcgccaaggagatggcccagcaggagctgagcagccagaaggccgcctatgagagcaagatcaaggccctggaggccgagctgcgggaggagagccagaggaagaagatgcaggagatcaacaaccagaaggccaaccacaagattgaggagctggagaaggccaagcagcacctggagcaggagatctacgtgaacaagaagaggctggagatggagaccctggccaccaagcaggccctggaggaccacagcatcagacatgcccgcatcctggaggccctggagacagagaagcagaagatcgccaaggaggtgcagatcctgcagcagaacagaaacaacagagacaagaccttcaccgtgcagaccacctggagctccatgaagctgtccatgatgatccaggaggccaatgccatcagcagcaagctgaagacctactacgtgtttggaagacatgacatcagtgacaagagcagcagtgacaccagcatccgggtgaggaacctgaagctgggcatcagcaccttctggagcctggagaagtttgagagcaagctggccgccatgaaggagctgtatgagagcaatggcagcaacagaggagaagatgccttctgtgaccctgaagatgagtgggagccagacatcacagatgcccctgtgagcagcctgagcagaagaagaagccgcagcctgatgaagaacagacgcatcagcggctgcctgcatgacatccaggtgcaccccatcaagaacctgcacagcagccacagcagcggcctgatggacaagagcagcaccatctacagcaacagcgctgagagcttcctgcccggcatctgcaaggagctgattggcagcagcctggacttcttcggccagagctatgatgaggagaggaccatcgctgacagcctcatcaacagcttcctgaagatctacaacggcctgtttgccatcagcaaggcccacgaggagcaggatgaggagagccaggacaacctcttcagcagtgaccgggccatccagagcctgaccatccagacagcctgtgcctttgagcagctggtggtgctgatgaagcactggctgagtgacctgctgccctgcaccaacatcgcccggctggaggatgagctgcggcaggaggtgaagaagctgggcggctacctgcagctgttcctgcagggctgctgcctggacatcagctccatgatcaaggaggcccagaagaatgccatccagatcgtgcagcaggccgtgaagtatgtgggccagctggccgtgctgaagggcagcaagctgcacttcctggagaatggaaacaacaaggccgcctctgtgcaggaggagttcatggatgctgtgtgtgatggagtgggcctgggcatgaagatcctgctggacagcggcctggagaaggccaaggagctgcagcacgagctgttccggcagtgcaccaagaatgaggtgaccaaggagatgaagaccaatgccatgggcctcatccgcagcctggagaacatctttgctgagagcaagatcaagagcttccggcggcaggtgcaggaggagaactttgagtaccaggacttcaagaggatggtgaacagagcccctgagttcctgaagctgaagcactgcctggagaaggccatcgagatcatcatcagcgccctgaagggctgccacagcgacatcaacctgctgcagacctgtgtggagagcatccggaacctggccagtgacttctacagcgacttctctgtgcccagcacctctgtgggcagctatgagagccgggtgacccacatcgtgcaccaggagctggagagcctggccaagagcctgctcttctgctttgagagcgaggagagcccagacctgctgaagccctgggagacctacaaccagaacaccaaggaggagcaccagcagagcaagagcagcggcattgatggcagcaagaacaagggcgtgcccaagagggtgtatgagctgcacggcagcagccctgctgtgtccagtgaagaatgtacccccagccgcatccagtgggtgtag

SEQ ID NO: 182794 - DNA, 4947 bp, Artificial Sequence
  derived and/or modified sequence
atgagcctgcacagcacccacaaccggaacaacagcggcgacatcctggacatccctagcagccagaactctagcagcttgaatgctttgacacactcctcccgcctcaaactccacctgaagtctgacatgagtgaatgtgagaacgatgacccactgctgagaagcgctggtaaggttcgggatattaaccgtacatatgtgatctctgcctcccgcaagacagcagacatgccgctgacaccaaaccccgtgggacgccttgctctgcaaagacgaacaacacggaacaaagaatcctctctgctcgttagcgaactggaagacaccaccgagaagaccgccgagacacgtctgaccctacagcgacgcgccaaaaccgactcagccgagaagtggaagaccgccgagattgatagcgtgaaaatgacactcaacgtcggcggtgagacggagaacaatggggtcagtaaggaaagcaggactaacgtgcgaattgtgaacaacgctaaaaatagcttcgtggcaagctctgtacctctagatgaagacccacaagtcatcgagatgatggctgataaaaaatacaaggagacttttagcgcacccagccgagcgaatgaaaatgtggctctgaaatattctagcaatcgccctcctatagcctcactctctcagacggaggtggtaagaagcggccatctgactactaagcccactcagtccaagctggacattaaagtccttgggactggaaacctttaccaccggtctatcggcaaagagattgctaagaccagtaataagtttggtagcttggaaaaacgaacccctaccaagtgtaccaccgaacacaagctgaccacaaaatgctcactaccacaactgaaaagccctgccccctccattctgaagaatcggatgtccaacctccaggttaagcagcgcccaaagtcgagctttctggccaacaaacaggaacgctctgcagagaatactatccttcccgaggaggaaactgtggtccagaacaccagcgcaggcaaagatcccctgaaagtggaaaattcccaggtcactgtggccgtgagggttaggcctttcactaagagagagaaaattgaaaaggccagtcaagtagtttttatgagcgggaaggagatcaccgtggaacaccccgatacgaagcaggtgtacaatttcatttacgacgtatctttctggtccttcgacgaatgccaccctcactatgccagtcaaactaccgtctacgagaagctggccgcaccactcctcgagcgggcattcgaaggatttaatacatgtctcttcgcatatgggcagacgggctccggcaagagttacactatgatgggtttttctgaggaacctggaattattccccggttttgcgaagatctgttttctcaggtcgcacggaagcagacccaggaagtgtcttatcatattgagatgagtttctttgaggtgtacaatgaaaaaatacacgatctgctggtatgcaaggacgaaaacggccagcgaaaacagccactgcgggtgagggaacaccctgtatacggaccctatgtggaagctctttcaatgaacatagtctcatcttatgctgatatccagagttggctcgagctcggcaacaagcagcgcgcaactgccgctacagggatgaatgacaaaagcagccggtcacatagcgtgttcactctagttatgacacaaacgaaaacagagttcgtggaaggagaagaacatgatcaccggatcacatcgaggattaacttgatcgatctggcaggatccgaaaggtgcagtactgcccacacgaatggagatcgcctcaaagaaggtgtctctatcaataaatctctgctgaccctcggcaaggttattagcgccctaagcgaacaggcaaaccagagatcagtgttcattccttaccgggagagcgtcttgacttggcttctgaaggagtctcttggtgggaacagtaaaacggctatgatagccacaatatccccagcagcgtcaaacatcgaagagaccctctctactctcagatatgctaatcaggccaggcttatcgtcaatattgcaaaggttaatgaagatatgaatgcgaaactgattcgggagttgaaggcagagatcgcaaaattaaaagcagcccaacggaattctaggaacatcgatccagagcgctaccgactttgtcggcaagagataacctctctcagaatgaagctgcaccagcaggagagggatatggcagagatgcagcgggtgtggaaggaaaagtttgaacaggccgagaagagaaagctacaagagaccaaagaacttcagaaagccggaatcatgttccaaatggataaccatctgcccaacctggtcaatctgaatgaagatccccagctcagcgagatgctgttatatatgatcaaggaaggcactacaaccgtcggcaagtacaaacctaactccagccacgatatccagttgagcggggtgttgattgcggatgaccattgtacgattaaaaacttcggtggcaccgttagcatcatcccagtgggagaggctaagacatatgtcaacggaaaacatatcctggagatcactgtcctacgtcacggcgatagggtcattcttggaggggaccactactttcggtttaaccatcctgtcgaagtgcagaaggggaagcgccctagtggacgggacacaccaatatctgagggccctaaagacttcgaatttgctaagaacgaactcctgatggcgcaacgcagccagctggaggccgagatcaaagaagcacaattgaaggcgaaggaggagatgatgcagggcatacagatcgcgaaagagatggctcagcaggaactatcttcacagaaggcggcttatgaatccaagatcaaagccctggaagcggaactcagagaggaaagtcaacgtaagaagatgcaggagatcaataatcaaaaagcgaaccacaaaattgaggagttagaaaaggccaagcaacatctggagcaggaaatatatgttaataaaaaaaggctcgaaatggaaacgcttgctaccaagcaagccctggaggatcattctatccgacacgccagaattctggaggctctggaaacggaaaagcagaaaatagcgaaggaagtccagatcttgcaacagaacagaaacaatagagacaagacgttcacagtgcaaaccacctggagctcaatgaagctgtctatgatgattcaggaagccaatgccatcagtagtaagctgaagacatactacgtctttgggcgccacgacatttcagataagtcttctagcgatacttccattagagtccgaaacctgaaactgggcatctcaaccttttggtccctcgaaaagtttgagtccaagcttgctgccatgaaggagttgtacgagtccaatgggagcaaccgtggtgaggatgctttttgcgaccccgaggacgagtgggagcccgacattaccgacgcccccgtttcaagcctgagccggaggcgctccaggtccttaatgaagaatcgcagaatctcaggctgtctgcatgatatacaagtacatccaatcaagaatctgcactcctctcatagctcaggccttatggataagtcttccacgatttattctaacagcgccgagtctttcctgcctggcatttgcaaggaacttatcgggagtagcctcgactttttcggccagtcatacgatgaggaacgcacaatagccgactccctgatcaatagctttttaaagatttacaatggactgttcgctatctcgaaggcgcacgaggaacaagacgaggagtcccaagataacctcttctctagtgaccgtgctatccagtcactcacaattcagaccgcatgcgctttcgagcaactggttgtgctaatgaagcattggttatcggatctcctcccatgcaccaacatcgccaggcttgaagatgagctgcgccaggaagtaaagaagttgggtggctatctccagttgtttctgcagggatgctgcctggatatcagctcaatgataaaagaagctcaaaagaatgccattcagatcgtgcagcaggccgttaagtatgtcggacaactggcagtgttaaagggcagtaaactgcactttctggagaacggtaataacaaggctgctagcgtacaggaggaattcatggacgcagtatgcgatggagtgggccttgggatgaaaatcctgcttgactctggactggagaaagccaaggagctgcagcatgagctcttccgccagtgcactaaaaacgaagttacaaaagaaatgaagacgaatgctatggggcttatacggagcctggagaacatcttcgctgaatctaaaatcaagagcttcaggcgtcaagtccaggaagaaaacttcgaatatcaagatttcaaacggatggtcaacagggcaccagaattccttaaactaaaacattgcctggagaaagcaattgagattatcatcagtgcccttaagggttgtcacagtgacatcaatttgttgcaaacctgcgtggagtcgatacgcaacctcgcttcagatttttatagtgacttcagtgtgccaagcacttcggtgggtagttatgagagccgggtgacacatatcgttcaccaggagctcgaaagcctggccaagtctttgttattttgtttcgagtcagaggagtcacccgatctgctcaagccttgggagacctataaccaaaacaccaaggaagagcaccagcagtccaaaagcagcgggatagacggcagcaagaataagggcgttcccaaacgggtgtatgagctacacggttctagcccagctgtgtcctcggaggagtgcaccccatctaggatccagtgggtttag

SEQ ID NO: 182795 - DNA, 4946 bp, Artificial Sequence
  derived and/or modified sequence
atgagcttgcactctacgcacaataggaacaatagtggcgacatcctggacattccctcatctcagaacagctcatcgctaaacgcactcacacacagctcccgcctcaagttacatttaaaatccgacatgtctgagtgcgagaatgatgacccgctgttgcgctctgctgggaaggtgcgggacataaacagaacatatgtgatcagcgccagccggaagacggccgatatgccccttactccaaaccctgttggacgcttggccctgcagcgtcgaactacacggaataaggagtcatccctattagtatcagagttagaagacaccacagagaagaccgcggagacgcgacttacgctgcagaggcgagcgaaaaccgattccgctgagaaatggaaaacggccgagatcgatagtgttaaaatgactctgaatgtcgggggtgaaacggagaataacggagtgagtaaagagagtcggaccaacgtgaggattgtgaataatgccaagaattcgttcgtggcctcctcagttcccttagacgaggaccctcaagttatagaaatgatggcagataagaagtacaaagaaacattttctgccccaagtagagcgaatgagaatgtggctctcaagtatagcagtaataggccaccgattgcaagcttaagccagacagaagtagtgaggagtgggcacctgaccaccaaaccaacgcagagcaagcttgacattaaagttcttgggacaggtaatttgtaccaccggagcatagggaaggaaattgcaaagacctcaaacaaatttggtagtctcgaaaagaggaccccaaccaaatgcactacagagcacaaactgactaccaaatgcagcttgcctcagctcaagtctcctgccccttccattctgaagaacaggatgagcaatctgcaggtaaaacaaagacccaagagcagcttcctcgccaacaaacaggaacggtcagctgaaaacactattcttcccgaagaggaaactgtcgtgcaaaacacatctgccggaaaagatcccttgaaggtggaaaactcacaggttacagtggctgtacgcgtgcgtcccttcacaaaacgcgagaagattgaaaaagcttctcaggtagtgttcatgtctggcaaagagatcacagtggagcacccagacaccaagcaggtatacaactttatctacgacgtgtccttttggagcttcgatgagtgccatccccattatgcttctcaaacgactgtatacgaaaagttagctgcacctctcctggagagagctttcgagggctttaatacttgtctctttgcatatggacaaacagggagtggcaagtcgtatacaatgatgggatttagtgaggagcccggaataatccccaggttctgcgaagatctgttctctcaggtcgcccgtaagcaaacgcaagaagtctcataccacatcgaaatgagcttcttcgaagtctacaatgaaaagatccatgatctcctggtgtgcaaggatgaaaacggacagaggaaacaacctctcagagtgcgagaacatcccgtctatggcccttatgtagaagccctctccatgaacattgtgagctcttacgctgacatccagtcatggttggaacttggaaataagcaacgagccacggccgcaaccgggatgaacgacaagagctccagaagccactccgtcttcaccctggtcatgacacaaacaaagacagagtttgtggagggggaagagcatgaccatagaattactagccgaataaatcttatagacttagccggatccgagagatgctccaccgcacataccaatggtgaccgtctaaaggagggtgttagtattaataaatcattattgacactaggaaaagtaatctccgcactgtctgagcaggccaatcagcgcagcgtattcattccttaccgggagtcggtccttacgtggctgttgaaagagtctcttggaggtaactcaaaaaccgctatgatcgcaaccatttcccctgccgcatctaatattgaggaaacattgtctaccctccggtatgccaaccaggcccgactgatcgttaatattgcgaaggttaacgaggatatgaatgccaaactgattagggaactcaaagccgagattgcaaagctcaaagccgctcaaaggaactcacgaaatatcgatccagaacgctataggctatgtagacaggagattacgagtctccggatgaagctccatcagcaagagagagacatggctgaaatgcagagagtgtggaaggagaaatttgaacaagcagagaagaggaaattacaggagaccaaggagctgcaaaaagctgggatcatgttccaaatggacaatcacctgccgaatctcgtgaatctgaacgaggatccacagttgagtgagatgctgctgtacatgattaaggaggggaccacgactgtaggcaagtacaagcctaactcatcgcacgacatccaactgagcggcgtgctgattgcagacgaccattgcactatcaagaacttcgggggtaccgtgtccataatcccagtgggggaggctaaaacttatgtcaatggtaagcatatcctggaaatcactgtgctgaggcatggggacagggtgatcttgggtggtgatcactacttcaggtttaatcaccccgtggaggtacaaaagggaaaacgtccctcaggaagggacacaccaatcagtgagggaccaaaagatttcgaattcgcgaaaaacgagctcttgatggcccagcggtctcaacttgaagctgagatcaaggaggcccagctcaaagcgaaggaggagatgatgcaggggattcagatagctaaggaaatggcccagcaggaactgtcatcacagaaagccgcatacgagagcaaaatcaaagctctcgaggccgaactgagagaggaaagccagcgcaagaaaatgcaggagatcaacaatcagaaagcgaaccacaagatcgaggagttagagaaggctaaacaacatctggagcaggaaatctacgtaaataaaaagagactggagatggaaacactcgctactaagcaggccctggaggatcactcaatcaggcacgccaggatcctggaggcattagagacagagaagcagaagattgcaaaagaagtccagattttacagcagaaccgtaacaatagagacaagacatttactgtgcagaccacttggagctccatgaaactcagtatgatgattcaggaggcaaacgctatctctagtaagttaaagacatactacgtttttgggagacatgatatttccgacaagtcgagtagcgacacttccattcgagtccgcaacctgaagctgggcatttcaacattttggtctctggaaaagttcgaaagcaagctggcagccatgaaagagttgtacgaatctaatggaagcaaccggggagaggatgcattttgcgatcccgaggatgaatgggagcctgacattaccgatgcccctgtgagctcactttccagaaggcgatctcgatccctcatgaagaatagaaggataagcggttgcctgcatgacattcaggttcaccctatcaagaatttgcatagtagtcactcctccgggctgatggacaagagcagcaccatatatagcaatagcgctgaaagctttctgcccggtatttgcaaagagctcattggaagctcccttgatttttttggacagtcgtacgatgaggaacgaaccattgctgattcactcatcaattctttcctgaagatttataacggcctctttgcaataagtaaggcccatgaagagcaggatgaagagtcgcaggataacctgttttccagcgatcgggcaatccaatccctcaccatccagacggcctgcgctttcgaacagctggtcgtcctgatgaagcactggctgtctgatcttctgccatgtaccaacattgcccgacttgaggacgagctgaggcaggaagtcaaaaaactcgggggatatttgcaactattccttcagggatgctgtctcgatattagttctatgatcaaggaggcacaaaaaaatgcaattcagatagtgcagcaggcagtgaaatacgtgggccagctcgcagtcctgaaaggatccaagcttcacttcctggaaaacgggaataacaaggccgcttcagttcaagaggagttcatggatgcagtctgtgacggggtcggcctagggatgaagatcctattggattccgggttggaaaaggccaaagaacttcagcacgaacttttccggcagtgcaccaaaaatgaggttactaaggagatgaaaaccaacgccatggggctaatccgctctctggaaaacatcttcgccgagagtaaaattaagtcatttcggcgacaagtccaggaagaaaattttgagtaccaggatttcaagagaatggttaacagagcacctgagttcctgaagcttaagcactgcttggaaaaggccattgagataataatttcagcactcaaggggtgccactctgacattaacctgctgcaaacgtgcgtggagagcatacgcaatctggcgagcgacttctacagcgacttctccgtgccaagcacttccgtgggcagttatgaatctcgggtgactcacattgttcatcaagagctggagagcctggccaagagtctgcttttctgctttgaatcagaagaaagccctgacctgcttaagccgtgggagacttacaaccaaaatactaaggaggaacatcagcagtccaagtcaagcggaatcgatggctctaaaaataaaggcgtacctaagagagtctacgagctgcacggaagtagtcctgccgtatcatccgaggagtgtaccccatctcggattcaatgggttta

SEQ ID NO: 182796 - DNA, 4947 bp, Artificial Sequence
  derived and/or modified sequence
atgagcctgcacagcacccacaacagaaacaacagcggcgacatcctggacatccccagcagccagaacagcagcagcctgaacgccctgacccacagcagcagactgaagctgcacctgaagagcgacatgagcgagtgcgagaacgacgaccccctgctgagaagcgccggcaaggtgagagacatcaacagaacctacgtgatcagcgccagcagaaagaccgccgacatgcccctgacccccaaccccgtgggcagactggccctgcagagaagaaccaccagaaacaaggagagcagcctgctggtgagcgagctggaggacaccaccgagaagaccgccgagaccagactgaccctgcagagaagagccaagaccgacagcgccgagaagtggaagaccgccgagatcgacagcgtgaagatgaccctgaacgtgggcggcgagaccgagaacaacggcgtgagcaaggagagcagaaccaacgtgagaatcgtgaacaacgccaagaacagcttcgtggccagcagcgtgcccctggacgaggacccccaggtgatcgagatgatggccgacaagaagtacaaggagaccttcagcgcccccagcagagccaacgagaacgtggccctgaagtacagcagcaacagaccccccatcgccagcctgagccagaccgaggtggtgagaagcggccacctgaccaccaagcccacccagagcaagctggacatcaaggtgctgggcaccggcaacctgtaccacagaagcatcggcaaggagatcgccaagaccagcaacaagttcggcagcctggagaagagaacccccaccaagtgcaccaccgagcacaagctgaccaccaagtgcagcctgccccagctgaagagccccgcccccagcatcctgaagaacagaatgagcaacctgcaggtgaagcagagacccaagagcagcttcctggccaacaagcaggagagaagcgccgagaacaccatcctgcccgaggaggagaccgtggtgcagaacaccagcgccggcaaggaccccctgaaggtggagaacagccaggtgaccgtggccgtgagagtgagacccttcaccaagagagagaagatcgagaaggccagccaggtggtgttcatgagcggcaaggagatcaccgtggagcaccccgacaccaagcaggtgtacaacttcatctacgacgtgagcttctggagcttcgacgagtgccacccccactacgccagccagaccaccgtgtacgagaagctggccgcccccctgctggagagagccttcgagggcttcaacacctgcctgttcgcctacggccagaccggcagcggcaagagctacaccatgatgggcttcagcgaggagcccggcatcatccccagattctgcgaggacctgttcagccaggtggccagaaagcagacccaggaggtgagctaccacatcgagatgagcttcttcgaggtgtacaacgagaagatccacgacctgctggtgtgcaaggacgagaacggccagagaaagcagcccctgagagtgagagagcaccccgtgtacggcccctacgtggaggccctgagcatgaacatcgtgagcagctacgccgacatccagagctggctggagctgggcaacaagcagagagccaccgccgccaccggcatgaacgacaagagcagcagaagccacagcgtgttcaccctggtgatgacccagaccaagaccgagttcgtggagggcgaggagcacgaccacagaatcaccagcagaatcaacctgatcgacctggccggcagcgagagatgcagcaccgcccacaccaacggcgacagactgaaggagggcgtgagcatcaacaagagcctgctgaccctgggcaaggtgatcagcgccctgagcgagcaggccaaccagagaagcgtgttcatcccctacagagagagcgtgctgacctggctgctgaaggagagcctgggcggcaacagcaagaccgccatgatcgccaccatcagccccgccgccagcaacatcgaggagaccctgagcaccctgagatacgccaaccaggccagactgatcgtgaacatcgccaaggtgaacgaggacatgaacgccaagctgatcagagagctgaaggccgagatcgccaagctgaaggccgcccagagaaacagcagaaacatcgaccccgagagatacagactgtgcagacaggagatcaccagcctgagaatgaagctgcaccagcaggagagagacatggccgagatgcagagagtgtggaaggagaagttcgagcaggccgagaagagaaagctgcaggagaccaaggagctgcagaaggccggcatcatgttccagatggacaaccacctgcccaacctggtgaacctgaacgaggacccccagctgagcgagatgctgctgtacatgatcaaggagggcaccaccaccgtgggcaagtacaagcccaacagcagccacgacatccagctgagcggcgtgctgatcgccgacgaccactgcaccatcaagaacttcggcggcaccgtgagcatcatccccgtgggcgaggccaagacctacgtgaacggcaagcacatcctggagatcaccgtgctgagacacggcgacagagtgatcctgggcggcgaccactacttcagattcaaccaccccgtggaggtgcagaagggcaagagacccagcggcagagacacccccatcagcgagggccccaaggacttcgagttcgccaagaacgagctgctgatggcccagagaagccagctggaggccgagatcaaggaggcccagctgaaggccaaggaggagatgatgcagggcatccagatcgccaaggagatggcccagcaggagctgagcagccagaaggccgcctacgagagcaagatcaaggccctggaggccgagctgagagaggagagccagagaaagaagatgcaggagatcaacaaccagaaggccaaccacaagatcgaggagctggagaaggccaagcagcacctggagcaggagatctacgtgaacaagaagagactggagatggagaccctggccaccaagcaggccctggaggaccacagcatcagacacgccagaatcctggaggccctggagaccgagaagcagaagatcgccaaggaggtgcagatcctgcagcagaacagaaacaacagagacaagaccttcaccgtgcagaccacctggagcagcatgaagctgagcatgatgatccaggaggccaacgccatcagcagcaagctgaagacctactacgtgttcggcagacacgacatcagcgacaagagcagcagcgacaccagcatcagagtgagaaacctgaagctgggcatcagcaccttctggagcctggagaagttcgagagcaagctggccgccatgaaggagctgtacgagagcaacggcagcaacagaggcgaggacgccttctgcgaccccgaggacgagtgggagcccgacatcaccgacgcccccgtgagcagcctgagcagaagaagaagcagaagcctgatgaagaacagaagaatcagcggctgcctgcacgacatccaggtgcaccccatcaagaacctgcacagcagccacagcagcggcctgatggacaagagcagcaccatctacagcaacagcgccgagagcttcctgcccggcatctgcaaggagctgatcggcagcagcctggacttcttcggccagagctacgacgaggagagaaccatcgccgacagcctgatcaacagcttcctgaagatctacaacggcctgttcgccatcagcaaggcccacgaggagcaggacgaggagagccaggacaacctgttcagcagcgacagagccatccagagcctgaccatccagaccgcctgcgccttcgagcagctggtggtgctgatgaagcactggctgagcgacctgctgccctgcaccaacatcgccagactggaggacgagctgagacaggaggtgaagaagctgggcggctacctgcagctgttcctgcagggctgctgcctggacatcagcagcatgatcaaggaggcccagaagaacgccatccagatcgtgcagcaggccgtgaagtacgtgggccagctggccgtgctgaagggcagcaagctgcacttcctggagaacggcaacaacaaggccgccagcgtgcaggaggagttcatggacgccgtgtgcgacggcgtgggcctgggcatgaagatcctgctggacagcggcctggagaaggccaaggagctgcagcacgagctgttcagacagtgcaccaagaacgaggtgaccaaggagatgaagaccaacgccatgggcctgatcagaagcctggagaacatcttcgccgagagcaagatcaagagcttcagaagacaggtgcaggaggagaacttcgagtaccaggacttcaagagaatggtgaacagagcccccgagttcctgaagctgaagcactgcctggagaaggccatcgagatcatcatcagcgccctgaagggctgccacagcgacatcaacctgctgcagacctgcgtggagagcatcagaaacctggccagcgacttctacagcgacttcagcgtgcccagcaccagcgtgggcagctacgagagcagagtgacccacatcgtgcaccaggagctggagagcctggccaagagcctgctgttctgcttcgagagcgaggagagccccgacctgctgaagccctgggagacctacaaccagaacaccaaggaggagcaccagcagagcaagagcagcggcatcgacggcagcaagaacaagggcgtgcccaagagagtgtacgagctgcacggcagcagccccgccgtgagcagcgaggagtgcacccccagcagaatccagtgggtgtag

SEQ ID NO: 182797 - protein, 1942 aa, Artificial Sequence
  derived and/or modified sequence
MEDRRAEKSCEQACESLKRQDYEMALKHCTEALLSLGQYSMADFTGPCPLEIERIKIESLLYRIASFLQLKNYVQADEDCRHVLGEGLAKGEDAFRAVLCCMQLKGKLQPVSTILAKSLTGESLNGMVTKDLTRLKTLLSETETATSNALSGYHVEDLDEGSCNGWHFRPPPRGITSSEEYTLCKRFLEQGICRYGAQCTSAHSQEELAEWQKRYASRLIKLKQQNENKQLSGSYMETLIEKWMNSLSPEKVLSECIEGVKVEHNPDLSVTVSTKKSHQTWTFALTCKPARMLYRVALLYDAHRPHFSIIAISAGDSTTQVSQEVPENCQEWIGGKMAQNGLDHYVYKVGIAFNTEIFGTFRQTIVFDFGLEPVLMQRVMIDAASTEDLEYLMHAKQQLVTTAKRWDSSSKTIIDFEPNETTDLEKSLLIRYQIPLSADQLFTQSVLDKSLTKSNYQSRLHDLLYIEEIAQYKEISKFNLKVQLQILASFMLTGVSGGAKYAQNGQLFGRFKLTETLSEDTLAGRLVMTKVNAVYLLPVPKQKLVQTQGTKEKVYEATIEEKTKEYIFLRLSRECCEELNLRPDCDTQVELQFQLNRLPLCEMHYALDRIKDNGVLFPDISMTPTIPWSPNRQWDEQLDPRLNAKQKEAVLAITTPLAIQLPPVLIIGPYGTGKTFTLAQAVKHILQQQETRILICTHSNSAADLYIKDYLHPYVEAGNPQARPLRVYFRNRWVKTVHPVVHQYCLISSAHSTFQMPQKEDILKHRVVVVTLNTSQYLCQLDLEPGFFTHILLDEAAQAMECETIMPLALATQNTRIVLAGDHMQLSPFVYSEFARERNLHVSLLDRLYEHYPAEFPCRILLCENYRSHEAIINYTSELFYEGKLMASGKQPAHKDFYPLTFFTARGEDVQEKNSTAFYNNAEVFEVVERVEELRRKWPVAWGKLDDGSIGVVTPYADQVFRIRAELRKKRLSDVNVERVLNVQGKQFRVLFLSTVRTRHTCKHKQTPIKKKEQLLEDSTEDLDYGFLSNYKLLNTAITRAQSLVAVVGDPIALCSIGRCRKFWERFIALCHENSSLHGITFEQIKAQLEALELKKTYVLNPLAPEFIPRALRLQHSGSTNKQQQSPPKGKSLHHTQNDHFQNDGIVQPNPSVLIGNPIRAYTPPPPLGPHPNLGKSPSPVQRIDPHTGTSILYVPAVYGGNVVMSVPLPVPWTGYQGRFAVDPRIITHQAAMAYNMNLLQTHGRGSPIPYGLGHHPPVTIGQPQNQHQEKDQHEQNRNGKSDTNNSGPEINKIRTPEKKPTEPKQVDLESNPQNRSPESRPSVVYPSTKFPRKDNLNPRHINLPLPAPHAQYAIPNRHFHPLPQLPRPPFPIPQQHTLLNQQQNNLPEQPNQIPPQPNQVVQQQSQLNQQPQQPPPQLSPAYQAGPNNAFFNSAVAHRPQSPPAEAVIPEQQPPPMLQEGHSPLRAIAQPGPILPSHLNSFIDENPSGLPIGEALDRIHGSVALETLRQQQARFQQWSEHHAFLSQGSAPYPHHHHPHLQHLPQPPLGLHQPPVRADWKLTSSAEDEVETTYSRFQDLIRELSHRDQSETRELAEMPPPQSRLLQYRQVQSRSPPAVPSPPSSTDHSSHFSNFNDNSRDIEVASNPAFPQRLPPQIFNSPFSLPSEHLAPPPLKYLAPDGAWTFANLQQNHLMGPGFPYGLPPLPHRPPQNPFVQIQNHQHAIGQEPFHPLSSRTVSSSSLPSLEEYEPRGPGRPLYQRRISSSSVQPCSEEVSTPQDSLAQCKELQDHSNQSSFNFSSPESWVNTTSSTPYQNIPCNGSSRTAQPRELIAPPKTVKPPEDQLKSENLEVSSSFNYSVLQHLGQFPPLMPNKQIAESANSSSPQSSAGGKPAMSYASALRAPPKPRPPPEQAKKSSDPLSLFQELSLGSSSGSNGFYSYFK

SEQ ID NO: 182798 - DNA, 5829 bp, Artificial Sequence
  derived and/or modified sequence
atggaagatcggcgagctgaaaagtcctgcgagcaggcatgcgagtccctgaaacggcaggattatgagatggcattgaaacattgcaccgaggccctactgagcctgggacagtacagcatggccgacttcactggaccatgcccactcgagatcgaaagaatcaagatagagtccttattgtacagaatagcgtccttcctgcagctgaagaattatgtccaggccgacgaggattgccgccatgttttgggagaagggttggccaaaggcgaagacgcctttagggcagttctctgttgcatgcaactgaaaggcaagctacagccagtgagcacgattctcgccaaatcgctaacaggagagtccttgaatggaatggtgaccaaagaccttaccagactgaaaacgctgcttagcgagactgagaccgcgacgtccaatgccttgagcggctatcatgtggaagatcttgacgaagggtcctgcaatggctggcactttcgcccccccccaagggggatcacatccagcgaggagtacaccctgtgcaaaagatttttggagcagggaatctgcaggtatggcgctcagtgtacgagtgctcacagtcaggaggaactggccgagtggcagaaacggtacgcttctcggctcattaagctgaagcagcagaacgagaataaacagctgtctggctcctacatggaaacattgatagaaaagtggatgaacagcctatctcccgagaaggtgctgagtgagtgcattgagggtgtgaaggtggagcacaaccccgatctgtctgtgactgtgagcactaaaaagtcacaccagacctggactttcgcactcacttgcaaaccggcccggatgctgtacagagtggctctgttatacgatgcacaccgccctcatttctccattattgctatcagcgccggagactcaacaacccaggtgtcccaggaagtgcctgagaactgccaagaatggattggaggaaagatggctcaaaatgggctcgaccactacgtgtacaaagtgggaattgctttcaatacagaaatttttggaacttttcggcagaccattgtgttcgacttcgggctcgagcctgtgttaatgcagagagttatgatcgatgccgcctctacagaggacctcgagtatctcatgcacgcaaagcagcagctggtcacaacagccaaaagatgggatagttcctctaaaaccatcatcgactttgagccaaacgagacaaccgacctcgaaaaaagtctcctgatcagataccagattcctctgtcagcagaccagcttttcacccagtctgtgcttgacaaatctttgacaaagtctaattaccaaagccgcttacacgacttactgtatattgaagagatagctcagtacaaagagatatccaaatttaatctaaaggtgcaactgcaaattctggcaagcttcatgctcacaggcgtctctggcggtgcgaaatacgcccagaatggccaactcttcggcagatttaaactcactgagacgttgtctgaggataccctggcaggccggctggtcatgacaaaagtcaatgccgtttatctgctgccggtgcccaagcaaaaattggtgcagactcagggcaccaaggaaaaggtgtacgaagctaccatcgaagagaaaaccaaagagtatatatttcttcgactcagtagagaatgttgtgaggagctgaaccttagaccagactgcgatacccaggtggagctgcagttccagctgaacagactgccactgtgtgagatgcattacgcactcgataggatcaaggacaacggggttctgtttcctgacattagcatgactccaacaattccctggtctcccaatcgccagtgggacgaacagctggacccaaggttgaacgctaagcaaaaagaggcagtgctggccataaccacccctttggcaatccagctaccacctgtgctgattatcggaccatatggaacgggaaagacatttacactggcccaagccgtcaaacatatacttcagcagcaggaaacacgcattttaatttgcacccactccaattccgccgccgacctgtatatcaaggactatctgcatccatacgtagaagccggcaacccacaagctcgaccactgagggtgtattttcggaatagatgggtcaaaaccgtgcatcctgtcgttcaccagtactgcttgatctcaagcgcacatagtacctttcaaatgccccagaaggaggatattcttaagcatcgggtggtggtagttacactcaacacaagccagtacctctgtcagttagatctagaaccgggcttctttacccatatcctactggacgaggcagcccaggccatggagtgtgagacaatcatgccactggcactcgccactcagaatacaagaatcgtcctggccggtgaccatatgcagctgtctccgttcgtttatagcgaattcgcacgggagagaaatctccatgtctcccttctggaccgcctctacgagcactatccagccgagtttccttgcaggattctattatgcgagaattacaggtcccacgaggcaatcattaattatacatccgaactgttttacgaaggcaagttaatggctagcggaaaacagcccgcccacaaggatttctatcctctgacattttttacagctcggggagaggacgtgcaggagaaaaattcgaccgctttttacaataacgctgaggtatttgaagtggtggaaagagttgaggaactgcggcggaagtggcccgtggcgtggggtaagcttgacgacggcagtatcggagtcgtgacaccttatgcagaccaggtattcagaatccgtgccgaactgagaaagaaacgcttgtcagatgtgaacgtcgagagggtcctgaatgtccaggggaagcaattccgagtgctgttcctgagcactgtcagaactaggcatacctgcaaacacaaacagactccaatcaagaagaaggaacagctcttagaggactctaccgaggacctcgactatggatttctgtccaactacaaactgttgaacaccgccatcacaagagctcagagcctcgttgccgtagtcggtgaccctatcgctctgtgctcaatcggtcgctgccggaagttctgggaaaggtttattgcactgtgccatgagaattcatctctccatggcatcaccttcgagcaaataaaggcccagcttgaagctttggaattgaaaaaaacatacgtgctcaaccccctagcaccggaatttattccacgcgcattgagactacagcattctgggtcaacaaacaaacagcagcaaagccctccaaagggaaagagcctccatcatactcaaaatgatcattttcagaacgatggcattgtccagccaaaccccagcgtgttgattgggaatcccatccgcgcctacactccaccccccccgctgggcccgcacccaaatttaggaaaaagcccatctcccgttcagcgaatcgacccacatacgggaaccagtatcctttacgtcccggccgtctacggggggaatgtggttatgagcgtgcctctcccagtcccctggactggctaccaagggcgctttgctgtcgatcccaggattattactcaccaggccgctatggcctacaacatgaacctgctccagacccatggtcgaggctctcccatcccgtatggcctgggacaccaccctcccgttacaatcggtcagccacaaaaccaacaccaggaaaaggatcagcatgagcagaaccgcaatggaaaaagtgacactaacaacagcggtcccgaaattaataagatcagaacgcccgagaagaagccaactgagcccaagcaggtggatctggaaagcaacccacaaaaccgatcacctgagagtcggccctccgtcgtttacccatcaaccaaatttccgcgtaaggacaacctgaacccccgccacatcaacctacccctccccgccccccacgcccagtacgccatccctaacagacactttcaccccctgccccaactgcctcgaccgcctttcccaatccctcagcagcacacgctattgaaccaacagcagaacaacctgccggaacagcctaatcagatccccccccagccaaaccaggtggtgcagcagcagagccagctgaatcagcagccgcagcagccgcccccccagctgtctcccgcttaccaggccggacccaacaatgcgtttttcaacagcgctgtggcacataggccacagagcccacctgcagaagccgtgattcccgagcaacaaccacctccaatgctgcaggaggggcatagccctctgagagcaattgctcagccaggtcccatcctgccttcccatctgaattcattcattgatgaaaaccccagtggactgccgattggcgaagccctcgaccggatacatggatcggtggcgcttgagaccttacgacaacagcaggccaggttccagcagtggtcggagcaccatgcctttctttcgcaaggctctgccccctaccctcaccatcaccacccccaccttcagcacctcccacagcctccgctgggccttcatcagccacctgtgcgcgccgattggaagcttacatctagtgccgaagacgaggtagagacaacttacagcagatttcaggacctgatccgagagctgtcacacagggatcagtcagaaacccgtgaactggctgaaatgccaccaccccaatcccggctcctccaatacaggcaggtgcagtcacgcagcccgcccgcggtgccttcacccccatccagcactgaccactcctcacattttagcaactttaacgacaactcccgcgacatcgaggtggcctctaatccagcattcccccaacggctgccgcctcagattttcaattccccattcagcctgccttccgagcacttggcccctccaccgctcaagtacctcgcacctgatggtgcttggacttttgccaatttacagcaaaaccacctgatgggccccggttttccttacggtctgcccccactgccccacagacccccccagaacccattcgttcagatccagaatcaccagcatgcaatcgggcaggagccatttcatccgctctccagtcgcacggtgagcagctcatcccttccttccctagaggaatacgagcctagaggccccggcaggccactgtaccaaaggagaatatctagtagcagcgtgcaaccctgctctgaagaggtcagcaccccccaagactcgttagctcagtgcaaagaactgcaggaccactctaaccagtcctctttcaattttagctctccagaaagttgggtaaatactacttcatcaaccccctaccagaatataccttgtaacggatcatctcgcaccgctcagcccagagagcttatcgctcctccaaaaacagtgaagccacccgaagaccagctgaagtccgaaaatctggaagttagtagttccttcaattattccgtgttacagcatttaggtcaatttccgcctcttatgcccaacaaacaaattgcagaaagtgctaattcttctagtcctcagagctctgctggggggaagccggccatgagctatgcgagcgcgctgcgagcccccccaaaaccacgaccaccacctgagcaagcaaaaaagtcctccgatcccctgtcactgttccaggagctcagtctggggagcagctcaggaagtaatggattctacagctatttcaagtag

SEQ ID NO: 182799 - DNA, 13829 bp, Artificial Sequence
  derived and/or modified sequence
atgctttgtggggacgttgacaagtggatccaagatggcgtagaaagtaatgacaggatttggatgaagtaatggatcactaatgaactacagtgctggtgagatgtgtaagaaattataaagagctctgatgggctatttgggtgatacccagtgcagtgaactgcaggatttttgtccctgagtcatggaagacagaagagctgaaaagtcatgtgaacaagcatgtgaatcacttaagaggcaggactatgaaatggccctcaagcactgcacagaggcccttctttctcttggccagtactccatggcagacttcacagggccttgtccattggaaatagaacgcatcaaaatcgagagtcttctctacagaattgcctcatttttgcaactgaaaaattatgtgcaagctgatgaagattgtagacatgtgctgggagaaggactggccaagggagaagatgcctttcgggcagtgctttgctgcatgcagctgaaagggaagctccaacctgtatccaccattcttgccaagtcactcacaggagagtccctgaatgggatggtaacaaaggatttgacaagactaaaaacacttctctcagaaacagagacagcaactagtaacgccctctctggatatcacgtggaagacttagatgaggggtcttgtaatggttggcatttccgcccaccacctaggggaatcacaagcagcgaggaatatactttgtgtaaaagatttttagaacaaggaatctgtaggtatggtgcccagtgtacttcagcacattcccaggaagaactagcagaatggcagaaaagatatgcttcacggctgataaaattgaaacagcaaaatgagaataaacagctctcaggcagttacatggaaaccttgatagaaaagtggatgaattcattgtctcctgagaaagtgcttagtgaatgtatagaaggagtaaaggtagagcacaatcctgacctgtcagttactgtcagcaccaaaaaatcccaccagacatggacctttgctctcacttgtaagcctgcaagaatgctgtatcgtgtagcattgctttatgatgctcatcgtcctcattttagtatcattgcaatatctgccggagatagtactacccaggtatcacaagaagtcccagaaaactgtcaagaatggataggaggaaagatggcccaaaatggattagatcattacgtgtataaagtcgggatagcatttaacacagaaatatttggaacttttcgccaaaccatagttttcgactttggattggaaccagtactcatgcaaagagtaatgattgatgcagcttctacagaagatctcgaatacctgatgcatgcaaaacagcagctagtaaccacagctaaacgttgggattcttcctctaagactattatagattttgaacctaatgaaactactgatttggagaagagccttcttatcagataccaaattcccctctctgctgaccagctatttactcagtccgttttagacaaatcattgaccaagagcaactatcagtcacggttacatgaccttctttatattgaggagatagcccagtataaagaaatcagcaagttcaaccttaaagtgcaattgcagattctggcaagcttcatgctcactggtgtttctggaggtgcaaagtatgctcagaatggacaactttttggtcgctttaagcttactgaaacactttctgaagatactttggctggacgactggtgatgaccaaagtcaatgctgtttatttattaccagtccctaaacagaagttagtacagacccagggaaccaaagagaaggtttatgaagctactattgaagaaaaaacaaaggaatatatatttttaaggctatctagggaatgctgtgaagaacttaatcttcggcctgactgtgacacacaggttgaacttcagtttcaattaaatcgattacccctctgtgaaatgcactatgcactagacaggatcaaggacaatggggttttgtttccagacatcagtatgactcccaccataccatggagtcctaacagacaatgggatgaacagttggatcctcgactaaatgcaaaacagaaagaggctgttctggccattaccactccacttgcaatccagctgccgcctgtgcttatcatcggaccctatgggacaggcaaaacgttcactctagctcaggctgtcaaacatattctgcagcaacaggagactaggattctcatttgcacccattctaatagtgctgctgatctctacataaaggattatttacatccatatgtagaagcaggcaatccccaggcaagacctctcagggtatatttcagaaatcgctgggtaaagactgtccacccagttgtgcatcagtactgtttgatctcaagcgcacattccacctttcagatgccccagaaagaagatattcttaaacatcgagtggtggttgttaccttgaatacttcccagtacctctgtcagttggaccttgaacctgggttttttacacacattctattagatgaagctgcccaggccatggagtgtgaaaccattatgcctctagcattagcaactcaaaacactcggattgtcttggctggtgatcacatgcagctcagtccttttgtttacagcgagtttgccagggagagaaaccttcacgtttcattacttgaccgactctatgagcattaccctgctgagttcccatgtaggattctcctgtgtgagaactaccgctcccatgaagctatcatcaattatacctctgagcttttctatgagggcaaactgatggccagtgggaagcagccagcacacaaagatttctacccactaactttctttacagcacgaggagaagatgtacaagaaaaaaatagcacagctttttataataatgcagaggtgtttgaagtggtggaacgtgtagaagagttaagaaggaagtggccagtagcgtgggggaagttagatgatggcagtattggtgtggtgactccatatgctgatcaagtgtttagaatacgtgctgaacttcgaaaaaagagattatctgatgttaatgtagaaagggtgctaaatgttcaaggaaagcaattcagagttttgtttcttagcacagtacgtacaagacatacttgtaaacataaacagacaccaattaaaaagaaagagcaacttctggaagattccacagaggacttagattatggttttttatctaactacaagcttctcaatactgccatcacaagagcacaatccctggttgctgtggtgggtgatcccattgctctgtgctctattggaagatgcaggaaattttgggaacggtttattgccctgtgtcatgaaaacagtagcctacatggaatcacttttgaacagatcaaagcccagttagaggctttagaactaaagaagacatatgtgttgaatccgctggcacctgaatttatcccccgggctctaagactgcagcattcaggaagtaccaacaaacagcagcaatcaccacccaaggggaaaagtcttcatcatacccagaatgatcacttccagaatgatggaattgttcagcccaatccttctgtacttattggcaatcctattagagcatatactcctccaccccctcttggacctcacccaaatttgggaaaatctccaagccctgttcaaagaatagatcctcacactgggacaagtattctttatgtacctgctgtctatggagggaatgtagttatgtcggtgcctttacctgtaccatggacaggataccagggtaggtttgcagttgatcctcgaattattacacatcaggcagcaatggcctataacatgaacctattacagacacatggacgaggatctcctattccttatggccttggacatcacccacctgtcaccataggccagccacaaaatcagcatcaggagaaggatcaacatgagcaaaatcgaaatggtaaaagtgatacaaataattccggacctgaaattaataagattcgaacaccagagaaaaagccaacagaaccaaaacaggttgatttggaatcaaatccacagaacagaagtcctgaatcacgtcctagtgttgtttatcccagtaccaaatttcctcgcaaagataatctcaacccaagacacataaatcttccccttcctgctccccacgcacagtatgcaatccctaatcgccactttcatccccttccccagctaccaagaccaccctttccaattccacagcagcacaccttgttaaatcagcagcagaataatttgcctgaacaaccaaatcagataccacctcagccaaatcaggtagtccagcagcaaagtcagttgaatcagcagcctcagcagccacctcctcagctttctcctgcatatcaggcgggacccaacaatgctttttttaatagtgcagttgctcatcggccacagtctcctcctgcagaagctgtaattccggagcagcagccccctcccatgctgcaagaaggccacagtcctctgagagccattgcacaacccggccccattcttccttcacatctgaatagcttcattgatgagaacccctcgggattacctataggggaggctttagatcgtatacatgggagtgtcgctctggaaacattaaggcagcagcaggcacggttccagcagtggagcgagcatcatgcctttctcagtcagggcagcgctccatacccacaccatcaccatcctcacctccagcatcttcctcagccgcccctgggattacatcagccgccagtgagggcagactggaagctcaccagcagtgccgaagatgaagtggagaccacatactcaaggtttcaagacttaatcagagaactgtctcatcgtgatcaaagtgaaacacgggaactagctgaaatgccaccacctcaatcaagacttttgcaatatagacaagtacagagtagaagcccaccagcagtcccatctcccccatccagtacagaccacagtagccacttttctaactttaatgataacagcagagacattgaagtagccagcaacccagcatttccacagcgcctcccaccccagatattcaactcacctttctcgttgccatctgaacaccttgcccctcctcccttgaaatacctggcacctgatggagcatggacttttgctaacttgcaacagaatcacctaatggggccaggttttccctatggcctacctccattgcctcacaggccaccgcagaacccttttgtacaaatacagaatcatcaacatgctattggtcaagagccatttcacccattgtcatctcgaacagtatcttcttcttcgctccctagcttagaagagtatgagcccagaggacctggtcggcccttgtaccaaagaagaatctcatctagctcagttcaaccttgttctgaagaagtaagcactcctcaagacagtctggctcagtgtaaagagcttcaggaccacagtaaccaatcttctttcaacttttcatccccggagtcctgggtaaacaccacctcatctactccttatcagaacattccgtgcaatggatccagcaggacagctcagcccagagagttgatagcgccacccaagactgtcaaaccccctgaggatcaactgaagtcggagaacctcgaggtgtccagttccttcaactacagtgtgctgcagcatcttggccagtttccaccccttatgcctaacaagcagatcgcggagtcggccaatagcagtagcccccagagctctgcggggggcaagcccgccatgtcctatgccagcgctctgcgggcccctccaaagcccaggccccctcctgagcaggccaagaagagtagcgaccctctgtctctcttccaggaactgagcctagggagctcatctggcagcaatggcttttactcatattttaaataatcactttttttttccctcaagggagaatgttttaatttctgtttgtatcagtagaattaaggtagttggacttcatctatagatgcacagttccctttgttttaatattaaatatgttctcacttaattgctttgctgctagacttgcaactaatttttttaaagtatattccattattttgcatttttgatgtgtcaaaactttgacagcttttatgtagaataaaaaaatttttaaatttgtgtattgttacatatgtttgcatcaagctagcagccaagaggttaattgtgcaactataaaaaaaaaaaaaaaaagaaaagtttgtctaaaatgtatttaaaaagaaaaaaaaattgtaagtagcatttacatttattcaataatattaccacatgctgggtttctgtaccagaaatggccagttgatgtacaaatgtatgttatttttgcttaaattcatttaaattttttttaaaataaaggggcagcatcttctaaataagttttatcagctttttttttttttttggtgacacgatgctgcattctaaaacttttatagttttagactatgtatgatgtgttgttgtaatctccatccaccataggatagagttaaaggcattctttgcaggcatattttgtatgccactgttttttgaaatgtgaaaaaaacgttggcatacttagttattttttggacaagctacacttcaagcttgtttttaatgttaatttgatagtgtgtgtttttttttttaaacaaatcaagaagctgaaaaatttttaggattgttggtgcttagtagacttgataactattttaaaaatgcgtgaatttagtaaaattctttttttctcactatgcatgtgtaaatgtttgtaacctggcttccctcttctccagtggtataaagaattgtgccgctttaaggtttgggtttttttctctccagtaaaaattttggtaccttatttgatgtttacattaaaatgtgacattatacgtggcaattcaaatattttgctagctgtcttgtttgaggaacaccattaaagaagaaatataatgtttgtcaaaaatgtatcaaaattcatcagaatctggggcagaaaactacccttgtttttcatgtctttcaattcttctaaaataccccttattgaacttgtacacaatataaaatttaaatagccatcttaaatattctaccatctaaaaattgctttgaatgaattttggtaaaatccaaaggaagatgtttaccctcttgaaacttatggtcttgtcacacatttaaagcaatatatgtccttattttcctgaccttgtaatactacttttatatttcagaggtatctcgaaactacaatataaacttttaaaaaaaaataagatgaggctggggaacctttcgaatgaacccaatcttcctgatgatccattcaaaaacaggtttttggaagaccactttcgataggcaatcctataatcaaagtacatttttaaaatcaggttgtaaaatggcaaaggtaaagaaaaattactgacatttcttctatgattggagtttagtttatgttggccagctacaaccccttttaatcctcagacagtttgggataaaagagtgcctttggttaatggttagcaagctccaggataagcgctgcgtgcctcttgtattcagctctacctttctgctaagagtgcggttcatttgtgtgtggctttgcgttccaggctgtgggtctctgtgtaaggtggcagacatagacttgtaaactgcagacgtgttaatggttagcataaatcacagctggaaaactgagccggcaagttacagcaccactctttctctgtatgatgtcagatcaccacatttagcaatgtcaaattttactcaacattctttagtaggaagaaaagaagaaaaagttttgccacgtagctatgtgcttttaagtctgtgacaaaactcaagacatatccgaatgaaaattagatctctctgatgtgaggatgttatggaaaataattttcccatcagtgattatccaccccccagcccccatatacaggactacaacgcaagctagataaatgttcaaaagcaatctgataatatgaagacagaattgtcaagtcagggctttcagttgaccccttgtcatgaggttattgcctaattttctgttttctatacttgaatctttaaaaaatatcagtttttaaattatttatatttatatttagttaagggtcatggggtcgtgtatgcaccccatcaccttatataaatatgttgatgatggaagctttggataaggaagctattaagttgtcatgacatccttgttctaagcagttatttctaaaaactaaaaataatagctacttattggcccaccgctctgctgtgagtatatgagtacttctcattccttatttccatagccagtcaaggattctaacgctgcttccatctgatactcttcttagattctgcatcaaatgcttattttgacttacaacaagcttactcttcctcagcattacataatgccatctttccaaccatgctttaaagaacctgctctttacgcatagtatcttataacattttgaacacgtcttgtgtaagaatcattgcaagtttccatcaaaatgaggcgtgtcttctgagtacagctgatgttctttgggtattacttgagtagtagtagcaagtacccataaatcagatttatgaaacataacttatatgctaggttcaacccttatatatgcatatatatgtatagtatatgtatataaaatttttttccagaaaacttgatgatagctctcagataataccaagtattaccagcttccatttcttcagagcagatttttttctaagtgaggttaattgttcacataatgtctttttacatctttgtcctttgtatcactctgaagttttctttttcttgccagaatatttgtttcactttttaatttcagtgctacttgagattttctttttttttaacctgaaagacgatattttggatgatagagtttgtaaagtgagccttcatgctgaaaaaattcttttcatgatctaaaaatggtcttttgttacgatttgaagaacctcattccgtgtaacatggatattttcttgtgtgtctttaaagggggttttggttgtcatttgggcatatgctttgccaaattgttatagcagaactttgtttttgattaatcagtagttaattattgaccatttaaactaacatgaccttaattttcctttcctcacacagatgtgctttctatccaggtcattttttacacgtgaaataacaaactgctttgtgtagattttttttttttttaaatcatcagattttagaataagtttaggtttaatgtaaacatcaactggtcttttcagttcagagaactgcagaataagtaaaataagcagaattcccactgaataagcattacctaattaaacatagcaacatctaagaccaatttatgaaaatactctccttttttatggaggcattggagctgctgagaaagctaatgaatttcccaactttgggataattaatatatagtattgtgttgctctagtgtagttgattttatgtgtttaatatttttcatgtcaagagcaaagctgcagacgtaaaagatgtttctctagcccccttagctagagcgagccacctttgttaagagtcagggtgtgaagaacaatttcaagataaattttagtatttcaaccattgttattaagaaaattagacttactgaaatactcatttaaaaacagacaccttctatagcattgttttatagtggagttatttttaaaaagggaatcccagaaagaatctataaaaatacaaggttaaaactttaaatgtattgaaagatacaaattggtgctttcaaatgtcatgtaagctagccattgtgtttttttttttccctccagctcctcaatggtagtaatttgtcttttatgatttaccgtacattatttcttgctcaccatccccttaacatatgaaaatccttaatttctactgccgcgctatatgtcttcctgaatctcaaggtataaatgtcttaatggatctgatttgtctccactctttgccatctgatccacattcaaaccgcctagaaattagaaagaataggtaatgttctatctacgatttcttgttcaaaatatcacgtagtggtgccaatcacttacaaagacaccatctccatcttgaaagagtaactggcatgttagtcttgaaaatgctcattatgatatgctcctcacatttcccatctgcttgaggatggacatttattagctgagactttaaagctgctaaattcacactttctactttcatacctttttaatcagtaatgtcaagaccattgttgcaaggagtgaatcttactaaacacatcctgttattactttaaactagaatatgagattcaagagatttaaaaacaattttaatgtaacgtttaaaatttttgaaccaattgagaatgtctactttggagtgaagtttaaggaaacagtcaccagagtttctaaaaattttttggagggaggtacctaatagaagaatctagacttagaaatgtgaactgtggttaaataccaaacccagttccgcagtggtcgtctaaagcgtctaaaactggagtgttaagaaaacccagagacattcatatagtttcagttatcagagtattagaccagactttatttgcaatttgttcaacagagagattttattttgatacagatattaagcataaagcatagtaagttttatataattctatgagttcattaaacaatattatgaaattttcattatgttcgtggggagtctttttaactgtttctacctcatatatgaggtctcttctgtattttactttgcatactagcatgtgattgcctgccttagaactatgtagaggaggggaaatcgatattaccttttaagaaatttttgattttatgaagtgttttcattaatacttttttaatgtttgagaagtaaaggggaaagggtggcaaattacataggttgcaacacagagtagaagtcacatagtactatttacagatctgtcctgttttaagatttgagaattgtgaacaggatggagcaatggttctcaaacttcagccagtatcagaattgcctcgaggtcttgttaaaattcagatagctggacccacccccagcatttctgattttggtctggagcctgatgatttgcatttccaacaagtttccaggcgatgctgatgctgccagtccaggaaccacactttgaaaatcactgggtctgattctcgcagtttgaaagtctcagagaccttcagagtctgaacgtcttttcaaccatgtatttatttactcagtgtaaaaaactgatctctggagacatttttataaatctggtgccatgactggaacatttgtggagaaaggtctccatggagcgacaggccctttggattggccaccacccctcctcactctcacccctgctggggtctgcactgctcttccgcagtagggtgaaggagctctttggttttagggtgagtttgcttttgtgtacgctgctgcctggacatcagtctggaagctgtgcatttgtttggtgtgcttagggtcaatcttgatccacatgcatggaagtgagaatcctggaaagaagccatcagaatgccatgagagtgcacctagcatgtatcgaggcactaagtgcaggagtccctgtcctaagatggcagtgacatggagcatcgaaaaccacagataatccttaaataataaaataatagttttgtttttttttcttcggggcagagtctcgctctgttgccctggctggagtacagtggcatgatctcggctcactgcaacctccgcctcccggcttcaagtgattctcctgcctcagcctcccaagtagttgggactacaggcatgcgccaccacgcccagctaatttttgtattttttagtagagacggggtttcaccgtgttggccaggatggtctccatctcttgacctcatgatctgcccgcctcgggctcccaaagtgttgggattacaggcatgagccactgcgcctggcaaatgttttagtttttatggttattattattttttttttttgtgggggagggtggtgagggcaaaggatttgtttttcaaattatgtgtttctcaggttaacaaagttattttagattctctgccatgccagcaggtgttagagagagcctgaagtgttacatatggcagaaaataaatgtctctgattactttgctacctttaaaaaaatctatatgtgtttgcaaaacagcctagggggatctaccacctacacagcatgaattattcataagtcataggtgcacatgtatgagcaagttatttttgagaaagaaactgcctataatataataaacctgtcaggtctttgggtattgtttaatttgtgtgttgttgctgttttatctggactgcatcttggggggtactgggctctgcttctggtttttagtttgcctttgaatttactgagctactagaaagacaaaaaaaagctatttttatggtaatagaatacagaatgacttaggtgtaaaagtacacgtgaagaccatcgtagaatatacagctttggagttttcttaagacacagtccttcctactgaaaaggcttgctcacctttggagaggattgtttatattttcagcctgggttcctttatgcagtcccaacttagaggggagcttcggtttatttacactttgctttgcacgataacttgtatgcgaagacctctttatatctttcagtaggtcagagggctctttgtcctggttgaagtcccaaagtgtcagtgcagctgagaatgtttctcagcctccccctttacagaggaagggtcctggattttcataaatccagaccatgcctgcttcctataaatccatgtatatgacattgtactgtatctgatttctgtgccagtcatctgacctgattctttaaaccccataaaggtactggctatatgtagtagttgtatcctaggtaaatatggtgattaaaatacttctcttctaaattataaagataatgagttttgcattttattaaagggtcctgttattagtgacacaggatttttttttaatgcttcatacatatagttcttatctaaacttgttcagctaacttcatagatcagttacttagcaaattcatactgagtcttattttgggaagtcttcctgagggaagctgtacaaaactgaggtggtcaggttcatctcttcaaagtaccagttatacagccatctaaataggcataacttatggcaaaattataacaattttttttctttgcagtaaatgatacctcatctaagaggctctaatacctaaagagtttatccttaaaagtaaaagtgactttgtaccataaaataaccccaaagccactctctagggtttttattttcttctttctttgtctttatcttttctaacttagttttggaattacgttagctactttggttccatagaacaagttttcaacttggggtctacagttcctacagtgtgctcattgtctcagtgaagttcttttgttttcaaagattcatggtaacaaaatgtattttactgctacaactaaaatgtatttataataaaatgcctttttaataatttgg

SEQ ID NO: 182800 - DNA, 5829 bp, Artificial Sequence
  derived and/or modified sequence
atggaggaccggcgggcagagaagagctgtgagcaggcctgtgagagcctgaagaggcaggactatgagatggccctgaagcactgcacagaggccctgctgagcctgggccagtacagcatggctgacttcaccggcccctgccccctggagattgaaagaatcaagattgagagcctgctgtaccgcatcgccagcttcctgcagctgaagaactacgtgcaggctgatgaggactgccgccacgtgctgggggagggcctggccaagggggaggatgccttccgggctgtgctgtgctgcatgcagctgaagggcaagctgcagcctgtgtccaccatcctggccaagagcctgaccggggagagcctgaatggcatggtgaccaaggacctgacccggctgaagaccctgctgtctgaaacagaaacagccaccagcaatgccctgagcggctaccacgtggaggacctggatgagggcagctgcaatggctggcacttccggcccccaccccggggcatcaccagcagcgaggagtacaccctgtgcaagcgcttcctggagcagggcatctgccgctatggagcccagtgcaccagcgcccacagccaggaggagctggccgagtggcagaagagatatgccagccgcctcatcaagctgaagcagcagaatgaaaacaagcagctgagcggcagctacatggagaccctcatcgagaagtggatgaacagcctgagccctgagaaggtgctgtctgaatgtattgaaggagtgaaggtggagcacaacccagacctgtctgtgacagtgtccaccaagaagagccaccagacctggacctttgccctgacctgcaagccagccaggatgctgtacagagtggccctgctgtatgatgcccaccggccccacttcagcatcatcgccatctctgctggggacagcaccacccaggtgtcccaggaggtgcctgagaactgccaggagtggattggaggcaagatggcccagaatggcctggaccactacgtgtacaaggtgggcatcgccttcaacacagagatcttcggcaccttccggcagaccatcgtgtttgattttggcctggagcctgtgctgatgcagagggtgatgattgatgctgccagcacagaggacctggagtacctgatgcacgccaagcagcagctggtgaccacagccaagcgctgggacagcagcagcaagaccatcatcgactttgagcccaatgagaccacagacctggagaagagcctgctgatccgctaccagatccccctgtctgctgaccagctgttcacccagagcgtgctggacaagagcctgaccaagagcaactaccagagccggctgcatgacctgctgtacatcgaggagatcgcccagtacaaggagatcagcaagttcaacctgaaggtgcagctgcagatcctggccagcttcatgctgactggagtgtctgggggcgccaagtatgcccagaatggccagctgtttggccgcttcaagctgacagagaccctgtctgaggacaccctggccggccgcctggtgatgaccaaggtgaatgctgtgtacctgctgcctgtgcccaagcagaagctggtgcagacccagggcaccaaggagaaggtgtatgaggccaccatcgaggagaagaccaaggagtacatcttcctgcggctgagccgggagtgctgtgaggagctgaacctgcggccagactgtgacacccaggtggagctgcagttccagctgaaccggctgcccctgtgtgagatgcactacgccctggaccgcatcaaggacaatggagtgctcttcccagacatctccatgacccccaccatcccctggagccccaaccggcagtgggatgagcagctggacccccggctgaatgccaagcagaaggaggccgtgctggccatcaccacccccctggccatccagctgccccctgtgctgatcatcggcccctacggcaccgggaagaccttcaccctggcccaggccgtgaagcacatcctgcagcagcaggagacccgcatcctgatctgcacccacagcaacagcgctgctgacctgtacatcaaggactacctgcacccctacgtggaggccggcaacccccaggcccggcccctgcgggtgtacttcaggaaccgctgggtgaagacagtgcaccctgtggtgcaccagtactgcctgatcagcagcgcccacagcaccttccagatgccccagaaggaggacatcctgaagcaccgggtggtggtggtgaccctgaacaccagccagtacctgtgccagctggacctggagcccggcttcttcacccacatcctgctggatgaggccgcccaggccatggagtgtgagaccatcatgcccctggccctggccacccagaacaccagaattgtgctggccggggaccacatgcagctgagcccctttgtgtacagcgagtttgcccgggagaggaacctgcacgtgtccctgctggaccggctgtatgagcactacccagctgagttcccctgccgcatcctgctgtgtgagaactaccgcagccatgaggccatcatcaactacaccagcgagctgttctatgagggcaagctgatggccagcggcaagcagcctgcccacaaggacttctaccccctgaccttcttcaccgcccggggggaggatgtgcaggagaagaacagcacagccttctacaacaatgctgaggtgtttgaggtggtggagcgggtggaggagctgcggaggaagtggcctgtggcctggggcaagctggatgatggcagcattggagtggtgaccccctatgctgaccaggtgttccgcatccgggcagagctgaggaagaagaggctgagtgatgtgaatgtggagcgggtgctgaatgtgcagggcaagcagttccgggtgctcttcctgagcacagtgaggaccaggcacacctgcaagcacaagcagacccccatcaagaagaaggagcagctgctggaggacagcacagaggacctggactatggcttcctgagcaactacaagctgctgaacacagccatcacccgggcccagagcctggtggccgtggtgggggaccccatcgccctgtgcagcatcggccgctgcaggaagttctgggagcgcttcatcgccctgtgccacgagaacagcagcctgcacggcatcacctttgagcagatcaaggcccagctggaggccctggagctgaagaagacctacgtgctgaaccccctggcccctgagttcatcccccgggccctgcggctgcagcacagcggcagcaccaacaagcagcagcagagcccccccaagggcaagagcctgcaccacacccagaatgaccacttccagaatgatggcatcgtgcagcccaaccccagcgtgctgattggcaaccccatccgggcctacaccccacctccacccctgggcccccaccccaacctgggcaagagccccagccctgtgcagagaattgacccccacacaggcaccagcatcctgtatgtgcctgctgtgtatggaggaaatgtggtgatgtctgtgcccctgcctgtgccctggacaggctaccagggccgctttgctgtggacccccgcatcatcacccaccaggccgccatggcctacaacatgaacctgctgcagacccacggccggggcagccccatcccctacggcctgggccaccacccccctgtgaccatcggccagccccagaaccagcaccaggagaaggaccagcacgagcagaacagaaatggcaagagtgacaccaacaacagcggccctgagatcaacaagatccgcaccccagagaagaagcccacagagcccaagcaggtggacctggagagcaacccccagaacagaagccctgagagccggcccagcgtggtgtaccccagcaccaagttccccaggaaggacaacctgaaccccaggcacatcaacctgcccctgcctgccccccacgcccagtatgccatccccaacagacacttccaccccctgccccagctgcccaggcctcccttccccatcccccagcagcacaccctgctgaaccagcagcagaacaacctgcctgagcagcccaaccagatccccccccagcccaaccaggtggtgcagcagcagagccagctgaaccagcagccccagcagcccccaccccagctgagccctgcctaccaggccggccccaacaatgccttcttcaacagcgctgtggcccaccggccccagagccccccagctgaggccgtcatccctgagcagcagcccccacccatgctgcaggagggccacagccccctgcgggccatcgcccagcccggccccatcctgcccagccacctgaacagcttcattgatgagaaccccagcggcctgcccatcggggaggccctggaccgcatccacggctctgtggccctggagaccctgcggcagcagcaggcccgcttccagcagtggagcgagcaccacgccttcctgagccagggcagcgccccctacccccaccaccaccacccccacctgcagcacctgccccagccccccctgggcctgcaccagccccctgtgcgggctgactggaagctgaccagcagcgcagaagatgaggtggagaccacctacagccgcttccaggacctgatccgggagctgagccaccgggaccagagcgagacccgggagctggccgagatgcccccaccccagagccggctgctgcagtaccggcaggtgcagagccgcagccccccagctgtgcccagcccccccagcagcacagaccacagcagccacttcagcaacttcaatgacaacagccgggacatcgaggtggccagcaacccagccttcccccagaggctgcccccccagatcttcaacagccccttcagcctgcccagcgagcacctggcccccccacccctgaagtacctggccccagatggagcctggacctttgccaacctgcagcagaaccacctgatgggccctggcttcccctacggcctgccccccctgccccacaggcctccccagaacccctttgtgcagatccagaaccaccagcacgccatcggccaggagcccttccaccccctgagcagcaggacagtgagcagcagcagcctgcccagcctggaggagtatgagccccggggccctggccggcccctgtaccagaggcgcatcagcagcagctctgtgcagccctgcagcgaggaggtgtccaccccccaggacagcctggcccagtgcaaggagctgcaggaccacagcaaccagagcagcttcaacttcagcagccctgagagctgggtgaacaccaccagcagcaccccctaccagaacatcccctgcaatggcagcagcaggacagcccagccccgggagctgattgccccacccaagacagtgaagcccccagaggaccagctgaagtctgagaacctggaggtgagcagcagcttcaactacagcgtgctgcagcacctgggccagtttcctcccctgatgcccaacaagcagattgctgagagcgccaacagcagcagcccccagagcagcgctgggggcaagccagccatgtcctatgccagcgccctgcgggccccacccaagccccggcccccacctgagcaggccaagaagagcagtgaccccctgagcctcttccaggagctgagcctgggcagcagcagcggcagcaatggcttctacagctacttcaagtag

SEQ ID NO: 182801 - DNA, 5829 bp, Artificial Sequence
  derived and/or modified sequence
atggaggaccggcgggccgagaagagctgcgagcaggcctgcgagagtcttaaacggcaggattatgagatggccttaaaacactgtacggaggccctgctctctctcggccaatacagcatggcagatttcaccggaccgtgtcctctggagatcgagagaatcaagattgagtcgctgttatatcgcatcgcatcctttcttcagctgaagaattacgtccaggccgacgaagattgtcggcatgtacttggcgaggggctcgctaaaggagaggacgcatttcgggctgtgctgtgctgcatgcagctgaaaggaaagctgcagccggtgagtaccatcttagctaagtcgctaaccggcgagtctcttaacggcatggtcacgaaagacctgacccgcctgaaaaccctgctctccgaaactgaaaccgctacctccaacgcactgtctggctatcacgtagaagatcttgacgagggtagttgcaatggctggcacttccggcctccaccaagaggcataacatcaagtgaggagtacactctctgtaaaagatttctggagcagggaatatgtcgttacggcgcgcagtgtacatcagctcatagccaggaggaactcgcagagtggcagaaaaggtacgcctcaagactgatcaagctcaagcaacaaaacgagaacaagcagctctccggttcgtatatggagaccctgatagaaaagtggatgaattcactttctcccgagaaggtcctgagcgaatgtatcgaaggggtgaaggtggaacacaaccccgatctctccgtgacggtttccaccaagaagagccatcagacgtggacttttgctctgacatgcaagccagccagaatgttgtacagggtggctcttctgtacgatgctcaccgcccccacttcagtattatcgccatctcagccggagatagtactacacaagtctcacaggaggttcctgaaaactgccaggagtggattgggggcaaaatggcccaaaacggcctagatcactatgtgtacaaagtgggtatcgcatttaacaccgaaatcttcggtacgtttcgccagaccattgtgtttgacttcggccttgaacccgtgctgatgcagagggtcatgattgacgcagctagcaccgaggatctggaatatctcatgcatgcaaaacagcaactcgtcaccacggcaaagcgatgggatagttcatcaaaaacaattatcgactttgaacctaacgagaccactgatctggaaaaatccctcttgatccggtatcagattcccctgtcggcggaccagctctttactcaatctgtgttagacaagagcctgactaaatcaaattatcaaagtaggctccatgatttgctgtatattgaggaaatcgcacaatataaggagatatccaagttcaatctgaaggtgcagcttcagattctggcctctttcatgctgacaggcgtctccggcggcgcgaaatacgcccaaaacggccaactattcggaagatttaaactgaccgagaccttgagtgaggatacgcttgcaggccgcctagtgatgacgaaagtgaacgcggtttacctccttcctgtgcccaagcagaagctcgttcagacccagggcaccaaagaaaaggtgtatgaggctaccatcgaggagaagactaaagagtacatctttctccgtctctctagggagtgctgcgaggaactcaatcttagaccagattgcgatacgcaagttgagctacaattccagctgaaccggctacctttgtgtgaaatgcactacgcactcgaccggatcaaagataatggggtcctgtttccggatattagcatgactcccaccatcccttggtcccccaaccgacaatgggatgagcagctggaccctcggctaaacgccaagcagaaagaagccgtcctggcaattacaacgcctcttgcaatccagctgccgcccgttctcattatcggaccttacggaaccggcaagacctttaccctggctcaggccgtaaaacacatcctgcagcaacaggaaacacgtatactaatctgtactcatagtaactcagctgcagatctttatattaaggactacctgcacccatacgtagaggccgggaacccacaggctagacctttgagagtctatttccgaaatcggtgggtaaagacagttcaccccgtggtgcatcagtattgtctcatcagtagcgcacacagtacgttccagatgccacagaaggaggacatcctgaagcatagagtggtggtagtgactcttaacacttcccagtatctgtgtcaactggatttggaacctggctttttcacacacatcctgctggatgaggcagcccaagcgatggagtgtgaaacgattatgccactggcattagccacgcagaatactcgcatcgttctggctggagatcatatgcagctctcaccctttgtgtacagcgagttcgccagagaacgcaaccttcacgttagcctgttggacagactgtacgaacactatccagccgagttcccctgcaggatcctgctgtgtgagaattacaggtcacacgaagcaattattaattacacatccgagctcttctacgagggcaagctgatggcttcaggtaaacagcctgcccacaaagatttttacccacttacctttttcactgcccggggagaggatgtgcaggagaagaactccacagcattttacaacaacgcagaagtgttcgaagtggttgaacgcgtggaagagctcaggcgcaaatggcctgttgcttggggcaaactggatgatggaagtataggggtggttacgccttacgctgatcaggtcttccgcatccgtgccgagctccggaaaaagcgcctgtctgatgtgaacgtcgaaagggtgttgaatgtgcaaggaaagcagttcagggtgctcttcctgtccactgttaggacccgacatacgtgcaagcataagcagacccccatcaaaaaaaaggagcaactgctggaggattccactgaagacctagattatggcttcctttccaactataaattgcttaacaccgccataactcgcgcccagagcctagtagctgtagtcggggatcctatcgctttgtgtagtataggccggtgccggaaattctgggaacgctttatcgcattatgccatgaaaattctagtctgcatgggatcactttcgagcagattaaggcccagctggaagcgctggagctgaaaaaaacttatgttctgaatccactggcacccgagttcatcccgagagcacttaggctgcagcactcagggtcaaccaataaacagcaacagtcacctcccaagggtaaaagtcttcaccacacacagaatgaccattttcaaaatgatggtatcgtccaacccaatccatccgttctcatcggaaatcctatccgggcatatacccccccgccaccactgggtcctcatcccaacctgggcaagtccccttccccagtgcagaggattgacccccatacagggaccagcatactgtatgtaccggccgtttacggcgggaatgttgtaatgtctgtacccttacctgtcccttggaccggctatcaaggccggttcgccgtcgaccccaggattattacacatcaggcggcaatggcctacaatatgaaccttctacagacacacggcaggggctctcccatcccttacggtctggggcaccatcctccggtgacaattggacagcctcagaaccagcaccaagagaaggaccagcacgagcaaaataggaacggcaagtctgatacaaacaattccggacccgaaattaataagatccgcacaccagaaaagaagccgaccgagcctaagcaagtggacttagagagtaatcctcaaaacaggagccccgaatctaggccgtcggtggtgtacccctctacaaagtttccccgcaaagacaacctgaaccctcgccacattaatctgcctttgcccgccccccacgcacaatatgccataccaaatcgccatttccacccactgccccaacttccaagacctcccttcccgattccccagcagcacaccttgctcaatcagcagcagaacaatctgcctgagcagcccaatcagatccctccccaaccgaaccaagtagtgcaacagcagtcccagcttaaccagcagcctcagcagcctcctccccaattgtcgcctgcctatcaggccgggccaaataatgcttttttcaacagcgctgtggctcatagacctcaaagcccgcccgctgaagcggtgattcccgaacaacagccaccccctatgttgcaggaagggcactccccactccgcgctatagcccaaccgggccctatcctcccttcgcacctcaactccttcatcgacgagaacccgtccggcttaccaatcggcgaagctctggatcgaatccacgggtcggtagccctggaaacactaaggcagcagcaggcaagatttcagcagtggtccgaacaccacgctttcctctcccagggcagtgcaccataccctcatcaccaccatcctcatctccagcacctcccacaaccgcctcttgggcttcatcagcctccagtgcgcgccgactggaagctcacttcgagtgcagaggacgaggtggagaccacctactctcgatttcaagatttgattcgcgaattaagtcatcgcgatcagtcagagactagagagcttgctgagatgccacccccacagtcccggctcctgcaatacagacaggtccaatcccgctcaccgccagcggtgccatccccaccctcctctacagatcattcgagccatttttcaaacttcaacgataacagtagggacatcgaggtggcaagcaaccctgccttcccccagcggttgcccccccagatattcaattccccattcagcctcccctccgagcacttggcgcctccacctctgaagtacctggctcctgatggggcctggacgttcgctaatttgcagcaaaatcacttaatgggcccaggcttcccatatggccttcctcccctgcctcaccgccctccacagaaccccttcgtgcagatccagaaccatcagcacgcaatcggccaggagccattccatcccctgagcagtcgaacggtgagttctagctcactgccaagcttggaggagtacgagcccaggggacctggtaggccgttataccagcgcaggatatcgtcgagcagcgtccagccttgctcggaagaagtgtccacaccccaagactcattagcccaatgtaaagaactgcaagatcatagcaaccagtcctcctttaacttcagtagccccgagtcctgggtcaataccacatcgtccacaccgtatcagaacattccttgcaatgggagtagcaggactgctcaaccacgcgagctcatcgcacctcctaagactgtgaagccaccggaggatcagctgaaatcggagaatctggaggtcagttccagcttcaattattctgtactgcagcaccttggccagttcccacctctgatgccaaataagcagattgccgaatccgccaattcctcctctcctcagtcttccgcaggaggaaagccagccatgagctacgcctccgccttgcgagcacctcccaagccaaggcccccccctgagcaagcaaaaaaatcaagtgatcctctgagtctgtttcaggaactctctctggggtccagctcagggtccaatggcttttattcttattttaagtag

SEQ ID NO: 182802 - DNA, 5828 bp, Artificial Sequence
  derived and/or modified sequence
atggaagaccggagggcagaaaagagctgtgagcaagcgtgcgaaagcttgaaaagacaggactacgagatggctctgaagcattgcaccgaggccctgctgtctctcggccagtattccatggctgacttcactggaccctgccctctggagattgagagaatcaaaattgaatctttgttgtatcggatcgcttcatttcttcaactgaaaaactatgttcaagcagacgaggactgccgacatgttctcggggaagggctagccaagggagaagacgctttccgcgctgtgctttgctgtatgcagctgaaagggaagctgcaaccggtgagcacaattctcgctaagagtctgaccggggagtcactcaacgggatggtcacaaaggacttgacgaggctaaagacattgctgagcgaaactgagacagccactagcaacgcactcagcggttaccacgtggaggacctcgatgagggttcatgtaacggatggcactttagacccccaccgaggggcatcacaagctccgaagaatacaccctgtgcaagcgcttcctggagcaggggatttgtcggtatggagcacagtgcacctctgctcactcccaggaggaactggccgaatggcaaaagcgatacgcaagccgcctaattaagctgaagcaacagaatgaaaacaaacagctgagtgggtcttacatggaaaccctgattgaaaagtggatgaacagtttatccccggagaaagtgttaagcgaatgtatcgaaggagtcaaggtcgaacataatcccgacctgagcgtgaccgtaagtactaaaaagtcccaccagacctggaccttcgcactgacttgtaaacctgccaggatgctgtaccgtgttgctcttttgtatgacgcgcatcggcctcacttctccataatagcgatctccgctggagattccaccacccaagttagtcaagaggtgccagagaattgccaggaatggatcggcggaaagatggctcagaatggtctggaccattatgtgtataaagtgggcattgctttcaacaccgagatttttggaacattccgccagactatcgtgtttgatttcggtctggagcctgtcctcatgcagagagtgatgatcgatgcagccagtacagaggacctggagtacttgatgcatgccaagcagcagttagtgacaaccgcgaagaggtgggatagctcttccaagactatcatcgacttcgagcctaatgaaacaactgatctcgagaagagtctgctaatccgttaccagattccactttccgctgaccagctcttcacgcagtcagtgcttgacaagagtttgactaagtctaactatcaaagcaggctccacgatttattatacatcgaggaaattgcacagtataaggaaatttctaagttcaatctgaaagtgcagctccagatactcgcctcattcatgcttacaggcgtgtctggaggagccaaatatgctcagaacggacaattgttcgggaggtttaagctgacagaaaccttatccgaggacaccctggctgggagactcgtgatgactaaggtcaatgctgtttatttgctccctgtgccaaaacagaagctcgtgcaaacccaggggacaaaagagaaggtgtacgaggccacaatcgaagaaaaaacgaaagagtacatattcctgcgattgagcagggagtgctgtgaagagctgaaccttcgacctgactgcgacacccaagtagaattgcaatttcagctgaacaggttgcccctgtgcgagatgcactacgcgctggacagaattaaggataacggcgttctatttcccgacataagcatgacaccaaccatcccctggagccctaaccggcagtgggatgaacagcttgacccccgactgaatgctaaacaaaaggaagctgttcttgccattaccacgccgctcgccattcagttgcctcccgtgctgatcatcgggccttacggcacaggcaagacctttacgcttgcacaagccgtgaagcacatcctccagcagcaggagacaaggatactaatctgcactcactcaaattctgccgctgacctgtatataaaggattacctgcacccctatgtcgaggccggaaacccacaggccagaccactgagagtgtattttagaaatcgttgggttaagaccgtgcaccccgtggtccatcaatactgtttgatttctagcgctcatagcacgtttcagatgccgcagaaagaggatattctgaagcatcgggtggttgttgtcactctgaacacaagtcaatatctgtgtcaactggatcttgaacctgggtttttcacacatatcctgctggatgaggccgctcaggctatggaatgcgaaaccattatgcctctggcattggcaacacagaacactaggatcgtgcttgctggtgatcatatgcagttaagcccattcgtgtactccgaatttgccagggagcgcaacctgcatgtatctctgcttgaccgtttatacgagcattaccctgctgagtttccttgtcgcattctgttatgcgagaactatcggtcccacgaggcaattatcaattacacaagcgagctcttctacgagggtaaacttatggcttctggcaagcagcctgcacacaaggacttctaccccctgacattctttaccgcccgtggggaagatgttcaggagaaaaacagcaccgctttctacaataatgcagaagtctttgaagtggttgaaagagtcgaggaattgcggcgaaagtggcctgtggcttggggaaagctggacgatggcagcattggggtcgtgacaccatacgccgaccaggtatttcgcattagagccgagctgcgtaagaagaggctctccgacgtgaacgttgagcgggtgctgaatgtgcagggtaagcagttcagagtgctgtttctttccacagtccgtacgcgccatacgtgtaagcacaagcaaaccccaatcaaaaagaaagagcagttgctggaggacagcaccgaggatctggactatggcttcctaagcaactacaaacttctgaacactgccatcactagagcccaaagtctcgtagcagttgttggcgatcctatcgccctgtgcagtatcgggcgatgcagaaagttctgggaaagattcattgcactgtgccatgaaaatagtagtctgcacggtatcacatttgagcagattaaggcccagttggaggccctggaacttaagaaaacctacgtcctcaatcctctggccccagaattcatccccagggcgctgcgactgcagcactctggctccaccaacaagcagcagcagtcacccccaaagggcaaatcactgcaccacacccagaatgatcacttccagaacgacggcattgtccagccaaatcctagtgtcttaatcggcaatcccatccgggcttacacacctccaccacctctgggaccccatcctaacctcggcaaatccccatcacccgtgcaaaggatagatccccatacaggaactagcatcctgtacgtgcctgccgtatacggaggcaatgttgtgatgtctgtgcccctccctgtaccctggacggggtatcagggcagattcgcagttgacccaagaatcatcacccatcaagccgcaatggcatacaatatgaacttgctgcagacgcacggacgcggatcccccatcccctatggcctgggacatcacccacctgtgacgattggccagccacagaatcagcatcaagaaaaggatcagcacgaacagaacagaaatggaaagtcagatacaaataactctggtcccgagattaataaaatacggacaccagagaagaaacctacagaacccaagcaggtggacctggagagtaatcctcagaatcgcagccctgagtccagaccaagcgtggtgtaccccagcacgaagttccctcgcaaagacaatctgaatcccagacacatcaacctacctctccccgcaccacatgcccaatacgcaatccccaatcgacacttccatcctctgccccagcttccgagaccacccttcccaattccacagcagcataccctcctgaaccagcaacagaacaatctaccagaacaacctaaccagatccctccacagcctaatcaagtggtccagcagcagtctcaattaaatcagcaacctcaacagccgcctccccagctgtcccccgcatatcaggcaggacccaacaacgccttctttaactccgcggtcgcccacaggccccagagcccaccggcagaggcagtcattcctgaacagcagccaccaccaatgctacaggaaggacacagcccgctcagggccatagcgcaacctggcccaatcttacctagccatcttaatagctttatcgatgaaaatccctctggtctacccataggggaggctctagaccggattcacggcagcgtagctcttgagaccctcagacagcagcaggcacggtttcaacagtggtcagagcatcacgcctttctatcccaaggctcggccccatatccccaccaccatcatcctcacctgcagcatcttcctcagcctccactcggtttgcatcagccccctgtccgcgctgactggaagcttacttcgagcgcggaggatgaagttgaaaccacttactctcgtttccaggacctgattcgtgagctcagtcaccgcgaccagtcggaaacaagagaactcgccgaaatgccccctcctcagagtcgtcttctccaataccggcaggttcaatcaaggagtcctcccgcagttccctcaccccctagttcaacagatcatagttcccacttttcaaacttcaacgataacagcagggatatcgaggtggcctctaaccctgcttttccccagaggctccctccacagatatttaacagtccattctccctgccctccgaacatctcgcccctcctcccctgaaatatctcgcacccgacggggcttggacctttgccaacctgcaacagaaccacttaatgggacccggatttccttacggacttccaccccttccccatcggcctccacagaacccctttgtgcagattcagaaccatcagcatgccatcgggcaggagccctttcacccgctgtcctcccggaccgtcagttcctcctccttacccagtctggaagagtacgagccacgcggtcccggacggccactgtaccagcgccgaatttccagctcatcagtgcagccttgttccgaggaggtttcaactcctcaggattctctggcgcaatgcaaagaactgcaggaccatagcaatcaaagttcgttcaacttctctagtcctgagtcttgggttaatactaccagctctacgccctaccagaatattccctgcaacgggtcatctagaacagcacagcctcgggagctcatcgcgccacccaagaccgtgaaacctcccgaggaccaactcaaatcagagaacctggaggtgtccagcagcttcaattactctgtgctgcaacacctcggccaatttccacccctcatgccaaacaagcagattgccgagtcggcgaactcatcatctccccagagcagcgcaggaggaaagcccgcaatgtcttatgcctccgcgctcagagcgccacccaagcctcgacctcccccagaacaagcgaagaagtccagcgacccactgagccttttccaagagttgtctctgggctcgtcttctggctcgaacggcttctactcttacttcaagta

SEQ ID NO: 182803 - DNA, 5829 bp, Artificial Sequence
  derived and/or modified sequence
atggaggacagaagagccgagaagagctgcgagcaggcctgcgagagcctgaagagacaggactacgagatggccctgaagcactgcaccgaggccctgctgagcctgggccagtacagcatggccgacttcaccggcccctgccccctggagatcgagagaatcaagatcgagagcctgctgtacagaatcgccagcttcctgcagctgaagaactacgtgcaggccgacgaggactgcagacacgtgctgggcgagggcctggccaagggcgaggacgccttcagagccgtgctgtgctgcatgcagctgaagggcaagctgcagcccgtgagcaccatcctggccaagagcctgaccggcgagagcctgaacggcatggtgaccaaggacctgaccagactgaagaccctgctgagcgagaccgagaccgccaccagcaacgccctgagcggctaccacgtggaggacctggacgagggcagctgcaacggctggcacttcagacccccccccagaggcatcaccagcagcgaggagtacaccctgtgcaagagattcctggagcagggcatctgcagatacggcgcccagtgcaccagcgcccacagccaggaggagctggccgagtggcagaagagatacgccagcagactgatcaagctgaagcagcagaacgagaacaagcagctgagcggcagctacatggagaccctgatcgagaagtggatgaacagcctgagccccgagaaggtgctgagcgagtgcatcgagggcgtgaaggtggagcacaaccccgacctgagcgtgaccgtgagcaccaagaagagccaccagacctggaccttcgccctgacctgcaagcccgccagaatgctgtacagagtggccctgctgtacgacgcccacagaccccacttcagcatcatcgccatcagcgccggcgacagcaccacccaggtgagccaggaggtgcccgagaactgccaggagtggatcggcggcaagatggcccagaacggcctggaccactacgtgtacaaggtgggcatcgccttcaacaccgagatcttcggcaccttcagacagaccatcgtgttcgacttcggcctggagcccgtgctgatgcagagagtgatgatcgacgccgccagcaccgaggacctggagtacctgatgcacgccaagcagcagctggtgaccaccgccaagagatgggacagcagcagcaagaccatcatcgacttcgagcccaacgagaccaccgacctggagaagagcctgctgatcagataccagatccccctgagcgccgaccagctgttcacccagagcgtgctggacaagagcctgaccaagagcaactaccagagcagactgcacgacctgctgtacatcgaggagatcgcccagtacaaggagatcagcaagttcaacctgaaggtgcagctgcagatcctggccagcttcatgctgaccggcgtgagcggcggcgccaagtacgcccagaacggccagctgttcggcagattcaagctgaccgagaccctgagcgaggacaccctggccggcagactggtgatgaccaaggtgaacgccgtgtacctgctgcccgtgcccaagcagaagctggtgcagacccagggcaccaaggagaaggtgtacgaggccaccatcgaggagaagaccaaggagtacatcttcctgagactgagcagagagtgctgcgaggagctgaacctgagacccgactgcgacacccaggtggagctgcagttccagctgaacagactgcccctgtgcgagatgcactacgccctggacagaatcaaggacaacggcgtgctgttccccgacatcagcatgacccccaccatcccctggagccccaacagacagtgggacgagcagctggaccccagactgaacgccaagcagaaggaggccgtgctggccatcaccacccccctggccatccagctgccccccgtgctgatcatcggcccctacggcaccggcaagaccttcaccctggcccaggccgtgaagcacatcctgcagcagcaggagaccagaatcctgatctgcacccacagcaacagcgccgccgacctgtacatcaaggactacctgcacccctacgtggaggccggcaacccccaggccagacccctgagagtgtacttcagaaacagatgggtgaagaccgtgcaccccgtggtgcaccagtactgcctgatcagcagcgcccacagcaccttccagatgccccagaaggaggacatcctgaagcacagagtggtggtggtgaccctgaacaccagccagtacctgtgccagctggacctggagcccggcttcttcacccacatcctgctggacgaggccgcccaggccatggagtgcgagaccatcatgcccctggccctggccacccagaacaccagaatcgtgctggccggcgaccacatgcagctgagccccttcgtgtacagcgagttcgccagagagagaaacctgcacgtgagcctgctggacagactgtacgagcactaccccgccgagttcccctgcagaatcctgctgtgcgagaactacagaagccacgaggccatcatcaactacaccagcgagctgttctacgagggcaagctgatggccagcggcaagcagcccgcccacaaggacttctaccccctgaccttcttcaccgccagaggcgaggacgtgcaggagaagaacagcaccgccttctacaacaacgccgaggtgttcgaggtggtggagagagtggaggagctgagaagaaagtggcccgtggcctggggcaagctggacgacggcagcatcggcgtggtgaccccctacgccgaccaggtgttcagaatcagagccgagctgagaaagaagagactgagcgacgtgaacgtggagagagtgctgaacgtgcagggcaagcagttcagagtgctgttcctgagcaccgtgagaaccagacacacctgcaagcacaagcagacccccatcaagaagaaggagcagctgctggaggacagcaccgaggacctggactacggcttcctgagcaactacaagctgctgaacaccgccatcaccagagcccagagcctggtggccgtggtgggcgaccccatcgccctgtgcagcatcggcagatgcagaaagttctgggagagattcatcgccctgtgccacgagaacagcagcctgcacggcatcaccttcgagcagatcaaggcccagctggaggccctggagctgaagaagacctacgtgctgaaccccctggcccccgagttcatccccagagccctgagactgcagcacagcggcagcaccaacaagcagcagcagagcccccccaagggcaagagcctgcaccacacccagaacgaccacttccagaacgacggcatcgtgcagcccaaccccagcgtgctgatcggcaaccccatcagagcctacaccccccccccccccctgggcccccaccccaacctgggcaagagccccagccccgtgcagagaatcgacccccacaccggcaccagcatcctgtacgtgcccgccgtgtacggcggcaacgtggtgatgagcgtgcccctgcccgtgccctggaccggctaccagggcagattcgccgtggaccccagaatcatcacccaccaggccgccatggcctacaacatgaacctgctgcagacccacggcagaggcagccccatcccctacggcctgggccaccacccccccgtgaccatcggccagccccagaaccagcaccaggagaaggaccagcacgagcagaacagaaacggcaagagcgacaccaacaacagcggccccgagatcaacaagatcagaacccccgagaagaagcccaccgagcccaagcaggtggacctggagagcaacccccagaacagaagccccgagagcagacccagcgtggtgtaccccagcaccaagttccccagaaaggacaacctgaaccccagacacatcaacctgcccctgcccgccccccacgcccagtacgccatccccaacagacacttccaccccctgccccagctgcccagaccccccttccccatcccccagcagcacaccctgctgaaccagcagcagaacaacctgcccgagcagcccaaccagatccccccccagcccaaccaggtggtgcagcagcagagccagctgaaccagcagccccagcagccccccccccagctgagccccgcctaccaggccggccccaacaacgccttcttcaacagcgccgtggcccacagaccccagagcccccccgccgaggccgtgatccccgagcagcagcccccccccatgctgcaggagggccacagccccctgagagccatcgcccagcccggccccatcctgcccagccacctgaacagcttcatcgacgagaaccccagcggcctgcccatcggcgaggccctggacagaatccacggcagcgtggccctggagaccctgagacagcagcaggccagattccagcagtggagcgagcaccacgccttcctgagccagggcagcgccccctacccccaccaccaccacccccacctgcagcacctgccccagccccccctgggcctgcaccagccccccgtgagagccgactggaagctgaccagcagcgccgaggacgaggtggagaccacctacagcagattccaggacctgatcagagagctgagccacagagaccagagcgagaccagagagctggccgagatgccccccccccagagcagactgctgcagtacagacaggtgcagagcagaagcccccccgccgtgcccagcccccccagcagcaccgaccacagcagccacttcagcaacttcaacgacaacagcagagacatcgaggtggccagcaaccccgccttcccccagagactgcccccccagatcttcaacagccccttcagcctgcccagcgagcacctggcccccccccccctgaagtacctggcccccgacggcgcctggaccttcgccaacctgcagcagaaccacctgatgggccccggcttcccctacggcctgccccccctgccccacagacccccccagaaccccttcgtgcagatccagaaccaccagcacgccatcggccaggagcccttccaccccctgagcagcagaaccgtgagcagcagcagcctgcccagcctggaggagtacgagcccagaggccccggcagacccctgtaccagagaagaatcagcagcagcagcgtgcagccctgcagcgaggaggtgagcaccccccaggacagcctggcccagtgcaaggagctgcaggaccacagcaaccagagcagcttcaacttcagcagccccgagagctgggtgaacaccaccagcagcaccccctaccagaacatcccctgcaacggcagcagcagaaccgcccagcccagagagctgatcgccccccccaagaccgtgaagccccccgaggaccagctgaagagcgagaacctggaggtgagcagcagcttcaactacagcgtgctgcagcacctgggccagttcccccccctgatgcccaacaagcagatcgccgagagcgccaacagcagcagcccccagagcagcgccggcggcaagcccgccatgagctacgccagcgccctgagagccccccccaagcccagacccccccccgagcaggccaagaagagcagcgaccccctgagcctgttccaggagctgagcctgggcagcagcagcggcagcaacggcttctacagctacttcaagtag

SEQ ID NO: 182804 - protein, 648 aa, Artificial Sequence
  derived and/or modified sequence
MEVKGKKQFTGKSTKTAQEKNRFHKNSDSGSSKTFPTRKVAKEGGPKVTSRNFEKSITKLGKKGVKQFKNKQQGDKSPKNKFQPANKFNKKRKFQPDGRSDESAAKKPKWDDFKKKKKELKQSRQLSDKTNYDIVVRAKQMWEILRRKDCDKEKRVKLMSDLQKLIQGKIKTIAFAHDSTRVIQCYIQYGNEEQRKQAFEELRDDLVELSKAKYSRNIVKKFLMYGSKPQIAEIIRSFKGHVRKMLRHAEASAIVEYAYNDKAILEQRNMLTEELYGNTFQLYKSADHRTLDKVLEVQPEKLELIMDEMKQILTPMAQKEAVIKHSLVHKVFLDFFTYAPPKLRSEMIEAIREAVVYLAHTHDGARVAMHCLWHGTPKDRKVIVKTMKTYVEKVANGQYSHLVLLAAFDCIDDTKLVKQIIISEIISSLPSIVNDKYGRKVLLYLLSPRDPAHTVREIIEVLQKGDGNAHSKKDTEVRRRELLESISPALLSYLQEHAQEVVLDKSACVLVSDILGSATGDVQPTMNAIASLAATGLHPGGKDGELHIAEHPAGHLVLKWLIEQDKKMKENGREGCFAKTLVEHVGMKNLKSWASVNRGAIILSSLLQSCDLEVANKVKAALKSLIPTLEKTKSTSKGIEILLEKLST

SEQ ID NO: 182805 - DNA, 1947 bp, Artificial Sequence
  derived and/or modified sequence
atggaagtcaagggcaaaaaacagtttaccggcaagtccaccaaaacagcacaggagaaaaataggttccacaagaacagcgacagtgggagtagcaagacgtttcccacacggaaggtggctaaggaggggggcccaaaagtgaccagcagaaattttgaaaaatctatcacaaagttaggaaagaagggcgttaaacagtttaaaaataagcagcagggggataagtccccaaaaaataaattccagccggcaaataagttcaataaaaaacgcaaatttcagcccgacgggcgctcagatgagtcagctgccaagaagcccaaatgggatgatttcaagaagaagaagaaagaactgaaacagtctcgacaactgtctgacaaaaccaactatgacatcgtagtccgggcaaagcaaatgtgggaaatcctcaggcgtaaggactgtgacaaagaaaaaagggtcaagctcatgtctgatctacagaaactgatacaaggcaagatcaaaaccatcgctttcgcacacgattctactagagtaatacaatgctatattcaatacggcaacgaggaacaacgaaaacaggctttcgaggagctgagggatgacctcgtggagctctccaaggcaaaatattcacgaaatatcgttaaaaaatttctgatgtacgggtctaagcctcagattgctgaaatcattcgatcattcaaggggcatgtccgcaagatgctccgccacgccgaggcttccgcaatcgtggagtatgcatataatgacaaagccatactggaacagcggaatatgctgaccgaagaattgtatgggaatacctttcagctgtataagtccgccgaccacaggacactggacaaggttcttgaagttcagccagagaagctggagctgatcatggatgagatgaagcagattttaacccctatggcacagaaagaggccgtgatcaagcactcgctggttcacaaagtctttctggatttcttcacatatgcccccccaaagctgcgttctgagatgatagaggcaataagagaggcggtggtctatctggctcacacacacgacggcgctagggttgcaatgcactgcctttggcatgggacaccgaaggacagaaaagtgatcgtcaaaacaatgaaaacttatgttgaaaaagtggccaatggccaatattcgcacctggtactgctggccgctttcgattgcatcgacgacacgaaactggtcaagcaaataattatatccgaaataataagctctctaccgagcatagtgaatgacaagtacggcagaaaagtgcttttgtatctcctctccccaagggatccggcacacactgtacgcgaaatcattgaagtgctccagaaaggtgatggaaatgcccactctaagaaagacactgaagttagaaggagggagctgctggagtctatttctccagccctcctatcctacctacaggaacatgcccaagaggttgtgctcgacaaatctgcctgcgttctggtgagtgatatcctcggctccgctactggcgatgtccagcccactatgaatgccatcgcctctctggctgccactggactccacccaggcggcaaggatggtgaactccacatcgctgagcatccagccggacaccttgtcttaaagtggttgatcgagcaggataagaagatgaaggaaaacgggagagagggctgcttcgccaagactctggtcgagcatgtgggcatgaaaaacctgaagagctgggcgagcgtcaaccggggagccatcatactgagctcgttgcttcagagttgtgatctggaggtcgctaataaggtgaaggctgctctaaagagcctgattcctaccctcgagaaaaccaaatcaacatctaaagggatcgagatcctcttggaaaagctgagtacctag

SEQ ID NO: 182806 - DNA, 1947 bp, Artificial Sequence
  derived and/or modified sequence
atggaggtgaagggcaagaagcagttcaccgggaagagcaccaagacagcccaggagaagaaccgcttccacaagaacagcgacagcggcagcagcaagaccttccccaccaggaaggtggccaaggagggcggccccaaggtgaccagcaggaactttgagaagagcatcaccaagctgggcaagaagggcgtgaagcagttcaagaacaagcagcagggcgacaagagccccaagaacaagttccagcctgccaacaagttcaacaagaagaggaagttccagccagatggccgcagtgatgaatctgctgccaagaagcccaagtgggatgacttcaagaagaagaagaaggagctgaagcagagccggcagctgagtgacaagaccaactatgacatcgtggtgcgggccaagcagatgtgggagatcctgcggaggaaggactgtgacaaggagaagagggtgaagctgatgtctgacctgcagaagctgatccagggcaagatcaagaccatcgcctttgcccatgacagcaccagggtcatccagtgctacatccagtatggaaatgaggagcagaggaagcaggcctttgaggagctgagagatgacctggtggagctgagcaaggccaagtacagcaggaacatcgtgaagaagttcctgatgtatggcagcaagccccagattgctgagatcatccgctccttcaagggccacgtgaggaagatgctgcggcatgctgaggccagcgccatcgtggagtatgcctacaatgacaaggccatcctggagcagaggaacatgctgacagaggagctgtatggcaacaccttccagctgtacaagtctgctgaccacaggaccctggacaaggtgctggaggtgcagcctgagaagctggagctgatcatggatgagatgaagcagatcctgacccccatggcccagaaggaggccgtcatcaagcacagcctggtgcacaaggtgttcctggacttcttcacctacgccccacccaagctgcggtctgagatgattgaggccatccgggaggccgtggtgtacctggcccacacccatgatggagcccgggtggccatgcactgcctgtggcacggcacccccaaggacaggaaggtgattgtgaagaccatgaagacctacgtggagaaggtggccaacggccagtacagccacctggtgctgctggccgcctttgactgcattgatgacaccaagctggtgaagcagatcatcatcagcgagatcatcagcagcctgcccagcatcgtgaatgacaagtatggcaggaaggtgctgctgtacctgctgagcccccgggaccctgcccacacagtgcgggagatcatcgaggtgctgcagaagggagatggaaatgcccacagcaagaaggacacagaggtgagaagaagagagctgctggagagcatcagccctgccctgctgagctacctgcaggagcacgcccaggaggtggtgctggacaagagcgcctgtgtgctggtgtctgacatcctgggcagcgccactggagatgtgcagcccaccatgaatgccatcgccagcctggccgccaccggcctgcaccctgggggcaaggatggagagctgcacatcgccgagcaccctgctggccacctggtgctgaagtggctgattgagcaggacaagaagatgaaggaaaatggccgggagggctgctttgccaagaccctggtggagcacgtgggcatgaagaacctgaagtcctgggcctctgtgaacagaggagccatcatcctgagcagcctgctgcagagctgtgacctggaggtggccaacaaggtgaaggccgccctgaagagcctcatccccaccctggagaagaccaagagcaccagcaaaggaattgagatcctgctggagaagctgagcacctag

SEQ ID NO: 182807 - DNA, 1947 bp, Artificial Sequence
  derived and/or modified sequence
atggaggtgaagggcaagaagcagttcaccggcaagagcaccaagactgctcaggagaagaatagattccacaaaaattcagatagcggtagttctaaaacctttcctactcgaaaggtcgccaaagaaggggggcccaaggtgacttcacgcaacttcgaaaaatctataaccaaacttggtaaaaagggggtaaagcagttcaagaataaacaacaaggagacaaatcaccaaaaaataagttccagccagcaaataaatttaataaaaagcggaaatttcagcccgatggtcgatccgatgaatccgcagccaagaaacctaaatgggatgattttaagaagaagaaaaaagagctcaaacagagtaggcagctcagcgataagactaactatgacatcgtggttcgagcgaaacagatgtgggaaattctgagaagaaaggactgtgacaaggagaaaagagtcaagcttatgagcgacttgcagaagcttattcagggcaagatcaagacaatcgcttttgcccatgactcaacaagggtcattcagtgctatatacagtacggtaatgaggaacagcgaaagcaggcatttgaagagctccgcgatgacctcgtagagctgtccaaagccaaatactctcggaacatcgtgaaaaaatttcttatgtacggatcaaaacctcagatagctgaaatcattcggtccttcaaggggcacgtgaggaagatgctgagacacgccgaagcctccgcgatagtggaatatgcctacaacgacaaggctattctggaacagcgcaatatgcttaccgaggagctgtacggaaatacttttcagctctacaagtccgcagaccaccgaacgctggacaaagtcctggaggtgcaacccgagaagctagagctgataatggatgagatgaaacagatcctcaccccaatggctcagaaggaggcggtcattaagcacagtctcgtgcataaagtatttctggacttcttcacgtacgccccacccaaactccggagcgaaatgatagaggcaatccgtgaagctgttgtgtatctggcccacacacatgatggggcccgtgtggcgatgcactgcctttggcacgggacacccaaggaccggaaggtgattgtgaaaactatgaagacctacgttgagaaggtcgctaacgggcagtatagccacctagtgcttctagcggccttcgattgtattgatgacactaagctcgtgaagcaaatcattatttcagaaattatcagctccctgcccagcattgtgaatgataagtacggtcgaaaggtgctgctctacctactcagccccagagaccctgcccacaccgtgagagagataatcgaggtcctgcagaagggtgatgggaatgctcacagcaaaaaagacactgaggtccgccggcgtgagcttctggaatcaatcagccctgcactgctctcatatctgcaggagcacgctcaggaggtcgttttggacaaatctgcttgtgttctggtgagtgatattcttggttcagctacaggtgacgttcaaccaacaatgaatgccatcgcctctttggctgcgacaggtttgcatcctggagggaaggatggcgagctgcacatcgcagagcaccccgcaggccatctcgtactcaagtggcttattgagcaggataagaagatgaaggagaatgggcgcgaaggatgttttgctaagacactcgtcgagcacgtgggcatgaagaatctaaaatcttgggcctccgtaaaccgtggagcaattatcctctctagcctgctgcaatcgtgcgatctggaagtggctaataaggtaaaagccgccctgaagagcctgattcctaccctggagaagactaagtccacttctaagggcattgaaatactcttggagaaactgtccacatag

SEQ ID NO: 182808 - DNA, 1947 bp, Artificial Sequence
  derived and/or modified sequence
atggaggtgaagggaaaaaaacaattcacagggaagtccacaaagaccgctcaagagaaaaaccgctttcataagaattccgatagcggctcctccaaaacattcccaaccagaaaggtggcgaaggaggggggacctaaggtgacaagcaggaattttgagaagagcatcacaaagctgggcaaaaagggggttaagcagttcaagaataagcagcaaggagacaaatctccaaagaacaaatttcagcctgcaaacaaatttaacaagaaacgaaaattccaaccagatggacggtccgatgaaagcgctgccaaaaagccaaaatgggacgactttaaaaagaagaaaaaggaattgaaacagtcccgccagctttcagacaaaacaaactatgatattgtcgtcagggctaagcagatgtgggagatcctgcgcagaaaggattgtgataaggagaaaagggtcaagctgatgtcagacctgcagaagctaatccagggtaagataaagacgatcgcgtttgctcacgactcaaccagggtgatccaatgctacatacagtacggaaatgaggagcaacgcaagcaagcattcgaagaactgagggacgacctcgttgaattgtctaaagccaaatactcgagaaacatcgtcaagaagtttctgatgtatggcagtaagccccaaattgccgaaataatcaggagttttaagggacatgtccgcaagatgttgcgacacgccgaagcctctgccatcgttgagtacgcatataacgataaggcaatcctggaacaacgcaatatgctcaccgaagagttatatgggaacacatttcagctgtataaatccgctgaccataggaccttagacaaagtcttggaggtacagcccgagaaacttgagctcattatggatgagatgaagcagatcctgacccccatggcccaaaaagaagccgtaatcaagcattctctagtccacaaagtctttctggatttctttacatatgccccaccaaagctgcgatccgagatgatcgaagcaattagagaggcagttgtatacctcgcacacacccacgatggggcacgggtggctatgcattgcctatggcatgggaccccaaaagaccgaaaagttattgtcaaaacaatgaagacatacgttgaaaaggttgccaatggccagtactcgcatctggtgctgcttgccgcatttgactgcatcgacgatacgaagctcgttaagcagattattatctccgagatcatctcctctcttccatcgatcgtcaacgacaaatacggcaggaaggttctgctctacttactctcacctcgcgacccagcccacaccgttcgagagattatagaagtcctacaaaagggcgacggcaatgcccacagcaagaaagataccgaagtgcgcagaagagagcttctagaatccatttcacccgctctgctctcatatttacaggaacacgcccaagaggttgtcctggataagagcgcatgcgtgctcgtgtcagacatactgggcagtgccaccggtgacgtccagcccacaatgaatgctatcgcaagtctcgccgcaacaggcctacatccgggaggcaaggacggcgagctccacatcgccgaacacccggctggtcatctggtgttgaagtggttgatagagcaggataaaaagatgaaggagaatggacgagagggctgctttgccaaaaccctggttgagcatgtcggaatgaaaaacttgaaaagctgggcatccgtgaatcgcggtgcaattatccttagctccctactccagtcctgtgatctggaagtcgcgaacaaagttaaagcagccctcaagtctctgatcccaactctggaaaagactaagagcacgtctaaagggatagaaattctccttgagaagttgtcaacgtag

SEQ ID NO: 182809 - DNA, 2321 bp, Artificial Sequence
  derived and/or modified sequence
gcctcaagaggaggcataacagcagcggaccaatagaaattccgaatttttgtattctctgggaagctccacctcttagtccctgatccgccgcggaagatgaaaaaaagcggcccgggggcggagcaaggcaaggaagcggaagcggagaggcggtcgggatccgctgcgcgagctgtctcggtcccacgtgtgcgagttgctacgatggaagttaaagggaaaaagcaattcacaggaaagagtacaaagacagcacaagaaaaaaacagatttcataaaaatagtgattctggttcttcaaagacatttccaacaaggaaagttgctaaagaaggtggacctaaagtcacatctaggaactttgagaaaagtatcacaaaacttgggaaaaagggtgtaaagcagttcaagaataagcagcaaggggacaaatcaccaaagaacaaattccagccggcaaataaattcaacaagaagagaaaattccagccagatggtagaagcgatgaatcagcagccaagaagcccaaatgggatgacttcaaaaagaagaagaaagaactgaagcaaagcagacaactcagtgataaaaccaactatgacattgttgttcgggcaaagcagatgtgggagattttaagaagaaaagactgtgacaaagaaaaaagagtaaagttaatgagtgatttgcagaagttgattcaagggaaaattaaaactattgcatttgcacacgattcaactcgtgtgatccagtgttacattcagtatggtaatgaagaacagagaaaacaggcttttgaagaattgcgagatgatttggttgagttaagtaaagccaaatattcgagaaatattgttaagaaatttctcatgtatggaagtaaaccacagattgcagagataatcagaagttttaaaggccacgtgaggaagatgctgcggcatgcggaagcatcagccatcgtggagtacgcatacaatgacaaagccattttggagcagaggaacatgctgacggaagagctctatgggaacacatttcagctttacaagtcagcagatcaccgaactctggacaaagtgttagaggtacagccagaaaaattagaacttattatggatgaaatgaaacagattctaactccaatggcccaaaaggaagctgtgattaagcactcattggtgcataaagtattcttggacttttttacctatgcaccccccaaactcagatcagaaatgattgaagccatccgcgaagcggtggtctacctggcacacacacacgatggcgccagagtggccatgcactgcctgtggcatggcacgcccaaggacaggaaagtgattgtgaaaacaatgaagacttatgttgaaaaggtggctaatggccaatactcccatttggttttactggcggcatttgattgtattgatgatactaagcttgtgaagcagataatcatatcagaaattatcagttcattgcctagcatagtaaatgacaaatatggaaggaaggtcctattgtacttactaagccccagagatcctgcacatacagtacgagaaatcattgaagttctgcaaaaaggagatggaaatgcacacagtaagaaagatacagaggtccgcagacgggagctcctagaatccatttctccagctttgttaagctacctgcaagaacacgcccaagaagtggtgctagataagtctgcgtgtgtgttggtgtctgacattctgggatctgccactggagacgttcagcctaccatgaatgccatcgccagcttggcagcaacaggactgcatcctggtggcaaggacggagagcttcacattgcagaacatcctgcaggacatctagttctgaagtggttaatagagcaagataaaaagatgaaagaaaatgggagagaaggttgttttgcaaaaacacttgtagagcatgttggtatgaagaacctgaagtcctgggctagtgtaaatcgaggtgccattattctttctagcctcctccagagttgtgacctggaagttgcaaacaaagtcaaagctgcactgaaaagcttgattcctacattggaaaaaaccaaaagcaccagcaaaggaatagaaattctacttgaaaaactgagcacataggtggaaagagttaagagcaagatggaatgattttttctgttctctgttctgtttcccaatgcagaaaagaaggggtagggtccaccatactggtaattggggtactctgtatatgtgtttcttctttgtatacgaatctatttatataaattgtttttttaaatggt

SEQ ID NO: 182810 - DNA, 1947 bp, Artificial Sequence
  derived and/or modified sequence
atggaggtgaagggcaagaagcagttcaccggcaagagcaccaagaccgcccaggagaagaacagattccacaagaacagcgacagcggcagcagcaagaccttccccaccagaaaggtggccaaggagggcggccccaaggtgaccagcagaaacttcgagaagagcatcaccaagctgggcaagaagggcgtgaagcagttcaagaacaagcagcagggcgacaagagccccaagaacaagttccagcccgccaacaagttcaacaagaagagaaagttccagcccgacggcagaagcgacgagagcgccgccaagaagcccaagtgggacgacttcaagaagaagaagaaggagctgaagcagagcagacagctgagcgacaagaccaactacgacatcgtggtgagagccaagcagatgtgggagatcctgagaagaaaggactgcgacaaggagaagagagtgaagctgatgagcgacctgcagaagctgatccagggcaagatcaagaccatcgccttcgcccacgacagcaccagagtgatccagtgctacatccagtacggcaacgaggagcagagaaagcaggccttcgaggagctgagagacgacctggtggagctgagcaaggccaagtacagcagaaacatcgtgaagaagttcctgatgtacggcagcaagccccagatcgccgagatcatcagaagcttcaagggccacgtgagaaagatgctgagacacgccgaggccagcgccatcgtggagtacgcctacaacgacaaggccatcctggagcagagaaacatgctgaccgaggagctgtacggcaacaccttccagctgtacaagagcgccgaccacagaaccctggacaaggtgctggaggtgcagcccgagaagctggagctgatcatggacgagatgaagcagatcctgacccccatggcccagaaggaggccgtgatcaagcacagcctggtgcacaaggtgttcctggacttcttcacctacgccccccccaagctgagaagcgagatgatcgaggccatcagagaggccgtggtgtacctggcccacacccacgacggcgccagagtggccatgcactgcctgtggcacggcacccccaaggacagaaaggtgatcgtgaagaccatgaagacctacgtggagaaggtggccaacggccagtacagccacctggtgctgctggccgccttcgactgcatcgacgacaccaagctggtgaagcagatcatcatcagcgagatcatcagcagcctgcccagcatcgtgaacgacaagtacggcagaaaggtgctgctgtacctgctgagccccagagaccccgcccacaccgtgagagagatcatcgaggtgctgcagaagggcgacggcaacgcccacagcaagaaggacaccgaggtgagaagaagagagctgctggagagcatcagccccgccctgctgagctacctgcaggagcacgcccaggaggtggtgctggacaagagcgcctgcgtgctggtgagcgacatcctgggcagcgccaccggcgacgtgcagcccaccatgaacgccatcgccagcctggccgccaccggcctgcaccccggcggcaaggacggcgagctgcacatcgccgagcaccccgccggccacctggtgctgaagtggctgatcgagcaggacaagaagatgaaggagaacggcagagagggctgcttcgccaagaccctggtggagcacgtgggcatgaagaacctgaagagctgggccagcgtgaacagaggcgccatcatcctgagcagcctgctgcagagctgcgacctggaggtggccaacaaggtgaaggccgccctgaagagcctgatccccaccctggagaagaccaagagcaccagcaagggcatcgagatcctgctggagaagctgagcacctag

SEQ ID NO: 182811 - protein, 338 aa, Artificial Sequence
  derived and/or modified sequence
MINSTSTQPPDESCSQNLLITQQIIPVLYCMVFIAGILLNGVSGWIFFYVPSSKSFIIYLKNIVIADFVMSLTFPFKILGDSGLGPWQLNVFVCRVSAVLFYVNMYVSIVFFGLISFDRYYKIVKPLWTSFIQSVSYSKLLSVIVWMLMLLLAVPNIILTNQSVREVTQIKCIELKSELGRKWHKASNYIFVAIFWIVFLLLIVFYTAITKKIFKSHLKSSRNSTSVKKKSSRNIFSIVFVFFVCFVPYHIARIPYTKSQTEAHYSCQSKEILRYMKEFTLLLSAANVCLDPIIYFFLCQPFREILCKKLHIPLKAQNDLDISRIKRGNTTLESTDTL

SEQ ID NO: 182812 - protein, 96 aa, Artificial Sequence
  derived and/or modified sequence
MINSTSTQPPDESCSQNLLITQQIIPVLYCMVFIAGILLNGVSGWIFFYVPSSKSFIIYLKNIVIADFVMSLTFPFKILGDSGLGPWQLNVFVCRV

SEQ ID NO: 182813 - DNA, 1017 bp, Artificial Sequence
  derived and/or modified sequence
atgatcaacagcaccagcacccagccccccgacgagagctgcagccagaacctgctgatcacccagcagatcatccccgtgctgtactgcatggtgttcatcgccggcatcctgctgaacggcgtgagcggctggatcttcttctacgtgcccagcagcaagagcttcatcatctacctgaagaacatcgtgatcgccgacttcgtgatgagcctgaccttccccttcaagatcctgggcgacagcggcctgggcccctggcagctgaacgtgttcgtgtgcagagtgagcgccgtgctgttctacgtgaacatgtacgtgagcatcgtgttcttcggcctgatcagcttcgacagatactacaagatcgtgaagcccctgtggaccagcttcatccagagcgtgagctacagcaagctgctgagcgtgatcgtgtggatgctgatgctgctgctggccgtgcccaacatcatcctgaccaaccagagcgtgagagaggtgacccagatcaagtgcatcgagctgaagagcgagctgggcagaaagtggcacaaggccagcaactacatcttcgtggccatcttctggatcgtgttcctgctgctgatcgtgttctacaccgccatcaccaagaagatcttcaagagccacctgaagagcagcagaaacagcaccagcgtgaagaagaagagcagcagaaacatcttcagcatcgtgttcgtgttcttcgtgtgcttcgtgccctaccacatcgccagaatcccctacaccaagagccagaccgaggcccactacagctgccagagcaaggagatcctgagatacatgaaggagttcaccctgctgctgagcgccgccaacgtgtgcctggaccccatcatctacttcttcctgtgccagcccttcagagagatcctgtgcaagaagctgcacatccccctgaaggcccagaacgacctggacatcagcagaatcaagagaggcaacaccaccctggagagcaccgacaccctgtag

SEQ ID NO: 182814 - DNA, 291 bp, Artificial Sequence
  derived and/or modified sequence
atgatcaacagcaccagcacccagccccccgacgagagctgcagccagaacctgctgatcacccagcagatcatccccgtgctgtactgcatggtgttcatcgccggcatcctgctgaacggcgtgagcggctggatcttcttctacgtgcccagcagcaagagcttcatcatctacctgaagaacatcgtgatcgccgacttcgtgatgagcctgaccttccccttcaagatcctgggcgacagcggcctgggcccctggcagctgaacgtgttcgtgtgcagagtgtag

SEQ ID NO: 182815 - DNA, 1017 bp, Artificial Sequence
  derived and/or modified sequence
atgattaattccacatccacacagcctccggacgagtcatgtagccagaatctcctgataactcaacagattatccccgtcttgtactgcatggttttcattgccggcattctcttaaatggagtgagtggctggatttttttttatgtcccctcctctaaaagcttcataatatatctgaagaatatcgtaatagccgattttgtcatgagccttaccttcccatttaaaattttgggcgatagtgggcttgggccatggcagttgaatgtattcgtatgtagagttagcgcggttctgttttacgtgaatatgtacgttagcattgtcttctttggtctgatttctttcgatagatactacaagatcgtgaagcccttgtggacttctttcattcagtcagtctcatactctaagttactgagcgtaatagtgtggatgctgatgctgctgctcgctgtgcctaatattatcttgacaaaccagtcagtgagggaggtgacccagatcaaatgtattgagctgaagagcgagctcgggagaaaatggcataaagcatccaattatatcttcgttgccatcttttggattgttttcctgctgttgatagtattctatactgctatcacaaaaaagattttcaaaagccatcttaaaagcagtcgcaactcaacaagtgttaaaaaaaaaagtagcaggaatattttttcaatcgtgttcgtgtttttcgtatgctttgtcccttaccacatcgcacggattccctacaccaagtcccagaccgaagcacattactcctgtcagagcaaagaaatcttgcggtacatgaaagaattcaccctcctgctgtccgctgccaacgtctgtctggatcccataatctacttcttcctgtgtcaacctttcagggaaattctgtgtaagaaacttcatattcccctaaaagctcagaatgatctggacatttcccgcataaaacgagggaacacaacgcttgagagcacagacactctgtag

SEQ ID NO: 182816 - DNA, 1017 bp, Artificial Sequence
  derived and/or modified sequence
atgattaatagtacgtccacacagccccctgatgagagttgtagccaaaatcttctgataactcaacaaataatcccagtcctgtattgcatggtgttcatcgccgggattctgctgaatggcgtttccggctggattttcttttatgtgccatcatccaagagctttatcatatatctaaagaatattgttatcgctgacttcgtcatgtccctcacattcccttttaaaatcctcggcgatagcggcctaggcccctggcagttaaatgtgttcgtgtgtcgcgtttcagccgttctgttttacgtgaatatgtacgtcagtatagtatttttcgggttgatttccttcgatagatattataaaattgtcaagcccctgtggaccagcttcattcagagcgtcagttactcaaagctcctgagtgttattgtctggatgttgatgcttttgctagccgttcctaacattatcctaaccaatcaatcggtgcgagaagtgactcagatcaaatgtattgaactgaaatcagagctcggccgcaaatggcataaggcctccaattacatatttgtagcaattttctggattgtttttttactgttaatcgtgttttacaccgctattactaagaaaatattcaagagccacctgaagtcctctaggaacagtacaagtgtgaagaagaagagctcaaggaacatcttttcaatcgtgtttgtgttctttgtgtgcttcgtcccataccatatcgcaagaattccttacactaagtcccagactgaggcccactactcatgtcaatcaaaggaaattctccgttacatgaaagagtttacactgctcctgtccgccgccaatgtctgcctcgatcccataatttactttttcctctgccaacctttccgggaaattctgtgtaagaagctgcacatcccccttaaagcccagaacgatcttgacattagcagaatcaagcgtggcaacacaaccttggagagcaccgacacactgtag

SEQ ID NO: 182817 - DNA, 291 bp, Artificial Sequence
  derived and/or modified sequence
atgatcaacagtacgagcacacagccgcccgacgaatcctgcagccagaacttgctgatcacacaacagattattcctgtattatactgtatggtcttcatagcaggaatcttattgaatggggtgtcagggtggatatttttctacgtcccttcttccaaaagttttattatctaccttaagaacatagtgattgccgatttcgttatgagtctgacattccccttcaaaattctcggtgacagcggattggggccctggcagctaaacgtgttcgtctgccgcgtatag

SEQ ID NO: 182818 - DNA, 1017 bp, Artificial Sequence
  derived and/or modified sequence
atgatcaacagcaccagcacccagcccccagatgagagctgcagccagaacctgctgatcacccagcagatcatccctgtgctgtactgcatggtgttcatcgccggcatcctgctgaatggagtgtctggctggatcttcttctacgtgcccagcagcaagagcttcatcatctacctgaagaacatcgtgattgctgactttgtgatgagcctgaccttccccttcaagatcctgggggacagcggcctgggcccctggcagctgaatgtgtttgtgtgccgggtgtctgctgtgctcttctacgtgaacatgtatgtgtccatcgtgttcttcggcctcatcagctttgaccgctactacaagatcgtgaagcccctgtggaccagcttcatccagagcgtgtcctacagcaagctgctgagcgtcatcgtgtggatgctgatgctgctgctggccgtgcccaacatcatcctgaccaaccagagcgtgcgggaggtgacccagatcaagtgcatcgagctgaagtctgagctgggcaggaagtggcacaaggccagcaactacatctttgtggccatcttctggatcgtgttcctgctgctgattgtgttctacacagccatcaccaagaagatcttcaagagccacctgaagagcagcaggaacagcacctctgtgaagaagaagagcagcaggaacatcttcagcatcgtgtttgtgttctttgtgtgctttgtgccctaccacatcgcccgcatcccctacaccaagagccagacagaggcccactacagctgccagagcaaggagatcctgcgctacatgaaggagttcaccctgctgctgtctgctgccaacgtgtgcctggaccccatcatctacttcttcctgtgccagcccttccgggagatcctgtgcaagaagctgcacatccccctgaaggcccagaatgacctggacatcagccgcatcaagaggggcaacaccaccctggagagcacagacaccctgtag

SEQ ID NO: 182819 - DNA, 291 bp, Artificial Sequence
  derived and/or modified sequence
atgatcaacagcaccagcacccagcccccagatgagagctgcagccagaacctgctgatcacccagcagatcatccctgtgctgtactgcatggtgttcatcgccggcatcctgctgaatggagtgtctggctggatcttcttctacgtgcccagcagcaagagcttcatcatctacctgaagaacatcgtgattgctgactttgtgatgagcctgaccttccccttcaagatcctgggggacagcggcctgggcccctggcagctgaatgtgtttgtgtgccgggtgtag

SEQ ID NO: 182820 - DNA, 1017 bp, Artificial Sequence
  derived and/or modified sequence
atgatcaacagcaccagcacccagccccccgacgagagctgcagccagaacctgcttatcacgcagcagatcatccctgtgctatactgtatggtcttcatagccggcattctccttaacggggtgagcgggtggatttttttttatgtcccatctagcaagtcatttatcatttaccttaagaacatcgtcatcgccgacttcgtgatgtccttgacttttccctttaagatcttaggggacagcgggttgggtccctggcagcttaatgtttttgtctgccgggtctccgccgtgctgttttatgtgaacatgtacgtgtccatcgtttttttcggcttgatctcatttgacaggtattacaaaatcgtcaagccattatggacttcattcatccagtccgtcagctattccaagttgctgagcgtgatcgtttggatgctcatgctgctgttggcggtccctaacatcattctgaccaaccagtctgtgagggaggtcacccagatcaagtgcatcgagttgaagagtgagctgggaaggaagtggcacaaagcctccaattatatcttcgtggctattttctggattgtgtttctcctgcttatcgtcttttacacggcgatcacaaagaagatatttaagagtcatctgaagtccagtagaaacagtacaagcgtgaaaaaaaaatcttcgcggaacatcttttcgattgtatttgtgttcttcgtgtgttttgttccctatcacattgcacgaatcccctatacaaaatcacagacagaggctcattactcctgccagagtaaggaaattcttagatacatgaaggagttcacactgctccttagcgctgctaacgtgtgcctcgacccaattatctattttttcctgtgtcagcccttcagagaaattttatgcaaaaagctgcacatccctttgaaggcacagaatgacttggacatttccagaattaaacgcggaaataccactctggagagcacggacacactgtag

SEQ ID NO: 182821 - DNA, 1017 bp, Artificial Sequence
  derived and/or modified sequence
atgatcaacagcaccagcacccagccccccgacgagagctgcagccagaatctgctcatcacccagcagattatcccggtactgtactgcatggtcttcattgccggcatcctgcttaatggagttagcggttggatatttttctacgtgccaagcagtaagtcattcatcatttacctgaagaatatcgtgatcgccgattttgtgatgagcctgactttcccttttaagatcctgggagactctggtctgggcccatggcagttgaacgtgttcgtatgccgagtatccgccgtgttattctacgtgaatatgtacgtaagtatcgtgttctttggtctgatcagctttgacaggtactacaagatagtcaaacctctctggacatcttttatccagagcgtgtcatactctaaactcctgtcagtgattgtttggatgctcatgctgctgctggccgtccccaacatcattctgactaaccagtccgtgagggaggtgacccagattaagtgtatcgaactcaaatcagagctgggacggaagtggcacaaggcgtcaaactacatctttgtggcaatcttctggatcgtcttcctcctactaatagtgttctacaccgccattaccaagaagatctttaaatcacacctgaagagctcccgaaacagcaccagcgtgaagaaaaagtcgagtcggaacattttcagcattgtcttcgttttctttgtgtgctttgtaccttatcacatagcacggattccatataccaaatcacaaacagaagcccattactcctgccaatctaaggaaattttacgatacatgaaggagttcactctactgctgtcagccgctaatgtgtgccttgatccaatcatttatttcttcttgtgccaacctttccgcgagatactctgcaaaaaactgcatattccactgaaggcccagaatgacctggacatctctcgcattaagcgggggaataccactctcgaatccacagatacactgtag

SEQ ID NO: 182822 - DNA, 291 bp, Artificial Sequence
  derived and/or modified sequence
atgatcaacagcaccagcacccagccccccgacgagagctgcagccagaacctcttgataactcagcaaataatacctgtcttatactgtatggtgtttatcgccggaatcctgctgaatggtgttagtggatggatttttttttacgttccgtccagcaagtctttcataatctacctcaagaacattgtaattgcggactttgtaatgagcctcacctttcccttcaagatcctgggcgatagtggattgggcccctggcagcttaatgtgttcgtttgccgggtgtag

SEQ ID NO: 182823 - DNA, 1017 bp, Artificial Sequence
  derived and/or modified sequence
atgatcaatagtaccagtacacagcctccagatgaatcgtgtagtcagaacctcctcatcactcagcagatcatccctgtgttgtactgtatggtattcatcgctggtattctcctgaatggcgtgagcggctggatttttttttacgtgccctcaagcaagagttttatcatctatctcaagaacatagtgatcgccgacttcgtcatgtcactgaccttcccattcaaaatcttgggcgactctggcctgggcccttggcagctgaatgtgtttgtatgcagagtatctgccgtcttattttacgttaatatgtacgtatcgattgtgtttttcgggctcatatcctttgacaggtattacaagatagtaaagcctctctggaccagctttatccagtctgtgtcctacagcaagcttctcagtgtgatagtgtggatgctgatgttgttacttgccgtgccaaatatcattttgacgaatcagtccgtgagagaggttacacaaattaagtgtattgagttaaagagtgagctgggaagaaagtggcataaagcttccaattacatctttgtggcgattttctggatcgttttccttttactaatcgttttttacacagctattacgaaaaagatctttaaaagccatttaaagagcagccgtaattctacttcggtcaagaaaaaatcctctcgaaacatattctctatagtgttcgtgttcttcgtatgttttgtgccctaccacattgcaaggataccttatactaagtctcaaaccgaggcacactacagctgccagagtaaagaaatactccgttacatgaaggagtttaccctcctcctgagcgccgctaacgtgtgcctggacccaattatttacttctttctttgtcaacctttccgggaaattctatgtaagaaacttcacatccctttaaaggcccagaatgatctcgacatttcccggatcaaacgtggcaacaccaccctcgaatcaaccgacaccttatag

SEQ ID NO: 182824 - DNA, 1017 bp, Artificial Sequence
  derived and/or modified sequence
atgattaatagtacttctacccagccaccggacgagagctgctcccagaatttgttgattactcaacagattattccagtactctattgcatggtgttcattgctggtatactgctgaatggggtttccggatggatatttttttacgttccttcctcaaaaagctttattatctacctgaaaaatattgtgatcgcagacttcgtgatgagcctgacattcccgttcaagattctgggtgacagcggtcttggtccatggcagctcaatgtctttgtttgtagagtgagcgcggtgttattttatgtcaatatgtatgtttctatcgtgttttttggcttgatctcctttgatcgctactacaagatcgtaaaacccctttggacaagcttcattcagtccgtgagttattcaaagttgctgtctgtgatcgtctggatgcttatgctcctgttagccgttccaaatatcatcctgacaaatcagagtgtgcgggaggtgactcaaattaaatgcatcgaactgaaatccgaactggggaggaaatggcacaaggccagtaactacattttcgttgccatattctggattgtatttctgctgctcatcgtgttctatactgccatcacaaagaaaatcttcaagtcgcacctcaagtctagtcggaatagtacgagcgtgaaaaaaaagtcaagcaggaatattttttccattgtatttgttttcttcgtgtgcttcgtaccttaccacatcgcacgaataccatacactaaatctcagacggaggctcactattcttgccagagcaaagaaattctcagatacatgaaagaattcactctcttgctgtcagctgcgaatgtctgcttggaccccattatatatttctttctgtgtcaacctttcagagaaatcttgtgtaagaaactgcatatcccccttaaggcacagaatgatctcgacatatcacggatcaaaaggggtaataccacccttgagagcaccgataccctgtag

SEQ ID NO: 182825 - DNA, 291 bp, Artificial Sequence
  derived and/or modified sequence
atgattaactcgacctctacccagcctcctgatgaatcatgttctcagaacctgttgattacacagcagattataccggtgctgtactgtatggtttttatcgctggcattctgctcaacggagtttctggttggattttcttctatgtaccatcctccaaaagctttattatctacctcaagaatatcgttattgcagactttgttatgtccctcaccttcccttttaagatcctaggagattcagggttgggaccatggcagctgaatgttttcgtgtgtcgagtgtag

SEQ ID NO: 182826 - DNA, 2513 bp, Artificial Sequence
  derived and/or modified sequence
aattctatctgacaacagcagcagagggacccactatcttgtggtttctgtcaagttcctgattttcatccgtagttgaagatgagcaagaactctgtaacagtgttaccttggagcctacaatgagaggtatttcaaaatgagtgaagcatgactctcacagatgaaggcctagacgcaggatctttaatgaaaaaacacttgggccacttcaagacgacaaacgctcactgggcaaaacaccttcactgaaaagagacctcatattatgcaaaaaaaatcttaaaaggcctctgccttcagaagttacaagatgatcaattcaacctccacacagcctccagatgaatcctgctctcagaacctcctgatcactcagcagatcattcctgtgctgtactgtatggtcttcattgcaggaatcctactcaatggagtgtcaggatggatattcttttacgtgcccagctctaagagtttcatcatctatctcaagaacattgttattgctgactttgtgatgagcctgacttttcctttcaagatccttggtgactcaggccttggtccctggcagctgaacgtgtttgtgtgcagggtctctgccgtgctcttctacgtcaacatgtacgtcagcattgtgttctttgggctcatcagctttgacagatattataaaattgtaaagcctctttggacttctttcatccagtcagtgagttacagcaaacttctgtcagtgatagtatggatgctcatgctcctccttgctgttccaaatattattctcaccaaccagagtgttagggaggttacacaaataaaatgtatagaactgaaaagtgaactgggacggaagtggcacaaagcatcaaactacatcttcgtggccatcttctggattgtgtttcttttgttaatcgttttctatactgctatcacaaagaaaatctttaagtcccaccttaagtcaagtcggaattccacttcggtcaaaaagaaatctagccgcaacatattcagcatcgtgtttgtgttttttgtctgttttgtaccttaccatattgccagaatcccctacacaaagagtcagaccgaagctcattacagctgccagtcaaaagaaatcttgcggtatatgaaagaattcactctgctactatctgctgcaaatgtatgcttggaccctattatttatttctttctatgccagccgtttagggaaatcttatgtaagaaattgcacattccattaaaagctcagaatgacctagacatttccagaatcaaaagaggaaatacaacacttgaaagcacagatactttgtgagttcctaccctcttccaaagaaagaccacgtgtgcatgttgtcatcttcaattacataacagaaatcaataagatatgtgccctcatcataaatatcatctctagcactgccatccaatttagttcaataaaattcaaatataagtttccatgcttttttgtaacatcaaagaaaacatacccatcagtaatttctctaatactgacctttctattctctattaataaaaaattaatacatacaattattcaattctattatattaaaataagttaaagtttataaccactagtctggtcagttaatgtagaaatttaaatagtaaataaaacacaacataatcaaagacaactcactcaggcatcttctttctctaaataccagaatctagtatgtaattgttttcaacactgtccttaaagactaacttgaaagcaggcacagtttgatgaagggctagagagctgtttgcaataaaaagtcaggtttttttcctgatttgaagaagcaggaaaagctgacacccagacaatcacttaagaaaccccttattgatgtatttcatggcactgcaaaggaagaggaatattaattgtatacttagcaagaaaattttttttttctgatagcactttgaggatattagatacatgctaaatatgttttctacaaagacttacgtcatttaatgagcctggggttctggtgttagaatatttttaagtaggctttactgagagaaactaaatattggcatacgttatcagcaacttcccctgttcaatagtatgggaaaaataagatgactgggaaaaagacacacccacaccgtagaacatatattaatctactggcgaatgggaaaggagaccattttcttagaaagcaaataaacttgatttttttaaatctaaaatttacattaatgagtgcaaaataacacataaaatgaaaattcacacatcacatttttctggaaaacagacggattttacttctggagacatggcatacggttactgacttatgagctaccaaaactaaattctttctctgctattaactggctagaagacattcatctatttttcaaatgttctttcaaaacatttttataagtaatgtttgtatctatttcatgctttactgtctatatactaataaagaaatgttttaatactg

SEQ ID NO: 182827 - DNA, 1780 bp, Artificial Sequence
  derived and/or modified sequence
aagcatatattagagctgggctccaaagaatactggacatctgtagtacctgacattcaagcatttggcgagatgtcaatatttcagagagcactttaaatgttttgatttgaaagctaatgcagtgtttcccactggtcaacacgagcagtccagcagagagcaaaatctatttccctcaacatcaaatgctacactcagttgctgatcctatcttgcctacagagaacctaaaagactggaaaaattggatctttaatgaaaaaacacttgggccacttcaagacgacaaacgctcactgggcaaaacaccttcactgaaaagagacctcatattatgcaaaaaaaatcttaaaaggcctctgccttcagaagttacaagatgatcaattcaacctccacacagcctccagatgaatcctgctctcagaacctcctgatcactcagcagatcattcctgtgctgtactgtatggtcttcattgcaggaatcctactcaatggagtgtcaggatggatattcttttacgtgcccagctctaagagtttcatcatctatctcaagaacattgttattgctgactttgtgatgagcctgacttttcctttcaagatccttggtgactcaggccttggtccctggcagctgaacgtgtttgtgtgcagggtctctgccgtgctcttctacgtcaacatgtacgtcagcattgtgttctttgggctcatcagctttgacagatattataaaattgtaaagcctctttggacttctttcatccagtcagtgagttacagcaaacttctgtcagtgatagtatggatgctcatgctcctccttgctgttccaaatattattctcaccaaccagagtgttagggaggttacacaaataaaatgtatagaactgaaaagtgaactgggacggaagtggcacaaagcatcaaactacatcttcgtggccatcttctggattgtgtttcttttgttaatcgttttctatactgctatcacaaagaaaatctttaagtcccaccttaagtcaagtcggaattccacttcggtcaaaaagaaatctagccgcaacatattcagcatcgtgtttgtgttttttgtctgttttgtaccttaccatattgccagaatcccctacacaaagagtcagaccgaagctcattacagctgccagtcaaaagaaatcttgcggtatatgaaagaattcactctgctactatctgctgcaaatgtatgcttggaccctattatttatttctttctatgccagccgtttagggaaatcttatgtaagaaattgcacattccattaaaagctcagaatgacctagacatttccagaatcaaaagaggaaatacaacacttgaaagcacagatactttgtgagttcctaccctcttccaaagaaagaccacgtgtgcatgttgtcatcttcaattacataacagaaatcaataagatatgtgccctcatcataaatatcatctctagcactgccatccaatttagttcaataaaattcaaatataagtttccatgcttttttgtaacatcaaagaaaacatacccatcagtaatttctctaatactgacctttctattctctattaataaaaaattaatacatacaattattcaattctattatattaaaataagttaaagtttataaccactagtctggtcagttaatgtagaaatttaaatagtaaataaaacacaacataatcaaagacaactcactcaggcatcttctttctctaaata

SEQ ID NO: 182828 - DNA, 554 bp, Artificial Sequence
  derived and/or modified sequence
aacagtgttaccttggagcctacaatgagaggtatttcaaaatgagtgaagcatgactctcacagatgaaggcctagacgcaggaattacctagcaagccatggccaccatccctcttaccctccacaattccaggatctttaatgaaaaaacacttgggccacttcaagacgacaaacgctcactgggcaaaacaccttcactgaaaagagacctcatattatgcaaaaaaaatcttaaaaggcctctgccttcagaagttacaagatgatcaattcaacctccacacagcctccagatgaatcctgctctcagaacctcctgatcactcagcagatcattcctgtgctgtactgtatggtcttcattgcaggaatcctactcaatggagtgtcaggatggatattcttttacgtgcccagctctaagagtttcatcatctatctcaagaacattgttattgctgactttgtgatgagcctgacttttcctttcaagatccttggtgactcaggccttggtccctggcagctgaacgtgtttgtgtgcagggt

SEQ ID NO: 182829 - protein, 232 aa, Artificial Sequence
  derived and/or modified sequence
MLRAALPALLLPLLGLAAAAVADCPSSTWIQFQDSCYIFLQEAIKVESIEDVRNQCTDHGADMISIHNEEENAFILDTLKKQWKGPDDILLGMFYDTDDASFKWFDNSNMTFDKWTDQDDDEDLVDTCAFLHIKTGEWKKGNCEVSSVEGTLCKTAIPYKRKYLSDNHILISALVIASTVILTVLGAIIWFLYKKHSDSRFTTVFSTAPQSPYNEDCVLVVGEENEYPVQFD

SEQ ID NO: 182830 - DNA, 699 bp, Artificial Sequence
  derived and/or modified sequence
atgttacgggcggccctgcctgcgcttcttctgccactattgggattagcggccgccgctgtagccgattgtcctagttcaacctggatacagttccaagacagttgctacatcttcttgcaagaagcgatcaaagtcgagagcatagaagacgttcgcaatcagtgcacggaccatggtgccgacatgattagcattcataatgaggaggagaacgcttttatactcgataccctgaagaagcagtggaagggccctgatgatattctgctcggcatgttttatgatacagacgacgcttcgttcaagtggttcgacaactccaacatgacattcgacaagtggacggatcaagacgatgatgaagaccttgtagatacctgtgcgttcctacacatcaagaccggagaatggaagaaaggcaattgcgaagtttcaagcgttgaaggaacgctgtgcaaaacagcgattccatacaagaggaaatacctgtctgataatcatatcctgatttctgctctggtgattgcctcaacagtgatccttactgtcctcggagctattatttggttcctgtacaaaaaacattccgactcacgcttcactaccgtattttctacggctccacagtcaccttacaatgaggattgcgtgctcgtggtaggcgaggagaatgagtatccagtccagttcgactag

SEQ ID NO: 182831 - DNA, 699 bp, Artificial Sequence
  derived and/or modified sequence
atgctgcgggccgccctgcctgccctgctgctgcccctgctgggcctggccgctgctgctgtggccgactgccccagcagcacctggatccagttccaggacagctgctacatcttcctgcaggaggccatcaaggtggagagcattgaagatgtgaggaaccagtgcacagaccatggagctgacatgatcagcatccacaatgaggaggagaatgccttcatcctggacaccctgaagaagcagtggaagggcccagatgacatcctgctgggcatgttttatgacacagatgatgccagcttcaagtggtttgacaacagcaacatgacctttgacaagtggacagaccaggatgatgatgaggacctggtggacacctgtgccttcctgcacatcaagacaggagagtggaagaagggcaactgtgaggtgtcctctgtggagggcaccctgtgcaagacagccatcccctacaagaggaagtacctgagtgacaaccacatcctgatcagcgccctggtgattgccagcaccgtcatcctgactgtgctgggcgccatcatctggttcctgtacaagaagcacagcgacagccgcttcaccaccgtcttcagcacagccccccagagcccctacaatgaagactgtgtgctggtggtgggggaggagaatgagtaccctgtgcagtttgattag

SEQ ID NO: 182832 - DNA, 699 bp, Artificial Sequence
  derived and/or modified sequence
atgctgcgggccgccctgcccgccctgctgctgcccctgctgggcctggcggccgccgctgtcgccgattgtccgtcttccacatggatccagtttcaggatagttgctatatttttctgcaagaggcaatcaaggtcgaatccattgaggatgtccgcaatcaatgcactgaccatggcgcagatatgatctcgatacacaacgaggaagaaaacgctttcattctggatactcttaagaaacagtggaagggcccagacgacatcctcttgggaatgttttatgatacggacgacgcttctttcaagtggttcgataatagcaacatgactttcgacaaatggacagatcaggatgatgatgaagaccttgtggacacctgtgcttttctgcatattaagaccggggaatggaagaaaggaaattgcgaggtaagctcggtggagggcacattatgtaagaccgctattccgtacaagcgcaaataccttagcgataatcacattctcatctccgccctcgtcatcgcttccactgttattttaaccgtgcttggagccataatctggtttctgtacaaaaagcatagcgattccaggttcactacagtattttctactgccccgcagagcccatataacgaggactgcgtgctggtcgtgggcgaagaaaacgaatatccagtgcagtttgattag

SEQ ID NO: 182833 - DNA, 699 bp, Artificial Sequence
  derived and/or modified sequence
atgctccgagcagccttgccagccctgctgcttcctctgctcggtctggcagctgctgccgttgccgactgcccaagtagtacatggattcaattccaagattcgtgctatatctttttacaggaggcaattaaggtggagtctatcgaggacgtgaggaatcaatgcactgatcacggcgctgatatgattagcatacacaatgaggaggagaatgccttcatacttgacacccttaagaaacagtggaagggccctgacgacattctgctcggcatgttctatgatacagatgatgctagcttcaagtggttcgataacagcaatatgaccttcgataagtggacggatcaagacgacgatgaggatctcgtggacacatgtgcctttctgcatattaagaccggcgagtggaaaaagggcaactgtgaggtcagctcggtggagggcacactctgcaaaaccgccattccatacaaacggaagtacctgtccgacaatcatattctcattagcgctctcgtgatcgcctcgacggtgattctcacggttctcggtgccattatctggttcctctacaagaagcatagcgattctcgcttcactaccgttttcagcacagcccctcagagtccctataatgaggactgtgttctcgtagttggagaagaaaatgaataccctgtccaattcgactag

SEQ ID NO: 182834 - DNA, 3741 bp, Artificial Sequence
  derived and/or modified sequence
ctctccggccgcgcagccgctgccgcccacccgcacccgccgtcatgctccgggccgcgctgcccgcgctcctgctgccgttgctgggcctcgccgctgctgccgtcgcggactgtccttcatctacttggattcagttccaagacagttgttacatttttctccaagaagccatcaaagtagaaagcatagaggatgtcagaaatcagtgtactgaccatggagcggacatgataagcatacataatgaagaagaaaatgcttttatactggatactttgaaaaagcaatggaaaggcccagatgatatcctactaggcatgttttatgacacagatgatgcgagtttcaagtggtttgataattcaaatatgacatttgataagtggacagaccaagatgatgatgaggatttagttgacacctgtgcttttctgcacatcaagacaggtgaatggaaaaaaggaaattgtgaagtttcttctgtggaaggaacactatgcaaaacagctatcccatacaaaaggaaatatttatcagataaccacattttaatatcagcattggtgattgctagcacggtaattttgacagttttgggagcaatcatttggttcctgtacaaaaaacattctgattctcgtttcaccacagttttttcaaccgcaccccaatcaccttataatgaagactgtgttttggtagttggagaagaaaatgaatatcctgttcaatttgactaagtttttggtaatcttgcactaagacatcaacaaaatgccctggcagagataacttgggaaagattttaatataaaacttgacattggatattagagctttaatggtattccttattccagtaacatttttatgtactcatctgctgtgaaaagtctttaggttcattaaaaaaacaggttttagaaatgatcttagatctaatatagtgattttaagcatcccgtcaaaggcagaatctgtcacttgaatgaaggaaagcttaaagcccaagcagataaaaataaaagcccagcctatttgtcttgcctgctgtatcttccctatttagttgacccactttagtttatatgtttattagtaaacatgaaatggggaataagtgattttaagtacatcccatacatttaaatatctttgataattgttatttttttggcagataattcctctagaatgtgtatctttttatgatttagatgaagaaaattttacaacttttaacaccccacaccaattttagtttcattacttttacacacaccattttatcacaaatgactcaagttttaatgaatgtttataaattatttgaaacaaaatatgatcgctgtgtccaggatggcatagagaaagctggcaattaggttaacacttacatattatagtgcccctttaaggatttctctcttgccaccataccttttgtactttcccctatacaagatgtatctcattctcctcaagcatttataaatttttccttcaatgacatgaaaactgtgcaagcaaaaaccgaagaaaaacacttaagtacaactgtagtgacagtgatcaaagttttcagtgcatttattgtacattttaagaaaaaggtgaaaatcatttggggagtaaaaaaatgaaaaagctgaaacgagtaattttcctcaccatcaataaaccaaaaacaggaaagataaagaatgtataaatttcacgtaaattagtcacgtatcacttatcaatggggatacgttctaagaaatgcatagttagggaatcttgtgtgaaaatcagcttgtatttacacaaacccagatggtagagcctattttgtcccaaacctacacagcatgttactgtgctgaatactgcagacaattgtaacacaatatttgtgtatctaaatatagaaaaggtacagtaaaaatatggtctactaaggaaacactgttctatatgtggtccattactgactgaagtatactgtctagaagtctgaggctcaaagaaaagtaatccctcttctgaatccacaccccatcaattatcttactttcttctggggagatagatagatatactatctcactagcttgactaatggcaacaaagttccagcttgtgtagtctctttttattgaccacatgaatcgaaaacactcatcacaattaatggcactatcattaatgagacatgagtaactaaaaagtgatagaaaactattaacagtgcggctacatggtactgaaaatgcaggcattacaccagctgttacacaagcacaagcatgctctgtaagagctttacatttctgagattttgtatagtgattgagatgtctattttattattgatagactattactaatgtcaatattgaacactaccctggaattcctgcctggttttcctacccaaattgtaccactccttgaagaactacaggcacagtaaaaaaaatatggcgtattatgtgaactaaaagagttctaaaggagttcttaaaggagtggtagaatttgggtaggaaagtgattaagtccaacttaaaaccaacagtctcaaacgtctacaactacaatgtccaatgagccactagccacatgaggctatttaagtaaatttagtttaaaatccagttttcgaattacattagccacattgtcaagtgttcaaatcacaggtggttagtggctactgtactgggcaacatacattatagaacattttcattataggaagttttattgggcagtgctgctcttaaatcctaccttccactcaactcccatacaactttcttttgtacattttgatactttctacctaatggcagctcttccaaaatagctgctttaaactctgatttaattttcaatatttggtttcatttttcaacaggccaagaggcctctggtaatgaagtgctatatatatatatatgatggagtctcactgtgctgcccaggctacagtgcagtggctcgatcttggctctctccaatctccgccttgcaggttttcaagcaattctcctgcctcagcctccttagtagctgggaccacagacatctgtcaccacacccagctaactttttgtatttttggtagagacggggtttcgccatattgactgggctggtctcaaactcctgacctcaagtgatccacccaccttggtctcccaaagtgctgggattacatgcgtgagccaccacacttggcctacattttttctttatataccagaacatctataacaggcaccttatctactcattagtgaagagataattggattacacaggcaggcttgtttactacatccagaatgtagaaactgctttcttcaacatcttggttctagctagtaataacaatataattctttggcagatattcagaataacattttaaactacattttcttagaaaattgcattcttgtagtgagcagtgtatggtctcttttgttcagaatttaaaactgataaccaatgaaagccttttctcttattcctctaccgtcatttacatgataatctgaagctaatatgacaatatttaaatactaagtggtactagggaactacaagaatactgtaaagcttaagccattgttatcactgtcatttagcatttaataacaaaactatacagaattatgtgcataccaatgaatgttttgtaccatctagttaaattttttaaataaagttttatgggttaagcag

SEQ ID NO: 182835 - DNA, 699 bp, Artificial Sequence
  derived and/or modified sequence
atgctgagagccgccctgcccgccctgctgctgcccctgctgggcctggccgccgccgccgtggccgactgccccagcagcacctggatccagttccaggacagctgctacatcttcctgcaggaggccatcaaggtggagagcatcgaggacgtgagaaaccagtgcaccgaccacggcgccgacatgatcagcatccacaacgaggaggagaacgccttcatcctggacaccctgaagaagcagtggaagggccccgacgacatcctgctgggcatgttctacgacaccgacgacgccagcttcaagtggttcgacaacagcaacatgaccttcgacaagtggaccgaccaggacgacgacgaggacctggtggacacctgcgccttcctgcacatcaagaccggcgagtggaagaagggcaactgcgaggtgagcagcgtggagggcaccctgtgcaagaccgccatcccctacaagagaaagtacctgagcgacaaccacatcctgatcagcgccctggtgatcgccagcaccgtgatcctgaccgtgctgggcgccatcatctggttcctgtacaagaagcacagcgacagcagattcaccaccgtgttcagcaccgccccccagagcccctacaacgaggactgcgtgctggtggtgggcgaggagaacgagtaccccgtgcagttcgactag

SEQ ID NO: 182836 - protein, 1040 aa, Artificial Sequence
  derived and/or modified sequence
MLEDISEEDIWEYKSKRKPKRVDPNNGSKNILKSVEKATDGKYQSKRSRNRKRAAEAKEVKDHEVPLGNAGCQTSVASSQNSSCGDGIQQTQDKETTPGKLCRTQKSQHVSPKIRPVYDGYCPNCQMPFSSLIGQTPRWHVFECLDSPPRSETECPDGLLCTSTIPFHYKRYTHFLLAQSRAGDHPFSSPSPASGGSFSETKSGVLCSLEERWSSYQNQTDNSVSNDPLLMTQYFKKSPSLTEASEKISTHIQTSQQALQFTDFVENDKLVGVALRLANNSEHINLPLPENDFSDCEISYSPLQSDEDTHDIDEKPDDSQEQLFFTESSKDGSLEEDDDSCGFFKKRHGPLLKDQDESCPKVNSFLTRDKYDEGLYRFNSLNDLSQPISQNNESTLPYDLACTGGDFVLFPPALAGKLAASVHQATKAKPDEPEFHSAQSNKQKQVIEESSVYNQVSLPLVKSLMLKPFESQVEGYLSSQPTQNTIRKLSSENLNAKNNTNSACFCRKALEGVPVGKATILNTENLSSTPAPKYLKILPSGLKYNARHPSTKVMKQMDIGVYFGLPPKRKEEKLLGESALEGINLNPVPSPNQKRSSQCKRKAEKSLSDLEFDASTLHESQLSVELSSERSQRQKKRCRKSNSLQEGACQKRSDHLINTESEAVNLSKVKVFTKSAHGGLQRGNKKIPESSNVGGSRKKTCPFYKKIPGTGFTVDAFQYGVVEGCTAYFLTHFHSDHYAGLSKHFTFPVYCSEITGNLLKNKLHVQEQYIHPLPLDTECIVNGVKVVLLDANHCPGAVMILFYLPNGTVILHTGDFRADPSMERSLLADQKVHMLYLDTTYCSPEYTFPSQQEVIRFAINTAFEAVTLNPHALVVCGTYSIGKEKVFLAIADVLGSKVGMSQEKYKTLQCLNIPEINSLITTDMCSSLVHLLPMMQINFKGLQSHLKKCGGKYNQILAFRPTGWTHSNKFTRIADVIPQTKGNISIYGIPYSEHSSYLEMKRFVQWLKPQKIIPTVNVGTWKSRSTMEKYFREWKLEAGY

SEQ ID NO: 182837 - DNA, 3123 bp, Artificial Sequence
  derived and/or modified sequence
atgctcgaagatatctccgaagaggatatctgggagtacaagagtaaaagaaaacccaagcgagtggaccccaacaatggatcaaagaatatactcaaatcagttgaaaaagcaaccgatggcaaataccagtcaaagcggagtcgcaatcgaaaacgagcagcagaagccaaagaggtcaaggaccatgaggtgccactcggaaatgccggttgccagacttccgtggccagttcgcagaactcaagctgtggtgacggcattcagcaaacccaagataaggaaacgacgccaggaaagctctgtcgcacacagaaatctcagcatgtatcccccaagattcgacctgtttacgatgggtactgcccgaattgccaaatgccttttagctcactgattggccagacgccccggtggcacgtgtttgaatgtctggactctccaccacggtccgaaaccgagtgtccagacggtctgctctgcacctctacaattccgttccattataagcgctatacccacttcctgctggcgcagagtcgcgctggcgaccatcccttttcatccccttcccccgctagcggagggagcttcagtgagactaagagcggcgttctgtgttcattggaggaaagatggagcagctatcagaaccagactgacaactctgtgtctaatgatccactccttatgacccagtatttcaaaaagtcccccagcctgaccgaagcctccgagaaaatttctacccacattcagactagtcagcaggccctccaatttacggattttgttgagaatgacaagctggtgggcgtcgccctgcggttggcaaataatagcgagcacatcaatttgccgctacccgagaacgattttagtgattgcgagattagctatagtccccttcaatcagatgaggatacacatgatattgatgaaaagcctgacgacagtcaggagcagctgttcttcacggaatcctctaaggatgggtctctcgaggaggacgatgactcctgcggattcttcaagaagcggcacggacccctgctgaaggaccaggatgagtcctgcccaaaggtgaactcattcctgaccagggacaaatatgacgaaggtctttacagatttaatagccttaacgatttatcgcagccaatatcccagaataatgaatccaccctgccttatgacctggcctgcacaggcggggactttgtcctattcccgcccgcattagctggaaagcttgcagcttcggtgcaccaggccacaaaggctaagccagatgagcccgaatttcattccgcccagagtaataagcagaagcaggtcatcgaggaaagtagtgtgtacaaccaagtctccctcccactggttaaaagtctcatgttgaagcccttcgagagccaggtagaaggttatctttccagccaaccgacccagaataccattcgcaaacttagctccgaaaatctaaacgccaaaaacaatactaatagcgcatgtttctgcaggaaagcactcgaaggggtgcctgtcggcaaagctaccattttaaacaccgagaacttaagtagcactccagcaccaaaataccttaagattctgccttccggcctgaaatacaacgcccggcatccctcaacaaaggttatgaagcagatggacataggcgtgtacttcggactgccaccaaagcgaaaggaagagaagctgctgggggagagtgctctcgaggggatcaacttgaatcctgtgccctctcccaaccagaaacggtcaagtcagtgcaagcgcaaggcagaaaaatcattaagcgatctggagtttgacgccagcaccctgcacgaatctcagttgtctgtagaactgtcctcggagagatcccagcgccagaaaaagaggtgtaggaagagtaactccttacaagaaggagcttgtcagaagaggtctgaccatctaattaacacagagtcagaggccgtaaatttatctaaagtgaaggtgtttaccaagtccgcccatgggggtctacagcgtgggaataaaaaaatccccgaaagtagcaacgttggcggatctcggaagaaaacctgcccattctacaagaagatccccggaaccggattcactgttgatgctttccaatacggcgtggtcgagggctgtacggcatactttctgacacacttccactctgaccactacgccgggctgtccaagcactttacctttccagtgtattgcagcgagatcaccggaaacctgctcaagaacaaattgcatgttcaagagcagtatatccatcccctccccttagacaccgaatgcattgtcaacggggttaaagtagttctgctcgatgctaaccattgtcctggcgcagtcatgattctgttctacctgccaaatggcaccgttatcctgcacaccggcgacttccgtgccgaccccagcatggaaaggtcactcctggctgaccagaaagtgcatatgttatatctagatacaacatactgctcccctgaatatacttttccgagccagcaggaggttataagatttgctatcaatactgctttcgaggcagtgacactcaatccacacgctctggtggtgtgcgggacttactctattggcaaagagaaggtctttctggcgatcgcagacgtgctgggatcgaaggtgggcatgagccaagagaagtataagaccctgcagtgccttaacatacccgaaatcaactctctcatcacaacagacatgtgcagctcactggtccatctcttgcctatgatgcaaataaattttaaaggattacagtcccatctgaaaaaatgtggaggtaaatataaccagatcctggcttttaggcccaccggatggactcactctaataagttcacccgcatcgcagatgttattccacaaacaaagggaaacatttccatctatgggattccgtattctgaacactcctcctacctagagatgaaaaggtttgtgcagtggctgaaaccacagaaaattattcccaccgtgaatgtgggtacctggaaatcgaggtctaccatggaaaaatatttccgggagtggaagctggaggccgggtactag

SEQ ID NO: 182838 - DNA, 3123 bp, Artificial Sequence
  derived and/or modified sequence
atgcttgaggatatatcagaggaagacatctgggaatataaatcaaagaggaagccaaagagagtggaccccaacaacgggtccaaaaatattcttaagagcgtcgagaaagctaccgacgggaaataccagagtaagaggtcccgcaatagaaaaagggcagccgaggcaaaagaagtgaaggaccacgaggtcccgctgggaaacgcaggctgccagactagtgtggctagcagccaaaactctagttgtggagacggcatccaacaaactcaggacaaagaaacgacgccggggaagctgtgtcggactcagaaaagccagcacgtgagccctaaaatccggcccgtttacgacggctactgccccaactgccaaatgcctttcagctcgctgattggccagactccacggtggcacgtttttgagtgcttggatagtcctccccgttctgaaactgaatgcccggatggtcttctatgcactagcaccatcccctttcattacaagcggtacacccacttcctcctggcccagtctagagccggcgatcacccattcagctccccgagccctgccagtgggggatcttttagtgaaactaagagtggggtgctgtgcagcttggaagaacgctggagtagctaccagaaccagaccgataactctgttagcaacgatcccttgctcatgacccagtacttcaagaagtccccatctctgacagaagccagcgaaaaaatatctacacacattcagacctctcaacaggcactgcagttcaccgatttcgtcgagaacgataaactggttggggtggccctcaggctggctaataatagcgagcatattaatctgcctctcccagagaacgacttcagtgattgcgagatcagctactcccccctgcagtcagatgaggatacgcacgatatcgatgaaaagcctgatgactctcaggaacagttatttttcacggagagcagcaaggacggcagtctcgaagaagacgatgacagttgcggattctttaagaaaagacatggccccctgcttaaagatcaggatgaaagctgcccaaaggtgaatagtttccttaccagggacaaatatgatgagggactctatcggttcaattcattgaatgatttgagtcaacccatcagccagaataacgaatcaacactgccttacgatctggcatgcaccggaggtgattttgtgctgttcccccctgccctcgctgggaaactggctgcctcggttcatcaggcgaccaaggccaagcccgacgaacccgagtttcatagcgctcagagcaataagcagaagcaggtgattgaagaatccagcgtgtacaaccaggtgtccttgcctttggtgaagagcttgatgcttaagccctttgagtctcaggtggagggctatctgagcagccaacccacccagaacacaatccgaaaacttagttccgaaaacctcaatgcgaaaaacaataccaatagcgcctgcttttgccgcaaagcgctcgagggagtgcctgtcggaaaggctaccattctcaacactgaaaacctgtcatccacaccagccccaaagtacctgaagatactcccctcagggctcaagtataacgcccggcatccttccacaaaggtcatgaagcagatggacataggtgtatatttcgggctgccacccaagaggaaggaggaaaagctgctcggagaatctgctctcgagggcatcaatctcaaccccgtcccctctccaaaccagaagcgaagttcgcagtgtaaacgcaaggctgaaaaatcactaagcgatctagaattcgacgcgtcgaccctccatgaaagccagctatcagtggaactgagtagcgagagaagccagcggcagaaaaagcggtgccgaaagtcgaattccctgcaggagggagcctgccagaagaggagtgaccacctgatcaataccgagtcagaagcggttaatctcagcaaagtaaaggtgttcacaaagagcgcccacggcggccttcagagaggaaacaagaaaattcccgaaagcagcaatgttggaggctcacgcaagaagacgtgcccattctacaagaaaatcccaggaaccggttttaccgtggacgcttttcagtatggtgtcgtggaaggctgtacagcctattttctcacacacttccactcagatcattatgcgggcttgagcaaacattttacctttcccgtgtattgctccgaaatcaccgggaacttgctcaagaataagcttcacgtccaggaacagtacatccatccactgccgttggacacagagtgcatcgtgaatggtgtgaaagtggtactgttggacgcgaaccactgccctggagcagtcatgattctgttctatcttcctaatgggacagttattctgcacaccggcgatttccgcgccgacccctctatggagcggagcctgctggctgaccaaaaagttcatatgctgtatctggacactacttactgttcacctgaatacacctttccctcgcaacaagaggtcatccgttttgccatcaacactgccttcgaggctgtcaccctgaatccgcacgccctggtcgtgtgcggaacctatagtattgggaaggagaaagtgtttctggcgatagctgatgtgctggggagtaaggtgggtatgtctcaggagaagtataagaccctccagtgcctgaatattccagagatcaactccttaatcaccacggacatgtgcagcagtctggttcatttactgcctatgatgcagattaactttaaaggcctacagtctcacctcaagaaatgcgggggcaaatacaatcaaatcctggcttttcgacccactggatggacccattctaataagttcacccgcattgctgacgttattccccagaccaaaggaaatatcagtatctacgggatcccatacagtgagcatagtagctatctggagatgaagcggtttgtgcagtggcttaaacctcaaaaaatcatcccgacagtaaatgtgggaacctggaagagccgcagtacaatggaaaagtatttcagagagtggaaactggaggccgggtactag

SEQ ID NO: 182839 - DNA, 3123 bp, Artificial Sequence
  derived and/or modified sequence
atgctggaggacatcagcgaggaggacatctgggagtacaagagcaagaggaagcccaagagggtggaccccaacaacggcagcaagaacatcctgaagtctgtggagaaggccacagatggcaagtaccagagcaagaggagcaggaacaggaagagagctgctgaggccaaggaggtgaaggaccacgaggtgcccctgggcaatgccggctgccagacctctgtggccagcagccagaacagcagctgtggagatggcatccagcagacccaggacaaggagaccacccctgggaagctgtgcaggacccagaagagccagcacgtgagccccaagatccggcctgtgtatgatggctactgccccaactgccagatgcccttcagcagcctgattggccagaccccccgctggcacgtgtttgaatgtctggacagcccccccaggagtgaaacagagtgcccagatggcctgctgtgcaccagcaccatccccttccactacaagcgctacacccacttcctgctggcccagagccgggccggggaccaccccttcagcagccccagccctgccagcggcggcagcttcagcgagaccaagtctggagtgctgtgcagcctggaggagcgctggagcagctaccagaaccagacagacaacagcgtgtccaatgaccccctgctgatgacccagtacttcaagaagagccccagcctgacagaggccagcgagaagatcagcacccacatccagaccagccagcaggccctgcagttcacagactttgtggagaatgacaagctggtgggcgtggccctgcggctggccaacaacagcgagcacatcaacctgcccctgcctgaaaatgacttcagtgactgtgagatctcctacagccccctgcagagtgatgaggacacccatgacattgatgagaagccagatgacagccaggagcagctgttcttcacagagagcagcaaggatggcagcctggaggaggatgatgacagctgtggcttcttcaagaagagacatggccccctgctgaaggaccaggatgagagctgccccaaggtgaacagcttcctgacccgggacaagtatgatgagggcctgtaccgcttcaacagcctgaatgacctgagccagcccatcagccagaacaatgaaagcaccctgccctatgacctggcctgcacaggaggagactttgtgctcttccccccagccctggccggcaagctggccgcctctgtgcaccaggccaccaaggccaagccagatgagcctgagttccacagcgcccagagcaacaagcagaagcaggtgattgaggagagctctgtgtacaaccaggtgtccctgcccctggtgaagagcctgatgctgaagccctttgagagccaggtggagggctacctgagcagccagcccacccagaacaccatcaggaagctgagcagcgagaacctgaatgccaagaacaacaccaacagcgcctgcttctgcaggaaggccctggagggcgtgcctgtgggcaaggccaccatcctgaacacagagaacctgagcagcaccccagcccccaagtacctgaagatcctgcccagcggcctgaagtacaatgcccggcaccccagcaccaaggtgatgaagcagatggacattggagtgtacttcggcctgccccccaagaggaaggaggagaagctgctgggggagagcgccctggagggcatcaacctgaaccctgtgcccagccccaaccagaagaggagcagccagtgcaagaggaaggccgagaagagcctgagtgacctggagtttgatgccagcaccctgcacgagagccagctgtctgtggagctgagcagcgagaggagccagaggcagaagaagcgctgcaggaagagcaacagcctgcaggagggcgcctgccagaagagaagtgaccacctgatcaacacagaaagtgaagctgtgaacctgagcaaggtgaaggtgttcaccaagagcgcccatggaggcctgcagaggggcaacaagaagatccctgagagcagcaatgtgggcggcagcaggaagaagacctgccccttctacaagaagatccctggcaccggcttcaccgtggatgccttccagtatggagtggtggagggctgcacagcctacttcctgacccacttccacagcgaccactacgccggcctgagcaagcacttcaccttccctgtgtactgcagcgagatcactggaaacctgctgaagaacaagctgcacgtgcaggagcagtacatccaccccctgcccctggacacagagtgcatcgtgaatggagtgaaggtggtgctgctggatgccaaccactgccctggagctgtgatgatcctcttctacctgcccaacggcaccgtcatcctgcacactggagacttccgggctgaccccagcatggagaggagcctgctggccgaccagaaggtgcacatgctgtacctggacaccacctactgcagccctgagtacaccttccccagccagcaggaggtgatccgctttgccatcaacacagcctttgaagctgtgaccctgaacccccacgccctggtggtgtgtggcacctacagcatcggcaaggagaaggtgttcctggccatcgcagatgtgctgggcagcaaggtgggcatgagccaggagaagtacaagaccctgcagtgcctgaacatccctgagatcaacagcctcatcaccacagacatgtgcagcagcctggtgcacctgctgcccatgatgcagatcaacttcaagggcctgcagagccacctgaagaagtgtggcggcaagtacaaccagatcctggccttccggcccaccggctggacccacagcaacaagttcaccagaattgctgatgtgatcccccagaccaagggcaacatcagcatctacggcatcccctacagcgagcacagcagctacctggagatgaagagatttgtgcagtggctgaagccccagaagatcatccccaccgtgaatgtgggcacctggaagagccgcagcaccatggagaagtacttccgggagtggaagctggaggccggctactag

SEQ ID NO: 182840 - DNA, 3123 bp, Artificial Sequence
  derived and/or modified sequence
atgctggaggacatcagcgaggaggacatctgggagtacaagagcaaaagaaaacccaaacgggtggaccccaataatggctctaagaacattctgaaatcagtcgaaaaagcgacagatggaaagtatcagtctaagaggtcccgcaatagaaaaagagctgcagaggccaaagaggtgaaagaccacgaggtcccacttggtaacgctggatgccagaccagcgtcgccagctctcaaaacagctcatgcggggacggtatccagcagacacaggacaaagagactaccccaggaaaattatgcaggacccagaagagtcagcatgttagccccaaaattaggcccgtgtatgatgggtactgtccaaactgccaaatgcctttttcctctctcatcggtcagacacctcgctggcacgtgtttgagtgcttggatagtccccccagaagcgagactgaatgccccgatggtctgctctgtacctctacaatcccgttccactataagcggtacacgcacttccttctcgcccagagtcgcgctggggaccacccattctcgtcgcccagccccgcgagtgggggtagcttctctgaaactaagagcggggttttgtgttcccttgaagaaaggtggtcgagttaccaaaatcaaacagacaattcggtcagcaacgatccactgctcatgacccagtacttcaagaagtctccgtcactgactgaggcaagtgaaaaaatcagcactcatattcagacctcccagcaggcattgcagtttactgatttcgtggagaacgataagctggtgggtgtagcgctcagattggcaaacaattctgagcatatcaatctgcctctgcccgaaaatgacttctccgattgcgaaatctcctacagccctcttcaaagtgacgaggacactcacgacatcgacgagaaacctgacgattcccaggagcagctgttttttacagagagctccaaagatggtagccttgaagaggatgatgattcctgtggtttctttaagaagcggcatggacccctgcttaaggaccaggacgagtcctgtccgaaggtaaattcctttctgaccagggataaatacgacgagggcctatacagattcaactcgttgaatgatctgagccagcctatttctcagaacaacgagagtacattgccctatgatcttgcttgtacgggtggagatttcgtgcttttcccccctgcattagccggaaaacttgccgcaagtgtgcatcaggctaccaaggctaaacccgatgaaccagagttccactctgcacagtcaaataaacagaaacaggtcattgaggaaagttcagtctataatcaggtgagcctgccattagtgaagtccctgatgttgaaacctttcgaatcccaggtcgagggatacttaagttcacaaccgacccagaacaccataaggaagctgtcctctgaaaatctgaacgccaagaacaataccaactcggcgtgcttttgtcgcaaggccctggaaggagtgccagtgggaaaggcaacgattttgaataccgaaaacctgtcttcaactcccgctccaaagtacctaaagatccttccctccggcttgaaatacaatgctcggcacccttcaaccaaggtgatgaaacaaatggatattggtgtgtacttcggcctgcccccgaagagaaaggaggaaaaactgttgggagagtccgccttggaaggcattaacctgaaccctgttccttccccaaatcaaaaacggagctcccagtgcaagcgcaaggcagagaagtcccttagtgaccttgagtttgatgccagcaccctccacgaatcacaactgtcagttgagctatcttccgaacgttcccagcggcagaaaaagaggtgcaggaagtcaaacagcctgcaggagggagcttgtcagaagcggagcgaccacctgattaatacagagtccgaggccgtgaacctgtccaaagtcaaggttttcaccaaatctgcccacggaggcctccagcgcggaaacaaaaaaatccccgaaagttccaacgtgggcgggtctcggaagaaaacctgtcccttctacaaaaagatccctggaactggattcacagttgatgcctttcagtacggcgtcgtggaggggtgtacagcttattttctgacgcatttccatagcgatcattacgcaggactgtcaaaacactttacgttcccagtgtattgctcagaaattaccggcaacctgctgaagaataagctgcacgttcaggagcaatatatccacccactacccctggacaccgagtgcattgtgaatggagtaaaagtagtccttctggacgccaatcattgccccggcgccgtgatgattctgttttacctccccaatggcaccgtgatactgcatactggagatttcagggccgatccaagcatggaaagaagtttgctcgccgatcaaaaggtgcatatgctgtatctggacacgacgtactgtagcccggaatatacgttcccatcccaacaggaagtgatccggtttgcaatcaacactgcctttgaggcagtgactcttaatccccacgcgttggtggtgtgcggcacatattccatcgggaaggagaaggtcttcctcgctattgcagacgttctcggaagtaaagtgggcatgagtcaggagaaatataagacgctacaatgcctgaatattcctgagatcaactccttaatcactactgacatgtgttcttccttggtacatctccttccaatgatgcagatcaacttcaaagggctacaatcacacctcaaaaaatgcggcggaaagtataatcagattttggcctttcggcccaccggatggacgcatagcaataaattcactaggatagccgacgtcatcccacagacgaaaggcaatataagtatttacggtatcccttacagcgagcacagcagctacctggaaatgaagcgcttcgtacagtggttaaagccacagaagatcatacctacagtcaacgtgggtacctggaaatctcgttccaccatggagaaatactttagagaatggaagttggaggctggctattag

SEQ ID NO: 182841 - DNA, 3123 bp, Artificial Sequence
  derived and/or modified sequence
atgctggaggacatcagcgaggaggacatctgggagtacaagagcaagagaaagcccaagcgggtggaccccaacaacggaagtaagaatattctgaagtcagtggagaaagccaccgatggaaaataccagagcaagagatccaggaatcgcaagagagcagccgaggccaaggaggtcaaagatcacgaggtccccctaggcaatgcgggatgccagacttcagtggcatcctctcagaacagcagttgtggcgacgggattcagcagacccaagacaaagagaccactccaggtaaactttgtaggacccagaaaagtcagcacgtgtcgccaaaaatccgaccagtgtacgacggctactgtccaaattgccagatgccatttagttccctcattggacagacgccccgatggcacgtgttcgagtgccttgacagccccccacgcagcgagactgagtgcccagatggactgctctgcacgagcaccatcccatttcattacaagcgttacacccacttcctgctggcacaaagccgagcgggtgatcacccgttctcatcccctagtcccgcttccgggggtagcttcagcgaaacaaagtctggcgttctgtgtagtctggaagaaagatggtccagttaccagaaccagactgataattctgtgagcaacgatccattgctgatgacccagtattttaagaagtccccttcccttactgaagcttcagaaaagatttcaacgcacattcagacatcccagcaggccttgcaatttacagacttcgttgaaaatgataagctggttggggtggccttgagactcgcaaataactcggaacacatcaatctccccctgcctgaaaacgacttctcagattgcgaaattagttatagtcctctgcaatccgacgaagatactcatgacattgatgagaaaccagacgattctcaggaacaactgttttttacggagtcctcaaaggacggttctttggaagaggatgacgatagttgtgggttttttaagaagaggcacggcccattgctgaaggaccaagacgagtcctgtccaaaggtgaactcctttctcacaagggacaagtacgatgaaggtctttacaggtttaattccctgaatgatctgagccagcccataagccaaaacaacgagtcaacgttaccatacgatctggcatgcacgggcggagactttgttctgtttccccctgcccttgctggcaagctggcagcaagtgtgcaccaagccacaaaggccaaacccgacgaacccgaatttcactccgctcagagtaacaagcagaagcaagtaatcgaggagagtagcgtttacaaccaggtgagcctgcccctcgtaaagtctctgatgctcaagcctttcgagagccaagtcgaaggatacctttcaagtcagcctacccagaacaccattaggaaactctcttctgagaacttgaacgcaaaaaacaacaccaactcagcctgcttttgcagaaaagccctggagggcgtgccagtggggaaggccaccatccttaacactgaaaatctgtcttcgacccccgctcccaagtatttaaagatccttccctcgggcctgaaatataacgcacgacatcctagcaccaaggttatgaaacagatggacattggggtatatttcgggctcccccccaagcggaaggaagagaagctgctgggcgagtccgccctggaaggtattaatctgaacccagtgccatcacctaatcagaagagatcatcccaatgcaaacggaaggctgagaagtcattgagcgacttggaatttgacgcctccaccctgcatgagagccaactcagcgtcgaactgagttccgaacgctcccaaagacagaaaaagcgttgtcgcaagtccaactctttacaagagggcgcgtgtcaaaagagatcagaccacctgattaataccgagagcgaagccgtcaatctgtccaaagttaaggtgtttacaaaaagcgcccacggaggcctgcagcgggggaacaagaagatccccgagagtagcaatgtgggtggctcccggaagaagacctgcccgttctataagaagatccctggtacaggatttacagtggatgctttccaatacggggtggtggaaggctgtaccgcctacttccttactcatttccacagcgaccactatgccggcttatcaaaacactttacctttccggtgtactgttcagagatcaccggtaacctcctcaaaaacaagctccatgtccaggaacagtatatccacccccttcctctggataccgagtgcatcgtgaacggagttaaagtagtcttgctggatgcaaaccactgtccaggagcagtgatgatcctgttctatcttccaaacggaaccgtaatcctgcacactggcgattttagagctgatccgagtatggaacgcagcctattggccgaccaaaaagtccacatgctgtatctggatactacctattgttcccccgagtacacgttcccttctcagcaggaagtaatccggttcgccatcaacactgcattcgaggctgttacgctcaacccccacgctctggtagtctgcggcacttacagcatcggaaaggaaaaagtgttcctggcgattgctgacgtgctgggtagcaaagttggcatgagccaggagaagtacaagactctccagtgcctcaatatccccgagattaatagtttaatcaccaccgatatgtgttcatctctggtacacctcctccccatgatgcaaatcaattttaaaggcctacagagtcatctgaaaaagtgtggagggaaatataatcagatccttgcattccgtcccaccggatggacacatagcaacaaattcacacgcattgccgatgttatcccccagaccaaagggaatatttcgatatatggaataccatacagcgagcatagttcatatctggaaatgaaaagatttgttcagtggctcaagccacagaagattattcctacagtaaacgtaggtacctggaagtctcgttcaaccatggagaagtattttagggagtggaaattggaggccggatattag

SEQ ID NO: 182842 - DNA, 3123 bp, Artificial Sequence
  derived and/or modified sequence
atgttagaggacatcagtgaagaggatatttgggagtacaagtcaaagagaaagccaaaacgtgtagaccctaataatggtagcaagaatattctaaagtcagttgagaaggcaacagacggcaagtatcaatcaaaacgcagtcggaaccggaaacgggcagctgaagctaaagaagtaaaggatcacgaggtgcccctaggcaatgccggttgtcagacctcagtcgccagcagtcaaaactcctcatgcggggatggcatccagcagacccaagataaagaaaccactccagggaagctatgccggacccagaaatctcagcacgtttctcccaaaatccgccctgtttacgatgggtactgtcccaactgtcaaatgccattttcttccctcattggccagaccccccgttggcatgtttttgagtgccttgattctccgcctcgctcagaaaccgaatgtcctgacggtttgctgtgtacttccacaattccatttcactataaacgttacactcactttctcttagcacagtcccgagctggcgaccaccccttttcttctcccagcccggcaagcggcggaagcttcagcgaaacgaaatcaggggtgttgtgtagcctggaggaaaggtggtcttcctaccagaaccagacagataatagtgtctctaatgatcccctgctgatgacccagtacttcaagaaatctccttccctgaccgaggcctccgagaaaataagcacccacattcaaacgagccagcaggccctgcagttcaccgatttcgtcgaaaatgataaactggtaggcgttgccctgaggcttgcaaataatagcgaacacattaatctccccttgccagaaaacgatttttccgactgtgaaatttcctactccccattgcagtctgacgaagatacccacgacattgatgagaagccagacgactctcaagagcagctgttttttacagagtcatcaaaagacggtagcctggaagaggatgacgattcctgtgggtttttcaagaagagacatggtccactgttgaaggaccaggatgagtcttgtccaaaagttaactcttttctgactcgcgataagtatgatgagggactatacagattcaattccctcaatgatctatcccagcctatttctcagaataatgagtcaactttgccgtacgatttggcctgtaccggaggcgatttcgtgctttttcccccagcactagcaggaaaacttgccgcaagcgtgcaccaagcaaccaaggctaaacctgatgagcccgaattccatagtgcgcagagtaataagcagaaacaggttattgaggaatccagtgtctataaccaggtttccctcccactggtgaagtctctgatgcttaagccatttgaatcccaggtcgagggatatctctcttcacagcccacccagaatacaattaggaagctgtcatccgagaaccttaatgccaaaaacaatactaattcggcatgcttctgcagaaaagccctggagggcgtgccggtgggaaaggccactatcttaaatactgagaaccttagctctacgcccgctccgaagtaccttaaaatcctgcccagcggtctcaagtataacgcccgtcacccttccaccaaggtcatgaagcagatggatataggcgtatactttggactgccccctaagaggaaagaggagaagctgctcggtgaaagcgcactggaaggaatcaatctcaaccccgtgccctcccccaatcagaagcgcagcagccagtgtaagaggaaggcagagaagtcactctcagacctcgaattcgatgcctctaccctgcatgagagtcagctctcagtggagctttcaagtgagcgttctcaacgtcaaaaaaagcggtgcagaaaatctaactccctgcaggaaggcgcttgtcagaaaaggtcagaccatctgataaacacagaaagcgaagcagtcaatctcagtaaggtgaaagtgttcacaaagtctgcacacggcggactccagagaggaaataagaaaatccctgaaagcagcaacgttggcggatccagaaagaaaacctgcccgttttacaagaagattccaggcacagggttcactgtggacgccttccagtatggcgtcgtagaaggatgcacggcttactttcttacccacttccattctgaccactacgccggtctctcaaaacactttacgtttccagtgtactgcagcgaaatcactggtaatctgctcaagaataaacttcacgtgcaggagcaatacatccaccctcttccacttgacacagaatgcatcgtaaacggtgtgaaggttgttctgcttgacgctaatcattgtcctggcgcagtcatgatactgttttaccttcccaatggcacagtaatcctgcacactggagactttcgggcagacccctccatggagaggtcactccttgcagaccaaaaagttcacatgctgtatttggacaccacgtattgctcccccgagtacacctttccatctcaacaggaggtcattagattcgcaatcaacactgctttcgaagccgtcacactcaatcctcacgccctagtagtttgtggtacgtattccatcgggaaggagaaggtgtttcttgccattgcagacgtcctaggatccaaggtgggtatgtctcaggagaagtacaaaaccttgcaatgtctcaacattcccgaaattaacagcctcatcactactgatatgtgcagctcactagtgcacttgttgcctatgatgcagattaatttcaaaggactgcagtcacatcttaagaagtgcggcggaaagtataaccagatcctcgcatttcgccctaccgggtggactcactctaataaatttactagaatagcagacgtgatccctcagacaaagggcaacatttctatctacggcatcccttattctgaacacagctcttacttggagatgaagcgcttcgtgcagtggctgaaacctcaaaagattataccaactgtgaatgttggcacgtggaaatctcgctcgacaatggaaaaatattttcgggaatggaagctagaggcagggtactag

SEQ ID NO: 182843 - DNA, 3123 bp, Artificial Sequence
  derived and/or modified sequence
atgctagaggacatttccgaagaagatatatgggagtataaatccaaacgaaagcctaaaagggtggatcctaataatggcagcaaaaacattttgaagtcggtagagaaagctaccgatggaaagtaccagtcaaaacgatccagaaaccgcaagagggctgcggaagccaaagaagtgaaagatcacgaggttccgctcgggaatgccggatgtcagacgagtgtcgcgtcttctcaaaacagctcttgcggcgatggaatccaacagacgcaggacaaagaaactactccgggaaagttatgtcgcacacagaaaagccagcacgtgtcgccaaaaattagacccgtctacgatggttattgtccgaactgtcaaatgccatttagcagcttgattggccagactccgaggtggcacgtgttcgagtgcctggacagccctccgcgaagtgaaactgagtgccctgatggactactgtgcaccagcacaattcctttccactacaaacgttacacacactttttacttgcccagagcagagcaggggaccaccccttttctagtccatcacccgctagcggagggtcattttccgagaccaagagcggtgtcctctgttctcttgaagagcggtggagctcataccaaaaccaaaccgacaacagcgtctccaatgatcccttgctgatgacccaatatttcaaaaagtccccatctctgacggaggccagtgaaaaaatctctacccatattcaaacatcacaacaggccctgcagttcaccgattttgttgaaaatgataagttggtgggtgtagccctgaggcttgcaaacaactcggagcatatcaatctgccactgcctgagaacgatttctctgattgcgagatctcatactccccactgcagtctgacgaggacactcatgatatcgatgaaaagccagacgacagccaggaacagttgttcttcacagagtcaagcaaagacgggagtctggaggaagacgatgatagctgcggattttttaaaaaaaggcacggccctctgcttaaggaccaggacgagagctgtcccaaggtgaacagctttcttactagagacaagtacgatgaagggctgtatcgcttcaactcacttaacgacctgtctcagcccatatcccagaataacgagtccacactcccttacgatctcgcatgcaccggaggcgattttgtgttgttcccaccagcacttgccggaaagttggctgcctctgtacatcaagcaacaaaggccaagcctgatgaacctgagttccatagtgcacagtctaataaacaaaagcaagttattgaggagagctcagtctacaatcaggtgtcgttgcctctggtgaagagtctgatgcttaagccctttgaatcccaggtcgaaggttatttatcgtcacagcccacccaaaatacgatcagaaaattgagttctgaaaatctgaacgccaagaataacaccaattcagcctgcttttgtcgaaaggctctcgagggtgtgcctgtgggaaaggctactatcttgaacaccgagaatctgtctagcaccccagcgcctaaatacctgaagattctgcccagtgggcttaaatacaatgcgcgtcatccgtccaccaaggttatgaaacaaatggacattggggtttactttggcttaccaccaaagcggaaagaggaaaaactgctaggtgagtctgctctggagggcatcaatctcaatcccgtcccatcccccaaccaaaaacggagttcacagtgcaagaggaaggccgaaaaatcactgagcgacctggaattcgacgcatctactctgcatgaatctcaacttagcgtggaactatcctccgaacgcagtcaacgccagaagaagcggtgtcggaagtcaaattctcttcaggaaggagcctgccagaagaggtcagatcacttgataaacacagagtcagaggccgtgaatttatccaaggttaaagtcttcaccaagagtgctcacggaggtctgcagcggggtaataagaaaataccagagtcttcaaacgttggaggatctcgcaagaagacttgcccattctacaaaaaaatccctggcacgggtttcacagtcgatgctttccagtatggcgtggtcgaaggctgtaccgcttacttcctgactcacttccactcagatcactatgcaggcttgagcaagcacttcacatttccggtttattgctcggagatcaccgggaacctgctgaagaacaaacttcatgtacaggagcaatatatacatcccttgcccctcgacacagagtgcatcgtgaatggagtgaaagtagtacttctggacgcaaatcactgtccaggagccgtcatgatattattttacctgccaaacggaacagtgattttgcataccggggactttcgagcggatccttctatggagcgttccctcctcgccgaccagaaggttcatatgctgtaccttgataccacttactgctcaccagagtacacctttccctctcagcaggaagtgattcgctttgctatcaacaccgcctttgaggctgtgacactcaaccctcatgcacttgtggtgtgcgggacctatagtatcggcaaggaaaaagtgttcctcgcgatagcagacgttctgggatccaaggttggcatgagccaggagaagtataaaactctgcagtgtctgaacatccctgaaattaattccctgatcactactgatatgtgcagctctctggtgcacctgttgcccatgatgcagattaattttaagggactgcagtcacatttaaagaagtgtggaggaaaatataaccagatcctcgcttttcggcctactgggtggacccattcaaataagtttacacgcattgcagacgttatcccccagactaagggaaacatctctatctatggcatcccctatagtgaacactcctcatatctggaaatgaaacgcttcgtgcagtggctgaaaccccagaagattattcccacagtgaacgtggggacgtggaaatccagaagcaccatggagaaatactttcgcgagtggaagctggaagctgggtactag

SEQ ID NO: 182844 - DNA, 3123 bp, Artificial Sequence
  derived and/or modified sequence
atgctggaggacatcagcgaggaggacatctgggagtacaagagcaagagaaagcccaagagagtggaccccaacaacggcagcaagaacatcctgaagagcgtggagaaggccaccgacggcaagtaccagagcaagagaagcagaaacagaaagagagccgccgaggccaaggaggtgaaggaccacgaggtgcccctgggcaacgccggctgccagaccagcgtggccagcagccagaacagcagctgcggcgacggcatccagcagacccaggacaaggagaccacccccggcaagctgtgcagaacccagaagagccagcacgtgagccccaagatcagacccgtgtacgacggctactgccccaactgccagatgcccttcagcagcctgatcggccagacccccagatggcacgtgttcgagtgcctggacagcccccccagaagcgagaccgagtgccccgacggcctgctgtgcaccagcaccatccccttccactacaagagatacacccacttcctgctggcccagagcagagccggcgaccaccccttcagcagccccagccccgccagcggcggcagcttcagcgagaccaagagcggcgtgctgtgcagcctggaggagagatggagcagctaccagaaccagaccgacaacagcgtgagcaacgaccccctgctgatgacccagtacttcaagaagagccccagcctgaccgaggccagcgagaagatcagcacccacatccagaccagccagcaggccctgcagttcaccgacttcgtggagaacgacaagctggtgggcgtggccctgagactggccaacaacagcgagcacatcaacctgcccctgcccgagaacgacttcagcgactgcgagatcagctacagccccctgcagagcgacgaggacacccacgacatcgacgagaagcccgacgacagccaggagcagctgttcttcaccgagagcagcaaggacggcagcctggaggaggacgacgacagctgcggcttcttcaagaagagacacggccccctgctgaaggaccaggacgagagctgccccaaggtgaacagcttcctgaccagagacaagtacgacgagggcctgtacagattcaacagcctgaacgacctgagccagcccatcagccagaacaacgagagcaccctgccctacgacctggcctgcaccggcggcgacttcgtgctgttcccccccgccctggccggcaagctggccgccagcgtgcaccaggccaccaaggccaagcccgacgagcccgagttccacagcgcccagagcaacaagcagaagcaggtgatcgaggagagcagcgtgtacaaccaggtgagcctgcccctggtgaagagcctgatgctgaagcccttcgagagccaggtggagggctacctgagcagccagcccacccagaacaccatcagaaagctgagcagcgagaacctgaacgccaagaacaacaccaacagcgcctgcttctgcagaaaggccctggagggcgtgcccgtgggcaaggccaccatcctgaacaccgagaacctgagcagcacccccgcccccaagtacctgaagatcctgcccagcggcctgaagtacaacgccagacaccccagcaccaaggtgatgaagcagatggacatcggcgtgtacttcggcctgccccccaagagaaaggaggagaagctgctgggcgagagcgccctggagggcatcaacctgaaccccgtgcccagccccaaccagaagagaagcagccagtgcaagagaaaggccgagaagagcctgagcgacctggagttcgacgccagcaccctgcacgagagccagctgagcgtggagctgagcagcgagagaagccagagacagaagaagagatgcagaaagagcaacagcctgcaggagggcgcctgccagaagagaagcgaccacctgatcaacaccgagagcgaggccgtgaacctgagcaaggtgaaggtgttcaccaagagcgcccacggcggcctgcagagaggcaacaagaagatccccgagagcagcaacgtgggcggcagcagaaagaagacctgccccttctacaagaagatccccggcaccggcttcaccgtggacgccttccagtacggcgtggtggagggctgcaccgcctacttcctgacccacttccacagcgaccactacgccggcctgagcaagcacttcaccttccccgtgtactgcagcgagatcaccggcaacctgctgaagaacaagctgcacgtgcaggagcagtacatccaccccctgcccctggacaccgagtgcatcgtgaacggcgtgaaggtggtgctgctggacgccaaccactgccccggcgccgtgatgatcctgttctacctgcccaacggcaccgtgatcctgcacaccggcgacttcagagccgaccccagcatggagagaagcctgctggccgaccagaaggtgcacatgctgtacctggacaccacctactgcagccccgagtacaccttccccagccagcaggaggtgatcagattcgccatcaacaccgccttcgaggccgtgaccctgaacccccacgccctggtggtgtgcggcacctacagcatcggcaaggagaaggtgttcctggccatcgccgacgtgctgggcagcaaggtgggcatgagccaggagaagtacaagaccctgcagtgcctgaacatccccgagatcaacagcctgatcaccaccgacatgtgcagcagcctggtgcacctgctgcccatgatgcagatcaacttcaagggcctgcagagccacctgaagaagtgcggcggcaagtacaaccagatcctggccttcagacccaccggctggacccacagcaacaagttcaccagaatcgccgacgtgatcccccagaccaagggcaacatcagcatctacggcatcccctacagcgagcacagcagctacctggagatgaagagattcgtgcagtggctgaagccccagaagatcatccccaccgtgaacgtgggcacctggaagagcagaagcaccatggagaagtacttcagagagtggaagctggaggccggctactag

SEQ ID NO: 182845 - DNA, 4464 bp, Artificial Sequence
  derived and/or modified sequence
ggactctgagggctttttggagctcgctatgcttaacctggagatgattaaggccccgcttcctggcctcccagcctctaatgccaaaagataagggagaggctggcgtgtgaccccgttttgagtcaggtggacagagggctggccaccttcggaaccatgggtgcaatacggagtcagacctcaatacaagcccactctttcacatatttgaacttttttcacatatcaactttttttgttcactgtgcagggattgttcattgctgctggaggaagatcatggactgtcgcgggaaactgaagtggttgagtatccactagtcgtggatgagggcagtgacttcgcagttttttgcgaattacacatctctttgattatgttgtgactagttttgttagatagtcatttagtgtttgggatacctgttaagccctttgtccagggactgtggttggatttatgaattatttggacggttgtccacttgaaagaactgacagtagcttcataacaatgttacaaatctcgttctaagattaagctgttgaacctatatttgccattagcgcttaatttttgaagtattatttttatgaatcaagccctggaaaaggacaagatatttgaatgaaatagcacccataatggagaacttcacagttgctactcctgtgataggtttatcttagtttcattgtggtataaatggaatagcaggtgttgtcaggtacaaggtttgtagcttgccaatatgttcattaccaacactgcagattcccattgagttggtgggggttttgttacctttgttttttttctcagcaaaataattctataactttttgtttgtgacaagaaatggactttcagtttacttaagattaatacttcttgaatgataaaatcattttgccatgttagaagacatttccgaagaagacatttgggaatacaaatctaaaagaaaaccaaaacgagttgatccaaataatggctctaaaaatattctaaaatctgttgaaaaagcaacagatggaaaataccagtcaaaacggagtagaaacagaaaaagagccgcagaagctaaagaggtgaaggaccatgaagtgccccttggaaatgcaggttgtcagacttctgttgcttctagtcagaattcaagttgtggagatggtattcagcagacccaagacaaggaaactactccaggaaaactctgtagaactcaaaaaagccaacacgtgtccccaaagatacgtccagtttatgatggatactgtccaaattgccagatgcctttttcctcattgatagggcagacacctcgatggcatgtttttgaatgtttggattctccaccacgctctgaaacagagtgtcctgatggtcttctgtgtacctcaaccattccttttcattacaagagatacactcacttcctgctagctcaaagcagggctggtgatcatccttttagcagcccatcacctgcgtcaggtggcagtttcagtgagactaagtcaggcgtcctttgtagccttgaggaaagatggtcttcgtatcagaaccaaactgataactcggtttcaaatgatcccttattgatgacacagtattttaaaaagtctccgtctctgactgaagccagtgaaaagatttctactcatatccaaacatcccaacaagctctacaatttacagattttgttgagaatgacaaactagtgggagttgctttgcgtcttgcaaacaactcagaacacataaatttgccattgccagaaaatgacttcagtgactgtgaaatctcctattctccacttcaaagtgatgaagacactcatgatatcgatgaaaaaccggatgattcacaagaacaactgttttttaccgaaagctcaaaagatggcagcctcgaagaagatgatgacagctgtggtttttttaaaaaacgacatggtcccttactgaaggaccaggatgagagctgccccaaagtgaacagcttcttaactcgggataagtatgatgaaggattgtatagattcaatagtctaaatgatttgtctcaacctatttctcaaaataatgagagtactttgccttatgatctggcatgtactggtggtgattttgtgttgtttccacctgcattggcagggaagcttgctgcttctgttcatcaggcaactaaagcaaaacctgatgagccagaatttcactcagctcaatcaaataaacagaaacaggtaattgaagaatcatctgtttacaatcaagtttctcttccgttagttaagagtttaatgttgaaaccttttgaaagtcaggtagaagggtatctttcttcccaaccaacccaaaatacaattagaaaattatcaagtgagaacttgaatgctaagaataatactaactcagcatgtttctgcagaaaggcattagagggtgtgccagttggtaaagctacaattttaaatacagaaaacttgtctagtacacctgctccgaagtatttgaaaatattgccttctggtcttaagtataatgcaagacatccttctaccaaggtaatgaagcaaatggatataggtgtgtattttggactacctcccaaaagaaaggaagagaaattgctaggggaaagtgcattagaagggataaacttaaatccagttccaagtcctaatcaaaagaggtcctcgcagtgcaagaggaaagcagaaaaatctttaagtgatttagaatttgatgcaagtactttacatgagagtcagctttctgtggaactttctagtgagaggtcacagcgtcaaaaaaagagatgtagaaagtcaaattcactgcaggaaggagcgtgtcagaagagatcagatcaccttattaatacagaatctgaagcagtcaatttaagtaaagtcaaagtcttcacaaaatcagctcatggtgggctgcaaaggggcaacaagaaaatcccagagtcatctaatgtaggaggatcaagaaaaaagacatgtccattctataagaaaatacctggaaccggctttacagttgatgcctttcagtatggcgtggttgaaggttgcacagcctattttctcacacattttcattctgatcattatgctggattgtctaaacacttcacatttccagtttattgtagtgagataactggcaatttgttgaagaacaagcttcatgtgcaagaacaatatattcacccattgccactggacactgaatgtattgtgaatggtgtcaaagttgttttgcttgatgccaatcactgtccaggtgctgtcatgatcctcttttatcttcctaatggtactgtcatattacacacgggagacttcagagcagatcccagcatggaacgttctcttcttgcggaccagaaagtccatatgctgtacttagataccacatattgtagcccagaatacacctttccatctcagcaagaggttatccggtttgccatcaacactgcctttgaggctgtaactctaaacccacatgctcttgttgtctgtggcacttactctattggaaaagagaaagtcttcctagccattgctgatgttttaggttcaaaagtgggcatgtcccaggaaaaatataaaactctacagtgcctcaatataccagaaattaattcactcatcactaccgacatgtgcagttcattggttcaccttctcccaatgatgcaaattaattttaagggcttacagagtcatttgaagaagtgtggtgggaaatacaatcagattttggcatttcgacctacaggatggacacactctaacaagttcactagaatagcagatgttattccccagaccaaaggaaacatttcaatatatggaattccttacagtgaacacagcagctacctagaaatgaagcgctttgtccagtggctgaagccccagaaaatcatacctactgtaaatgtgggcacctggaaatctaggagcacaatggagaaatattttagagagtggaaattggaagctggatattgatgatacctccgaggattcagtagtagttaagttccttggatgtagcttgttagtagttaaatctatagaaatgtgaaatacactttgtgtggaaaaacctcatgaagattgttcagatactttattttctcatttatgtttgaacaacatgttcgtggtgctgaatgcctctcagcatcatcaaggataactgaaactgggtctccctgggacccttaatttcttgtcccctgccctccatgggcagttatattctgcatcaagccttagaagaggaagcaaaggcagattcagggaccaaaaggattaatgataattaataaagtagtttgaagcattatatatataagtaattatgtgtctttaaaattatgagatgaaacttttatatgacgtgtatacttaaataaaattaatataaaa

SEQ ID NO: 182846 - DNA, 4241 bp, Artificial Sequence
  derived and/or modified sequence
cgggaacttgttcccgccaagaccctaaagggattgttcattgctgctggaggaagatcatggactgtcgcgggaaactgaagtggttgagtatccactagtcgtggatgagggcagtgacttcgcagttttttgcgaattacacatctctttgattatgttgtgactagttttgttagatagtcatttagtgtttgggatacctgttaagccctttgtccagggactgtggttggatttatgaattatttggacggttgtccacttgaaagaactgacagtagcttcataacaatgttacaaatctcgttctaagattaagctgttgaacctatatttgccattagcgcttaatttttgaagtattatttttatgaatcaagccctggaaaaggacaagatatttgaatgaaatagcacccataatggagaacttcacagttgctactcctgtgataggtttatcttagtttcattgtggtataaatggaatagcaggtgttgtcaggtacaaggtttgtagcttgccaatatgttcattaccaacactgcagattcccattgagttggtgggggttttgttacctttgttttttttctcagcaaaataattctataactttttgtttgtgacaagaaatggactttcagtttacttaagattaatacttcttgaatgataaaatcattttgccatgttagaagacatttccgaagaagacatttgggaatacaaatctaaaagaaaaccaaaacgagttgatccaaataatggctctaaaaatattctaaaatctgttgaaaaagcaacagatggaaaataccagtcaaaacggagtagaaacagaaaaagagccgcagaagctaaagaggtgaaggaccatgaagtgccccttggaaatgcaggttgtcagacttctgttgcttctagtcagaattcaagttgtggagatggtattcagcagacccaagacaaggaaactactccaggaaaactctgtagaactcaaaaaagccaacacgtgtccccaaagatacgtccagtttatgatggatactgtccaaattgccagatgcctttttcctcattgatagggcagacacctcgatggcatgtttttgaatgtttggattctccaccacgctctgaaacagagtgtcctgatggtcttctgtgtacctcaaccattccttttcattacaagagatacactcacttcctgctagctcaaagcagggctggtgatcatccttttagcagcccatcacctgcgtcaggtggcagtttcagtgagactaagtcaggcgtcctttgtagccttgaggaaagatggtcttcgtatcagaaccaaactgataactcggtttcaaatgatcccttattgatgacacagtattttaaaaagtctccgtctctgactgaagccagtgaaaagatttctactcatatccaaacatcccaacaagctctacaatttacagattttgttgagaatgacaaactagtgggagttgctttgcgtcttgcaaacaactcagaacacataaatttgccattgccagaaaatgacttcagtgactgtgaaatctcctattctccacttcaaagtgatgaagacactcatgatatcgatgaaaaaccggatgattcacaagaacaactgttttttaccgaaagctcaaaagatggcagcctcgaagaagatgatgacagctgtggtttttttaaaaaacgacatggtcccttactgaaggaccaggatgagagctgccccaaagtgaacagcttcttaactcgggataagtatgatgaaggattgtatagattcaatagtctaaatgatttgtctcaacctatttctcaaaataatgagagtactttgccttatgatctggcatgtactggtggtgattttgtgttgtttccacctgcattggcagggaagcttgctgcttctgttcatcaggcaactaaagcaaaacctgatgagccagaatttcactcagctcaatcaaataaacagaaacaggtaattgaagaatcatctgtttacaatcaagtttctcttccgttagttaagagtttaatgttgaaaccttttgaaagtcaggtagaagggtatctttcttcccaaccaacccaaaatacaattagaaaattatcaagtgagaacttgaatgctaagaataatactaactcagcatgtttctgcagaaaggcattagagggtgtgccagttggtaaagctacaattttaaatacagaaaacttgtctagtacacctgctccgaagtatttgaaaatattgccttctggtcttaagtataatgcaagacatccttctaccaaggtaatgaagcaaatggatataggtgtgtattttggactacctcccaaaagaaaggaagagaaattgctaggggaaagtgcattagaagggataaacttaaatccagttccaagtcctaatcaaaagaggtcctcgcagtgcaagaggaaagcagaaaaatctttaagtgatttagaatttgatgcaagtactttacatgagagtcagctttctgtggaactttctagtgagaggtcacagcgtcaaaaaaagagatgtagaaagtcaaattcactgcaggaaggagcgtgtcagaagagatcagatcaccttattaatacagaatctgaagcagtcaatttaagtaaagtcaaagtcttcacaaaatcagctcatggtgggctgcaaaggggcaacaagaaaatcccagagtcatctaatgtaggaggatcaagaaaaaagacatgtccattctataagaaaatacctggaaccggctttacagttgatgcctttcagtatggcgtggttgaaggttgcacagcctattttctcacacattttcattctgatcattatgctggattgtctaaacacttcacatttccagtttattgtagtgagataactggcaatttgttgaagaacaagcttcatgtgcaagaacaatatattcacccattgccactggacactgaatgtattgtgaatggtgtcaaagttgttttgcttgatgccaatcactgtccaggtgctgtcatgatcctcttttatcttcctaatggtactgtcatattacacacgggagacttcagagcagatcccagcatggaacgttctcttcttgcggaccagaaagtccatatgctgtacttagataccacatattgtagcccagaatacacctttccatctcagcaagaggttatccggtttgccatcaacactgcctttgaggctgtaactctaaacccacatgctcttgttgtctgtggcacttactctattggaaaagagaaagtcttcctagccattgctgatgttttaggttcaaaagtgggcatgtcccaggaaaaatataaaactctacagtgcctcaatataccagaaattaattcactcatcactaccgacatgtgcagttcattggttcaccttctcccaatgatgcaaattaattttaagggcttacagagtcatttgaagaagtgtggtgggaaatacaatcagattttggcatttcgacctacaggatggacacactctaacaagttcactagaatagcagatgttattccccagaccaaaggaaacatttcaatatatggaattccttacagtgaacacagcagctacctagaaatgaagcgctttgtccagtggctgaagccccagaaaatcatacctactgtaaatgtgggcacctggaaatctaggagcacaatggagaaatattttagagagtggaaattggaagctggatattgatgatacctccgaggattcagtagtagttaagttccttggatgtagcttgttagtagttaaatctatagaaatgtgaaatacactttgtgtggaaaaacctcatgaagattgttcagatactttattttctcatttatgtttgaacaacatgttcgtggtgctgaatgcctctcagcatcatcaaggataactgaaactgggtctccctgggacccttaatttcttgtcccctgccctccatgggcagttatattctgcatcaagccttagaagaggaagcaaaggcagattcagggaccaaaaggattaatgataattaataaagtagtttgaagcattatatatataagtaattatgtgtctttaaaattatgagatgaaacttttatatgacgtgtatacttaaataaaattaatataaaa

SEQ ID NO: 182847 - protein, 638 aa, Artificial Sequence
  derived and/or modified sequence
MSLGQSACLFLSIARSRSVMTGEQMAAFHPSSTPNPLERPIKMGWLKKQRSIVKNWQQRYFVLRAQQLYYYKDEEDTKPQGCMYLPGCTIKEIATNPEEAGKFVFEIIPASWDQNRMGQDSYVLMASSQAEMEEWVKFLRRVAGTPCGVFGQRLDETVAYEQKFGPHLVPILVEKCAEFILEHGRNEEGIFRLPGQDNLVKQLRDAFDAGERPSFDRDTDVHTVASLLKLYLRDLPEPVVPWSQYEGFLLCGQLTNADEAKAQQELMKQLSILPRDNYSLLSYICRFLHEIQLNCAVNKMSVDNLATVIGVNLIRSKVEDPAVIMRGTPQIQRVMTMMIRDHEVLFPKSKDIPLSPPAQKNDPKKAPVARSSVGWDATEDLRISRTDSFSSMTSDSDTTSPTGQQPSDAFPEDSSKVPREKPGDWKMQSRKRTQTLPNRKCFLTSAFQGANSSKMEIFKNEFWSPSSEAKAGEGHRRTMSQDLRQLSDSQRTSTYDNVPSLPGSPGEEASALSSQACDSKGDTLASPNSETGPGKKNSGEEEIDSLQRMVQELRKEIETQKQMYEEQIKNLEKENYDVWAKVVRLNEELEKEKKKSAALEISLRNMERSREDVEKRNKALEEEVKEFVKSMKEPKTEA

SEQ ID NO: 182848 - DNA, 1917 bp, Artificial Sequence
  derived and/or modified sequence
atgtcgcttggtcagtcagcctgcctctttctgagcatagcacgaagccgcagtgtcatgacaggagagcagatggctgccttccatccttctagcacccctaaccccctggagagacctataaaaatgggttggcttaagaagcagcggagcatagtcaaaaattggcagcagcgatatttcgtgctgcgcgcccagcagctgtactattacaaagatgaagaggacactaagccacaaggatgcatgtacctgcctggttgcaccattaaagaaattgccactaaccccgaagaggctggaaagttcgtttttgaaatcattccggcctcctgggaccagaataggatggggcaggactcttacgttctgatggcctcaagtcaggctgaaatggaagagtgggtgaagttcttgcgaagggtggctggaaccccctgtggtgtgttcgggcagaggctggatgaaaccgtggcttacgagcagaagttcggaccacacctggtacctatccttgtggagaaatgcgccgagttcattctagaacacggcaggaatgaggagggtatcttcaggctgccaggtcaagacaaccttgtgaaacagctccgggatgccttcgatgcaggggagaggccatcctttgatcgcgataccgatgtgcacaccgtggcttcattgctgaaactgtaccttagagatttgcccgaacccgtggtgccctggtcacagtacgaaggctttctattgtgcggtcagctgacaaacgccgatgaagccaaggctcagcaggagctgatgaaacagcttagcattttgcctcgggacaactactctctgctttcctacatctgtcgattcctgcatgaaattcagctgaactgtgctgtgaataaaatgtctgtcgacaaccttgccacagtaatcggcgttaacctgattcgctctaaggttgaggatcccgcggtaatcatgcgtggcactccccagattcagcgcgtgatgactatgatgattagagatcacgaagtactgttccccaaaagcaaggatatcccccttagtccacctgcacagaaaaatgatccgaaaaaagccccggtcgcacggtccagcgtaggctgggatgcaacagaagacctgaggatcagtcgaaccgatagtttctcctcaatgacaagcgacagcgatactaccagcccaaccgggcagcagccttccgatgcattccctgaggacagctccaaagttccgcgagaaaaaccaggcgactggaagatgcagtcaaggaagaggacgcagaccctgcctaacagaaagtgcttcctgacctcagcgttccaaggggcaaatagcagcaaaatggagatttttaaaaatgaattttggtccccaagctctgaggcaaaggctggagagggacatcggaggaccatgtcgcaagacctgaggcagctgagcgactcccagcggacctcaacatacgataacgtaccgagcctgcctgggagccctggagaggaggcctccgccttatccagccaggcttgcgacagtaagggcgataccctggcttcacccaatagcgagacagggcctggaaaaaagaactcaggagaggaggagatagacagcctgcagcgcatggtgcaggaacttcggaaagaaatagaaactcagaagcagatgtacgaagagcaaatcaagaatttagaaaaggaaaattatgacgtttgggcgaaggtggtgcgcctcaacgaggaacttgagaaagaaaaaaagaagagtgccgcgctggaaataagtctgaggaacatggagcgtagccgggaggacgttgaaaaacggaacaaagccttagaagaggaggtcaaggaattcgtgaaaagcatgaaggaacctaaaacagaggcctag

SEQ ID NO: 182849 - DNA, 1917 bp, Artificial Sequence
  derived and/or modified sequence
atgagcctgggccagagcgcctgcctcttcctgagcatcgcccggagccgctctgtgatgactggagagcagatggccgccttccaccccagcagcacccccaaccccctggagcggcccatcaagatgggctggctgaagaagcagaggagcatcgtgaagaactggcagcagcgctactttgtgctgcgggcccagcagctgtactactacaaggatgaggaggacaccaagccccagggctgcatgtacctgcccggctgcaccatcaaggagatcgccaccaaccctgaggaggccggcaagtttgtgtttgagatcatcccagcctcctgggaccagaacaggatgggccaggacagctatgtgctgatggccagcagccaggccgagatggaggagtgggtgaagttcctgcggcgggtggccggcaccccctgtggggtgtttggccagaggctggatgaaacagtggcctatgagcagaagtttggcccccacctggtgcccatcctggtggagaagtgtgccgagttcatcctggagcacggcagaaatgaggagggcatcttccggctgcccggccaggacaacctggtgaagcagctgagagatgcctttgatgctggggagcggcccagctttgaccgggacacagatgtgcacacagtggccagcctgctgaagctgtacctgcgggacctgcctgagcctgtggtgccctggagccagtatgagggcttcctgctgtgtggccagctgaccaatgctgatgaggccaaggcccagcaggagctgatgaagcagctgagcatcctgccccgggacaactacagcctgctgagctacatctgccgcttcctgcacgagatccagctgaactgtgctgtgaacaagatgtctgtggacaacctggccaccgtgattggagtgaacctgatccgcagcaaggtggaggaccctgctgtgatcatgaggggcaccccccagatccagagggtgatgaccatgatgatccgggaccacgaggtgctcttccccaagagcaaggacatccccctgagccccccagcccagaagaatgaccccaagaaggcccctgtggcccggagctctgtgggctgggatgccacagaggacctgcgcatcagcaggacagacagcttcagctccatgaccagtgacagcgacaccaccagccccaccggccagcagcccagtgatgccttccctgaggacagcagcaaggtgccccgggagaagccaggggactggaagatgcagagcaggaagaggacccagaccctgcccaacaggaagtgcttcctgaccagcgccttccagggcgccaacagcagcaagatggagatcttcaagaatgagttctggagccccagcagcgaggccaaggccggggagggccacaggaggaccatgagccaggacctgcggcagctgagtgacagccagaggaccagcacctatgacaacgtgcccagcctgcccggcagccctggagaggaggccagcgccctgagcagccaggcctgtgacagcaagggggacaccctggccagccccaacagcgagactggacctgggaagaagaacagcggggaggaggagattgacagcctgcagaggatggtgcaggagctgaggaaggagattgagacccagaagcagatgtatgaggagcagatcaagaacctggagaaggagaactatgatgtgtgggccaaggtggtgcggctgaatgaggagctggagaaggagaagaagaagtctgctgccctggagatcagcctgaggaacatggagaggagcagagaagatgtggagaagaggaacaaggccctggaggaggaggtgaaggagtttgtgaagtccatgaaggagcccaagacagaggcctag

SEQ ID NO: 182850 - DNA, 1917 bp, Artificial Sequence
  derived and/or modified sequence
atgagcctgggccagagcgcctgcctgttcctgagcatcgcccggtcccgctcagtgatgaccggagagcagatggctgcctttcaccccagttcgacaccaaatccactggaacgcccgataaagatggggtggttgaaaaaacagagatctatcgtgaagaactggcagcagcggtattttgttcttagggcacagcagctgtactactataaagacgaagaagacaccaagccgcaaggttgtatgtatctcccagggtgcactatcaaagaaattgcaacgaatcccgaagaagccggaaagttcgtattcgaaatcatcccagcatcatgggaccagaataggatgggtcaagacagttacgtgctcatggcttcttcacaggccgagatggaggaatgggtgaagttcttgcgccgagtcgctggaactccttgtggagtgttcggacaacggttggatgagacagtcgcatacgaacagaaattcggtcctcacctggtgcccatcctagttgagaagtgtgcagaattcatccttgaacacggtaggaacgaagagggtatcttccgtctacccgggcaggataatctcgtgaaacagcttagggatgcattcgatgcaggcgagcgtcccagctttgatcgtgacacagacgtacatacagtcgcctccctcctgaagctgtacttgcgcgatctgcccgaaccggtcgtgccatggtcacaatacgagggcttcctcctgtgcggacagctgaccaacgccgacgaggccaaggctcagcaggaactgatgaaacagcttagcatactcccacgtgataattactctttactgtcctatatatgccgtttcctccacgagattcagctgaactgcgctgtgaataagatgtccgtggacaaccttgccacagtaatcggtgtcaatctgatccggtcaaaggtggaggatcctgccgtgattatgagaggcacgccccaaatccagcgtgtgatgacgatgatgatccgcgaccacgaggtactgttccctaagagtaaggatattcctctgagcccacctgcccagaaaaatgatcctaagaaagcccccgtcgcgaggagttccgtgggctgggatgcaaccgaagatctgagaatctccaggacggatagtttttcttctatgacatctgatagtgatacaacgtcacccacaggtcagcagccttctgatgcttttcccgaggacagctctaaggtgccgagggaaaagccgggcgactggaagatgcagagcagaaaacgcacccaaactctcccgaataggaagtgcttcctcacctccgctttccagggagccaatagctccaaaatggaaatcttcaaaaatgagttttggtccccttctagcgaagcaaaggctggcgagggacacagacggacaatgagccaagatctgagacagttgtcagattcccaacgaacatcaacgtacgacaacgtgccctccctgcctgggtcgcccggagaagaggcaagtgcacttagctctcaggcttgcgatagcaagggagatacactggctagcccaaactctgaaacgggcccaggcaagaagaactctggtgaggaggaaatcgacagtctgcagcggatggttcaggagctgagaaaggagatcgagacacagaagcagatgtatgaagagcaaatcaaaaatctagagaaagagaattatgacgtttgggctaaagtagtgcggcttaatgaggagctggagaaggagaagaagaaatccgcagccttagaaatttcactaagaaacatggagagaagtagggaagacgtcgagaagcgcaacaaagcattagaggaggaagtcaaagaattcgtgaaatcaatgaaggagcctaaaacagaagcttag

SEQ ID NO: 182851 - DNA, 1917 bp, Artificial Sequence
  derived and/or modified sequence
atgagcctgggacaatcagcttgtcttttcctttccatagcgaggagccgaagtgtgatgactggagaacaaatggcggctttccatccatctagtacaccaaaccctctagaacgcccaatcaagatgggctggctcaagaaacagcgctccatcgtgaagaattggcagcagagatatttcgtcctgcgggcacagcaactttattactataaagatgaggaagacaccaagccgcagggatgcatgtacctacccggttgtaccattaaagaaatcgcgactaaccccgaggaagctggaaagtttgtcttcgaaattattccagcatcctgggaccagaatcggatggggcaggatagctacgtcctcatggcgagttcgcaggccgagatggaggagtgggttaaatttctgaggagagtggcaggaactccctgcggagtgtttgggcaacggctggatgagacagtggcctacgagcaaaagttcggccctcacctggtgccgattctcgtcgaaaagtgtgctgaatttattttggagcatggtcggaacgaggaaggcatatttcggcttccagggcaggacaacttggtcaaacagctgagggatgcttttgatgccggagagagaccttctttcgacagggataccgatgtccacactgtggcatccttgctgaaattgtacctgagggacttgcctgaacccgttgtgccctggtcccaatacgaggggttcctcctctgcgggcagctcacaaacgctgacgaggcaaaggctcagcaggagctgatgaagcagctgagtattttgccaagagacaactacagtcttctctcctacatctgtagatttctacacgaaatccagctaaactgcgccgtgaataaaatgtccgtagacaatcttgccacagtgatcggggtgaacctgatccggtccaaagtcgaagatcctgccgttattatgagaggtacgccacagatccagagggtgatgactatgatgattagggaccacgaagtcctgtttcctaaaagtaaagacataccattgagtccccctgcacagaaaaatgatcctaagaaagccccagtcgcccgaagctccgtcgggtgggacgctacggaggatctgcgcattagccggacagattccttctccagcatgacctcggacagcgatactacatctcccacgggacagcagccttctgatgcttttccggaggacagttccaaggttccaagagagaagcccggtgactggaagatgcagtcccgcaagcgcacgcagacactgcctaacaggaagtgtttcttgacatcggcctttcaaggcgctaactctagcaagatggagatcttcaaaaatgaattctggtcacccagctctgaggccaaggccggagaaggccatcgacgaacgatgagtcaggacctccgccagctgtctgatagtcagcggacctccacatacgacaacgttccaagtctgcccggttctccaggcgaggaagcatcagcattaagttctcaggcttgcgacagtaaaggtgacaccttggcctctcccaattcagaaaccggacctgggaagaaaaattccggagaggaggagatcgactcactgcaaagaatggtgcaagagctgcgcaaagagatcgaaacccagaaacagatgtacgaggaacaaattaaaaacctggaaaaggaaaattacgacgtgtgggctaaggttgtgagactgaatgaggagctggaaaaggaaaaaaaaaagagtgctgccctggaaatcagtttgcggaatatggaacgttccagagaggatgtcgaaaagcggaataaagcattagaggaggaggttaaggaatttgttaagagcatgaaggagcccaaaacagaagcgtag

SEQ ID NO: 182852 - DNA, 2936 bp, Artificial Sequence
  derived and/or modified sequence
ccgagccttcagagtgaggcattattttctcctctctcttgtcagatactgactcccacgcaggaaaaaggaagcaccttttgtcagatgctgtggccacttcctcttcagaaggctccagccaacctttcggtttgcagaatgacggggcccgccgcggtgccggactgcctgtgcacggggccaccgactgcagcctgggttttattcttggcctggccctgaccgggagctggcccctcggctgcttctctggctcgggggggactttctctggctcagatccggacccctgaactggacctggttgtcgtccccccgcttctcagccccctctggggttcctctctcctctccgcccactctttgctcactgccccatgtccctcggtcagtcggcctgtctgttcctctctatagctcggtcaaggagtgtgatgactggcgagcagatggctgccttccatccatcgtccacccccaacccgctggagaggcccatcaagatgggctggctgaagaagcagaggtccatcgtgaagaactggcagcagaggtactttgtgctgagggcgcagcagctctactactacaaggatgaagaggacacgaagccccagggctgcatgtatctaccaggatgtacaatcaaggagatcgccacaaacccagaagaagctgggaagtttgtctttgaaatcattccagcctcatgggaccagaatcgcatgggacaggactcctatgtcctcatggccagctctcaggcggagatggaggagtgggttaaattcctcaggagagttgctggcacaccctgtggagtgtttggccagcgcttggatgagactgtggcctatgaacagaaattcggcccccatctggtgcccatcctggtggagaaatgtgcagagttcatcctggagcacggccggaatgaagagggcatcttccgtctgcctgggcaggacaacctggtgaagcagctgagagacgcttttgatgctggggagcggccctcctttgacagagacacagatgtgcacactgtggcttccctgttaaagctctacctccgagacctcccagagcccgtggttccctggagccagtacgaagggttcctgctctgtgggcagctcacgaatgcggatgaggcaaaggctcagcaggagttgatgaagcagctctccatccttcctcgtgacaactatagtctcctgagctacatctgcaggttcctacatgaaatacagctgaactgtgctgttaacaagatgagtgtggacaacctggctactgtgattggtgtgaatctcatcaggtcgaaggtcgaagaccctgccgtgatcatgagagggactcctcagatccaaagagtgatgactatgatgatcagagaccatgaagtcctcttccccaagtccaaggatatacccctgtcaccccctgcccagaaaaatgaccccaagaaagctccagtggcccgaagctctgtaggctgggatgccactgaagacctccgaatttctaggacagacagcttcagtagcatgacaagcgactctgatacaaccagccccaccggacagcagccgagcgatgcgtttccggaggacagcagcaaagtacccagggaaaagccaggagactggaaaatgcaatctcgtaaaaggactcaaacactccctaaccggaaatgtttcttgacatcagcttttcagggtgccaacagcagcaaaatggagatctttaaaaatgaattctggtcgccttcctcagaggctaaggcaggggaagggcacaggagaacgatgtctcaagacttgcgccaactttctgactcccaacggacttccacctacgataacgtcccttccctgccagggtcccctggggaggaagccagtgcactctcttcccaagcctgtgactccaagggagatactcttgccagtccaaactctgaaactgggcctggaaaaaagaactctggagaagaggaaattgattctttgcagaggatggtccaagagctacgaaaggaaatagaaacacagaagcaaatgtatgaggaacagattaaaaaccttgagaaggaaaattatgacgtttgggctaaagtggtgaggctcaatgaagaactggagaaggaaaagaagaagtctgcagccctagagatcagcctccgcaacatggagcgctcccgggaggatgttgagaagaggaacaaggccttggaagaagaagtcaaggaatttgtcaaatccatgaaggaacccaagaccgaggcttaagggtcccaggagtactgcagggacagccccagagaggcccaactctggcccctttctcagtgctatctgatgacggggaaacaaaattattctctgagagggaaaggacatttgagggaaacatcaaatttccccataaataaatgaatggagtttgcaggaaggtgagggtgagcagagatgtgtgtggacatctctgaccatccatcgctgtattcaaatggattgttttattccattctggtctcaggcatgaccacgtccagtgaagacatttgaggcagcacatctcaggacccaggcaatagactggccccaactcaggctggactaaggtgtgattaattctttgttttttgtgtggaacagctcaccttgtcagacagcctcagggcatctctgagacacaggggcagaaaatgacattcatcttttgagtcctcatccatggagtgctgtgtttggggggctgcatctgctgaagcgagaaccccattctgccaccccaccaggatgcccattctccaggacttctccaacttactattagactaaaccagaacaagcaacaaactgtatttatgcaagcaaaattgatgagaaaattatattcaaataaagcaaaaattaaaaaaaaaa

SEQ ID NO: 182853 - DNA, 1917 bp, Artificial Sequence
  derived and/or modified sequence
atgagcctgggccagagcgcctgcctgttcctgagcatcgccagaagcagaagcgtgatgaccggcgagcagatggccgccttccaccccagcagcacccccaaccccctggagagacccatcaagatgggctggctgaagaagcagagaagcatcgtgaagaactggcagcagagatacttcgtgctgagagcccagcagctgtactactacaaggacgaggaggacaccaagccccagggctgcatgtacctgcccggctgcaccatcaaggagatcgccaccaaccccgaggaggccggcaagttcgtgttcgagatcatccccgccagctgggaccagaacagaatgggccaggacagctacgtgctgatggccagcagccaggccgagatggaggagtgggtgaagttcctgagaagagtggccggcaccccctgcggcgtgttcggccagagactggacgagaccgtggcctacgagcagaagttcggcccccacctggtgcccatcctggtggagaagtgcgccgagttcatcctggagcacggcagaaacgaggagggcatcttcagactgcccggccaggacaacctggtgaagcagctgagagacgccttcgacgccggcgagagacccagcttcgacagagacaccgacgtgcacaccgtggccagcctgctgaagctgtacctgagagacctgcccgagcccgtggtgccctggagccagtacgagggcttcctgctgtgcggccagctgaccaacgccgacgaggccaaggcccagcaggagctgatgaagcagctgagcatcctgcccagagacaactacagcctgctgagctacatctgcagattcctgcacgagatccagctgaactgcgccgtgaacaagatgagcgtggacaacctggccaccgtgatcggcgtgaacctgatcagaagcaaggtggaggaccccgccgtgatcatgagaggcaccccccagatccagagagtgatgaccatgatgatcagagaccacgaggtgctgttccccaagagcaaggacatccccctgagcccccccgcccagaagaacgaccccaagaaggcccccgtggccagaagcagcgtgggctgggacgccaccgaggacctgagaatcagcagaaccgacagcttcagcagcatgaccagcgacagcgacaccaccagccccaccggccagcagcccagcgacgccttccccgaggacagcagcaaggtgcccagagagaagcccggcgactggaagatgcagagcagaaagagaacccagaccctgcccaacagaaagtgcttcctgaccagcgccttccagggcgccaacagcagcaagatggagatcttcaagaacgagttctggagccccagcagcgaggccaaggccggcgagggccacagaagaaccatgagccaggacctgagacagctgagcgacagccagagaaccagcacctacgacaacgtgcccagcctgcccggcagccccggcgaggaggccagcgccctgagcagccaggcctgcgacagcaagggcgacaccctggccagccccaacagcgagaccggccccggcaagaagaacagcggcgaggaggagatcgacagcctgcagagaatggtgcaggagctgagaaaggagatcgagacccagaagcagatgtacgaggagcagatcaagaacctggagaaggagaactacgacgtgtgggccaaggtggtgagactgaacgaggagctggagaaggagaagaagaagagcgccgccctggagatcagcctgagaaacatggagagaagcagagaggacgtggagaagagaaacaaggccctggaggaggaggtgaaggagttcgtgaagagcatgaaggagcccaagaccgaggcctag

SEQ ID NO: 182854 - protein, 1023 aa, Artificial Sequence
  derived and/or modified sequence
MGAGALAICQSKAAVRLKEDMKKIVAVPLNEQKDFTYQKLFGVSLQELERQGLTENGIPAVVWNIVEYLTQHGLTQEGLFRVNGNVKVVEQLRLKFESGVPVELGKDGDVCSAASLLKLFLRELPDSLITSALQPRFIQLFQDGRNDVQESSLRDLIKELPDTHYCLLKYLCQFLTKVAKHHVQNRMNVHNLATVFGPNCFHVPPGLEGMKEQDLCNKIMAKILENYNTLFEVEYTENDHLRCENLARLIIVKEVYYKNSLPILLTRGLERDMPKPPPKTKIPKSRSEGSIQAHRVLQPELSDGIPQLSLRLSYRKACLEDMNSAEGAISAKLVPSSQEDERPLSPFYLSAHVPQVSNVSATGELLERTIRSAVEQHLFDVNNSGGQSSEDSESGTLSASSATSARQRRRQSKEQDEVRHGRDKGLINKENTPSGFNHLDDCILNTQEVEKVHKNTFGCAGERSKPKRQKSSTKLSELHDNQDGLVNMESLNSTRSHERTGPDDFEWMSDERKGNEKDGGHTQHFESPTMKIQEHPSLSDTKQQRNQDAGDQEESFVSEVPQSDLTALCDEKNWEEPIPAFSSWQRENSDSDEAHLSPQAGRLIRQLLDEDSDPMLSPRFYAYGQSRQYLDDTEVPPSPPNSHSFMRRRSSSLGSYDDEQEDLTPAQLTRRIQSLKKKIRKFEDRFEEEKKYRPSHSDKAANPEVLKWTNDLAKFRRQLKESKLKISEEDLTPRMRQRSNTLPKSFGSQLEKEDEKKQELVDKAIKPSVEATLESIQRKLQEKRAESSRPEDIKDMTKDQIANEKVALQKALLYYESIHGRPVTKNERQVMKPLYDRYRLVKQILSRANTIPIIGSPSSKRRSPLLQPIIEGETASFFKEIKEEEEGSEDDSNVKPDFMVTLKTDFSARCFLDQFEDDADGFISPMDDKIPSKCSQDTGLSNLHAASIPELLEHLQEMREEKKRIRKKLRDFEDNFFRQNGRNVQKEDRTPMAEEYSEYKHIKAKLRLLEVLISKRDTDSKSM

SEQ ID NO: 182855 - DNA, 5858 bp, Artificial Sequence
  derived and/or modified sequence
ccttccagccatgtgggttcagcggaaagagaagcaaaaccactcttcctaaaatgttagaagctgctcttcgcttaccttggggcctttgcattgggagctgtttttcacatcaaagaatatgtgctgaatggaattttagtattttgctgtcgttttaatattttcgtctggtcttcctcagttcttccagacgctttctgagagaatgggggcaggagctctagccatctgtcaaagtaaagcagcggttcggctgaaagaagacatgaaaaagatagtggcagtgccattaaatgaacagaaggattttacctatcagaagttatttggagtcagtctccaagaacttgaacggcaggggctcaccgagaatggcattccagcagtagtgtggaatatagtggaatatttgacgcagcatggacttacccaagaaggtctttttagggtgaatggtaacgtgaaggtggtggaacaacttcgactgaagttcgagagtggagtgcccgtggagctcgggaaggacggtgatgtctgctcagcagccagtctgttgaagctgtttctgagggagctgcctgacagtctgatcacctcagcgttgcagcctcgattcattcaactctttcaggatggcagaaatgatgttcaggagagtagcttaagagacttaataaaagagctgccagacacccactactgcctcctcaagtacctttgccagttcttgacaaaagtagccaagcatcatgtgcagaatcgcatgaatgttcacaatctcgccactgtatttgggccaaattgctttcatgtgccacctgggcttgaaggcatgaaggaacaggacctgtgcaacaagataatggctaaaattctagaaaattacaataccctgtttgaagtagagtatacagaaaatgatcatctgagatgtgaaaacctggctaggcttatcatagtaaaagaggtctattataagaactccctgcccatccttttaacaagaggcttagaaagagacatgccaaaaccacctccaaaaaccaagatcccaaaatccaggagtgagggatctattcaggcccacagagtactgcaaccagagctatctgatggcattcctcagctcagcttgcggctaagttatagaaaagcctgcttggaagacatgaattcagcagagggtgctattagtgccaagttggtacccagttcacaggaagatgaaagacctctgtcacctttctatttgagtgctcatgtaccccaagtcagcaatgtgtctgcaaccggagaactcttagaaagaaccatccgatcagctgtagaacaacatctttttgatgttaataactctggaggtcaaagttcagaggactcagaatctggaacactatcagcatcttctgccacatctgccagacagcgccgccgccagtccaaggagcaggatgaagttcgacatgggagagacaagggacttatcaacaaagaaaatactccttctgggttcaaccaccttgatgattgtattttgaatactcaggaagtcgaaaaggtacacaaaaatacttttggttgtgctggagaaaggagcaagcctaaacgtcagaaatccagtactaaactttctgagcttcatgacaatcaggacggtcttgtgaatatggaaagtctcaattccacacgatctcatgagagaactggacctgatgattttgaatggatgtctgatgaaaggaaaggaaatgaaaaagatggtggacacactcagcattttgagagccccacaatgaagatccaggagcatcccagcctatctgacaccaaacagcagagaaatcaagatgccggtgaccaggaggagagctttgtctccgaagtgccccagtcggacctgactgcattgtgtgatgaaaagaactgggaagagcctatccctgctttctcctcctggcagcgggagaacagtgactctgatgaagcccacctctcgccgcaggctgggcgcctgatccgtcagctgctggacgaagacagcgaccccatgctctctcctcggttctacgcttatgggcagagcaggcaatacctggatgacacagaagtgcctccttccccaccaaactcccattctttcatgaggcggcgaagctcctctctggggtcctatgatgatgagcaagaggacctgacacctgcccagctcacacgaaggattcagagccttaaaaagaagatccggaagtttgaagatagattcgaagaagagaagaagtacagaccttcccacagtgacaaagcagccaatccggaggttctgaaatggacaaatgaccttgccaaattccggagacaacttaaagaatcaaaactaaagatatctgaagaggacctaactcccaggatgcggcagcgaagcaacacactccccaagagttttggttcccaacttgagaaagaagatgagaagaagcaagagctggtggataaagcaataaagcccagtgttgaagccacattggaatctattcagaggaagctccaggagaagcgagcggaaagcagccgccctgaggacattaaggatatgaccaaagaccagattgctaatgagaaagtggctctgcagaaagctctgttatattatgaaagcattcatggacggccggtaacaaagaacgaacggcaggtgatgaagccactatacgacaggtaccggctggtcaaacagatcctctcccgagctaacaccatacccatcattggttccccctccagcaagcggagaagccctttgctgcagccaattatcgagggcgaaactgcttccttcttcaaggagataaaggaagaagaggaggggtcagaagacgatagcaatgtgaagccagacttcatggtcactctgaaaaccgatttcagtgcacgatgctttctggaccaattcgaagatgacgctgatggatttatttccccaatggatgataaaataccatcaaaatgcagccaggacacagggctttcaaatctccatgctgcctcaatacctgaactcctggaacacctccaggaaatgagagaagaaaagaaaaggattcgaaagaaacttcgggattttgaagacaactttttcagacagaatggaagaaatgtccagaaggaagaccgcactcctatggctgaagaatacagtgaatataagcacataaaggcgaaactgaggctcctggaggtgctcatcagcaagagagacactgattccaagtccatgtgaggggcatggccaagcacagggggctggcagctgcggtgagagtttactgtccccagagaaagtgcagctctggaaggcagccttggggctggccctgcaaagcatgcagcccttctgcctctagaccatttggcatcggctcctgtttccattgcctgccttagaaactggctggaagaagacaatgtgacctgacttaggcattttgtaattggaaagtcaagactgcagtatgtgcacatgcgcacgcgcatgcacgcacacacacacacagtagtggagctttcctaacactagcagagattaatcactacattagacaacactcatctacagagaatatacactgttcttccctggataactgagaaacaagagaccattctctgtctaactgtgataaaaacaagctcaggactttattctatagagcaaacttgctgtggagggccatgctctccttggacccagttaactgcaaacgtgcattggagccctatttgctgccgctgccattctagtgacctttccacagagctgcgccttcctcacgtgtgtgaaaggttttccccttcagccctcaggtagatggaagctgcatctgcccacgatggcagtgcagtcatcatcttcaggatgtttcttcaggacttcctcagctgacaaggaattttggtccctgcctaggaccgggtcatctgcagaggacagagagatggtaagcagctgtatgaatgctgattttaaaaccaggtcatgggagaagagcctggagattctttcctgaacactgactgcacttaccagtctgattttatcgtcaaacaccaagccaggctagcatgctcatggcaatctgtttggggctgttttgttgtggcactagccaaacataaaggggcttaagtcagcctgcatacagaggatcggggagagaaggggcctgtgttctcagcctcctgagtacttaccagagtttaatttttttaaaaaaaatctgcactaaaatccccaaactgacaggtaaatgtagccctcagagctcagcccaaggcagaatctaaatcacactattttcgagatcatgtataaaaagaaaaaaaagaagtcatgctgtgtggccaattataatttttttcaaagactttgtcacaaaactgtctatattagacattttggagggaccaggaaatgtaagacaccaaatcctccatctcttcagtgtgcctgatgtcacctcatgatttgctgttacttttttaactcctgcgccaaggacagtgggttctgtgtccacctttgtgctttgcgaggccgagcccaggcatctgctcgcctgccacggctgaccagagaaggtgcttcaggagctctgccttagacgacgtgttacagtatgaacacacagcagaggcaccctcgtatgttttgaaagttgccttctgaaagggcacagttttaaggaaaagaaaaagaatgtaaaactatactgacccgttttcagttttaaagggtcgtgagaaactggctggtccaatgggatttacagcaacattttccattgctgaagtgaggtagcagctctcttctgtcagctgaatgttaaggatggggaaaaagaatgcctttaagtttgctcttaatcgtatggaagcttgagctatgtgttggaagtgccctggttttaatccatacacaaagacggtacataatcctacaggtttaaatgtacataaaaatatagtttggaattctttgctctactgtttacattgcagattgctataatttcaaggagtgagattataaataaaatgatgcactttaggatgtttcctatttttgaaatctgaacatgaatcattcacatgaccaaaaattgtgtttttttaaaaatacatgtctagtctgtcctttaatagctctcttaaataagctatgatattaatcagatcattaccagttagcttttaaagcacatttgtttaagactatgtttttggaaaaatacgctacagaatttttttttaagctacaaataaatgagatgctactaattgttttggaatctgttgtttctgccaaaggtaaattaactaaagatttattcaggaatccccatttgaatttgtatgattcaataaaagaaaacaccaagtaagttatataaaataaattgtgtatgagatgttgtgttttcctttgtaatttccactaactaactaactaacttatattcttcatggaatggagcccagaagaaatgagaggaagcccttttcacactagatcttatttgaagaaatgtttgttagtcagtcagtcagtggtttctggctctgccgagggagatgtgttccccagcaaccatttctgcagcccagaatctcaaggcactagaggcggtgtcttaattaattggcttcacaaagacaaaatgctctggactgggatttttcctttgctgtgttgggaatatgtgtttattaattagcacatgccaacaaaataaatgtcaagagttatttcataagtgtaagtaaacttaagaattaaagagtgcagacttataattttc

SEQ ID NO: 182856 - DNA, 3072 bp, Artificial Sequence
  derived and/or modified sequence
atgggggccggtgcactagcgatctgtcaatcaaaggccgctgtgagactaaaagaggatatgaaaaaaatcgtggcagtacctctcaacgaacagaaggactttacttaccaaaagctgttcggagtgtccttacaggagctggaaaggcagggtctgaccgaaaatggtattcccgccgtggtctggaatattgtcgaatatttgactcaacacgggctgacacaagaaggactcttcagagtcaacggcaacgttaaagtcgttgagcagcttagactgaagttcgagagtggcgtgcctgtggagctggggaaggatggtgacgtctgctcagccgctagcttgctgaagttatttcttagagaactgcccgattcattaatcaccagcgcactgcagcctagattcattcaacttttccaggacgggcgcaacgatgtccaggagagttcccttcgagatctcattaaggagctgcctgacacccattattgtctccttaagtatctgtgtcagttcctgacaaaggtggccaagcatcatgtgcagaaccgtatgaacgttcataatctggccactgtgtttggcccgaattgctttcatgtcccgccaggtttggagggcatgaaggagcaggacctgtgcaataagattatggctaaaattctggagaactataacaccctttttgaagtcgagtacaccgagaatgaccacctgcgctgcgagaatctggctagactgattatcgtgaaggaggtgtactataagaatagtctccctattctcctaactagaggcctcgaacgcgatatgccgaagccgccacccaagaccaagatccccaagtcaagaagcgagggctcaatacaggcccatagggttttacagcctgagctgtccgacgggatccctcagttatctcttcggctctcatacaggaaggcatgtctggaagacatgaactccgcagagggagctatttccgcaaagctcgtgcccagttctcaggaagatgagagaccattgtctcctttctatctgtcggctcacgttcctcaggtgagtaacgtttccgcaactggcgagctgctggagcgaacaatacgatcggcagtggagcagcacctgttcgacgttaataatagcgggggacagtccagcgaggactctgaatccgggactctgagcgcaagtagcgcgactagtgcccgtcagaggagaagacagagcaaagagcaggacgaggtgcggcacggcagagataagggcctaataaacaaggaaaacactcccagtgggttcaaccatttggacgattgtattctgaacacacaggaggttgaaaaagttcataagaacacctttggatgtgctggcgagaggtcgaaaccaaaacgtcaaaagtcctctacgaagctgagcgaactgcatgacaatcaagatggtcttgtgaacatggagagcttgaactccacacggtcccacgagcgcaccgggccagacgatttcgagtggatgagcgacgagcgcaaaggcaacgaaaaggacggggggcacacacaacactttgagagtcccactatgaagattcaggaacacccatcgctgtctgacacaaagcagcagcggaaccaggacgccggtgaccaggaggagagcttcgtttccgaagtccctcaatccgacctcactgccctttgcgatgagaaaaattgggaagaacctataccggccttcagttcatggcagcgcgaaaactccgatagtgacgaggctcacctatctccgcaggctggtcggttgataaggcagcttctggatgaggatagcgatcccatgttaagtccacgcttctatgcgtacggtcagtctcgacagtacctggatgacactgaggtgccgccctctcctcccaattctcactcattcatgcggcgccggagcagcagcttgggctcttacgatgacgagcaggaagacttgacccctgcccagctgacacggcgtatccaaagcctcaagaaaaaaattagaaaatttgaggataggtttgaggaggagaagaaataccgcccttcccactctgataaggcggccaatccagaagttctgaagtggaccaatgacctggcaaagttccgacgccaactaaaagaaagcaagctcaagatctccgaggaggatctgacgcccagaatgcgtcagcggagcaacactctccccaagtcctttggctcccaactggagaaagaagacgaaaagaagcaagagttggtcgacaaagcgattaaaccctctgttgaggcaacccttgaatccatccagcgtaagctccaagagaagcgtgccgagtcttctcgacctgaggacatcaaagatatgacaaaggatcaaattgccaatgagaaggtggctctgcagaaagcactgctgtactatgagagcatacatggcagacccgtgaccaaaaatgagcgccaggttatgaagcccctctacgatcggtaccggctcgtgaagcaaatcctctccagggctaacacaatacccataatcggctcgccatctagcaaaaggcggtcccccctactccagcccattatcgagggcgagacagctagctttttcaaggagatcaaggaagaagaggaagggtccgaggacgactcaaatgtcaaacctgatttcatggtcacactgaaaactgattttagcgcacgatgcttccttgaccaatttgaggacgacgctgatggcttcatctccccaatggatgacaaaataccatctaaatgctcccaggatacgggcctctctaacctgcatgctgcttcaatcccagaactccttgagcatttgcaggaaatgagagaagaaaagaaacgcatacgaaaaaaattgcgagatttcgaggataattttttccgacaaaacggcagaaacgtccaaaaagaagatcgaacgccaatggcagaagagtatagcgagtacaaacacataaaggccaaactcaggttgctcgaggtccttatcagtaaacgagatacagacagcaaaagtatgtag

SEQ ID NO: 182857 - DNA, 3072 bp, Artificial Sequence
  derived and/or modified sequence
atgggcgctggggccctggccatctgccagagcaaggctgctgtgcggctgaaggaggacatgaagaagatcgtggccgtgcccctgaatgagcagaaggacttcacctaccagaagctgtttggagtgtccctgcaggagctggagcggcagggcctgacagaaaatggcatcccagctgtggtgtggaacatcgtggagtacctgacccagcacggcctgacccaggagggcctcttccgggtgaatggaaatgtgaaggtggtggagcagctgcggctgaagtttgagagcggcgtgcctgtggagctgggcaaggatggagatgtgtgcagcgctgccagcctgctgaagctgttcctgcgggagctgcctgacagcctcatcaccagcgccctgcagccccgcttcatccagctgttccaggatggaagaaatgatgtgcaggagagcagcctgcgggacctgatcaaggagctgcctgacacccactactgcctgctgaagtacctgtgccagttcctgaccaaggtggccaagcaccacgtgcagaacaggatgaatgtgcacaacctggccaccgtgtttggccccaactgcttccacgtgcccccaggcctggagggcatgaaggagcaggacctgtgcaacaagatcatggccaagatcctggagaactacaacaccctgtttgaggtggagtacacagaaaatgaccacctgcgctgtgagaacctggcccggctcatcatcgtgaaggaggtgtactacaagaacagcctgcccatcctgctgacccggggcctggagcgggacatgcccaagcccccacccaagaccaagatccccaagagccgctctgagggcagcatccaggcccaccgggtgctgcagcctgagctgagtgatggcatcccccagctgagcctgcggctgagctacaggaaggcctgcctggaggacatgaacagcgctgagggcgccatcagcgccaagctggtgcccagcagccaggaggatgagcggcccctgagccccttctacctgagcgcccacgtgccccaggtgtccaatgtgtctgccaccggggagctgctggagaggaccatccgctctgctgtggagcagcacctgtttgatgtgaacaacagcggcggccagagcagcgaggacagcgagagcggcaccctgagcgccagcagcgccaccagcgcccggcagaggcggcggcagagcaaggagcaggatgaggtgcgccacggccgggacaagggcctcatcaacaaggagaacacccccagcggcttcaaccacctggatgactgcatcctgaacacccaggaggtggagaaggtgcacaagaacaccttcggctgtgccggggagaggagcaagcccaagaggcagaagagcagcaccaagctgtctgagctgcatgacaaccaggacggcctggtgaacatggagagcctgaacagcaccaggagccatgagaggacaggcccagatgactttgagtggatgtctgatgagaggaaaggaaatgagaaggatggcggccacacccagcactttgagagccccaccatgaagatccaggagcaccccagcctgagtgacaccaagcagcagaggaaccaggatgctggggaccaggaggagagctttgtgtctgaggtgccccagagcgacctgacagccctgtgtgatgagaagaactgggaggagcccatcccagccttcagctcctggcagagagaaaattctgacagtgatgaggcccacctgagcccccaggccggccgcctcatccggcagctgctggatgaggacagcgaccccatgctgagcccccgcttctacgcctacggccagagccggcagtacctggatgacacagaggtgccccccagcccccccaacagccacagcttcatgagaagaagaagcagcagcctgggcagctatgatgatgagcaggaggacctgaccccagcccagctgacccggcgcatccagagcctgaagaagaagatcaggaagtttgaagatagatttgaggaggagaagaagtaccggcccagccacagcgacaaggccgccaaccctgaggtgctgaagtggaccaatgacctggccaagttccggcggcagctgaaggagagcaagctgaagatcagcgaggaggacctgacccccaggatgaggcagaggagcaacaccctgcccaagagctttggcagccagctggagaaggaggatgagaagaagcaggagctggtggacaaggccatcaagcccagcgtggaggccaccctggagagcatccagaggaagctgcaggagaagagagctgagagcagcaggcctgaggacatcaaggacatgaccaaggaccagatcgccaatgagaaggtggccctgcagaaggccctgctgtactatgagagcatccacggccggcctgtgaccaagaatgaaaggcaggtgatgaagcccctgtatgaccgctaccgcctggtgaagcagatcctgagccgggccaacaccatccccatcatcggcagccccagcagcaagagaagaagccccctgctgcagcccatcatcgagggggagacagccagcttcttcaaggagatcaaggaggaggaggagggctctgaagatgacagcaatgtgaagccagacttcatggtgaccctgaagacagacttcagcgcccgctgcttcctggaccagtttgaagatgatgctgatggcttcatcagccccatggatgacaagatccccagcaagtgcagccaggacaccggcctgagcaacctgcatgctgccagcatccctgagctgctggagcacctgcaggagatgagggaggagaagaagaggatcaggaagaagctgcgggactttgaggacaacttcttccggcagaatggaagaaatgtgcagaaggaggacaggacccccatggccgaggagtacagcgagtacaagcacatcaaggccaagctgcggctgctggaggtgctgatcagcaagagggacacagacagcaagtccatgtag

SEQ ID NO: 182858 - DNA, 3072 bp, Artificial Sequence
  derived and/or modified sequence
atgggcgccggcgccctggccatctgccagagcaaggccgccgtgcgcctgaaagaagacatgaagaaaatcgttgccgtcccattaaacgaacagaaagacttcacctatcagaagttattcggcgtttctctgcaggaactagaacggcagggcctaactgagaacggtattccagctgtggtgtggaatatcgtggagtatttaacacaacatgggttaacacaggagggcttgtttcgcgtgaacggaaatgttaaggtggtggagcaactgcggttgaaatttgagtccggcgtgcccgtcgagctgggcaaagatggcgacgtgtgttcagccgcatctctcttgaagctgtttcttcgagaactgccagactctttgatcacttccgccctccagccaagatttatccagttatttcaagacgggcggaatgatgtgcaggagtcgagccttcgtgacctgatcaaagagttaccagatactcactactgtctgctgaagtatctgtgtcaatttctgacaaaggtggctaagcaccatgtgcagaatcgcatgaacgttcacaaccttgcaaccgtgtttgggcccaactgtttccacgtgccgccggggttggagggcatgaaggagcaagacctctgtaataagattatggccaagattcttgagaattataacaccctcttcgaggtcgaatatactgagaatgaccacctgaggtgtgagaaccttgcccgactcatcatcgttaaggaggtctactataaaaactccctgcctatcctgctgacacggggccttgagcgcgatatgcccaaaccacctcctaagaccaagatccccaagagcaggagcgagggatctatccaggcccatcgcgttctgcagcccgagctgtcggacggaatcccccaattgagtttgcgcctgtcatatcgcaaagcatgtctagaggacatgaactcggccgagggtgccatctctgccaaactggtcccatcctctcaggaggacgagcggccgctgagccctttctatctttcagcccatgtcccccaggtgagcaacgtctctgcaacaggagagctgctagagcggaccattcggtcagctgtggaacaacacctgtttgatgtgaacaacagcgggggacagtccagtgaggactccgaaagcggcactttgagcgcatccagtgccactagcgcacgacagcggcgtcgtcagagcaaggaacaggacgaagtgcggcatggccgcgacaagggactgataaataaggaaaacaccccttcaggatttaaccacttagacgactgtatcctcaacactcaggaggtagagaaggtccataaaaacacatttggatgtgccggggagaggagtaagcccaaaaggcagaaatcctcaaccaaattgtcagagctacacgacaaccaagacggtcttgtgaacatggagtcccttaactctacaaggtcccacgaacgaacaggccctgacgacttcgagtggatgagcgacgaaagaaaaggaaatgagaaggatggcggacacacgcaacatttcgaatcccctaccatgaagatccaggaacacccatcactcagcgacactaagcaacagcgaaatcaggacgcaggcgatcaggaggagagctttgtcagtgaggtgccccaaagcgacctcacggccttgtgcgatgaaaagaactgggaagagcctatccccgctttttcctcgtggcagcgagaaaattctgacagcgacgaggctcacctctctccacaggcagggcgactgattcgtcagttgctcgatgaggatagtgacccgatgctgagtccaaggttctacgcttacggccaatctcgacagtacctggacgatacggaggtgcctccttcaccccctaactcacacagcttcatgaggaggcggtcttcttccctggggtcatatgatgacgagcaggaggatctgactcccgcccaactgactaggaggattcagtcactcaagaagaagatcaggaagttcgaggaccgattcgaggaggaaaagaagtatcggccatcccattctgacaaggccgccaaccccgaggttcttaagtggactaacgatctggctaagttccgacgacaattgaaggagagcaaattgaagatatcggaggaggacctcactccacgcatgaggcagcgatccaataccttacccaaatctttcggcagtcagctcgagaaagaggacgagaaaaaacaagagcttgtggataaggccataaaaccctcagtagaggccactttggaatccatccagagaaaactccaggaaaaacgcgctgagtcaagtcgtccggaggacatcaaagacatgaccaaggaccaaattgccaatgaaaaggtggctctgcaaaaggcactattatactacgagtctatccatgggcggcccgtgacaaaaaacgagagacaggtgatgaaaccgctttatgataggtacagattggtgaagcaaatcctgtcacgcgctaacactatcccgatcatcggtagtccaagttcaaagcgccgttccccactcctgcagcctataatcgaaggggagaccgcttcgttcttcaaggaaattaaggaagaagaagagggcagcgaagacgattcgaacgtgaaacctgacttcatggtgaccctcaagaccgacttcagtgcccggtgcttcctcgaccagtttgaagatgacgctgatggcttcatcagtcctatggacgataaaatacctagcaaatgttctcaagacactgggctatcaaacctccacgcggcctccataccagaattactggagcacctgcaagaaatgagagaagagaagaaacgaatcagaaagaagctccgggacttcgaagacaatttctttagacagaatggcagaaatgttcagaaggaagacagaactccaatggccgaggagtactcagaatacaagcatatcaaagctaagctgagactgcttgaggtgctgatttcaaagcgtgatactgattctaaatccatgtag

SEQ ID NO: 182859 - DNA, 3072 bp, Artificial Sequence
  derived and/or modified sequence
atgggggcaggagccctcgccatctgtcagtctaaagcagcggtgcgactgaaggaagatatgaagaaaattgtggcggtgccactgaacgagcagaaagacttcacctatcagaaactgtttggagtctctttgcaagagcttgaacggcagggactcacggaaaacggaattcctgccgtcgtttggaacatcgtagaatatctgacacaacacggtcttacacaagaagggctgtttcgcgtaaatgggaatgtgaaagtcgttgaacaactgagactgaagtttgagtcaggagtacctgtggagctcggcaaagatggggacgtgtgtagcgctgctagcctcttaaagctcttcctgcgcgagttgccagatagccttattactagcgccctgcaaccgcgttttatccaattattccaggatgggagaaatgatgtgcaggagtcctccttgcgcgatctcataaaagagcttcccgacacccattattgtctgctgaagtacctgtgccagttcctcacgaaagtcgccaagcaccatgtgcagaatcggatgaatgttcacaacctggccacagtgtttggcccaaattgcttccacgttcctcccggattagaagggatgaaggagcaagacctctgcaataaaatcatggcaaagattctggaaaattataacactctttttgaagtcgaatacacagaaaacgatcacctgagatgtgagaatctcgcacggctgatcatcgtcaaagaggtgtactacaagaattcattaccaattttattgaccaggggactagaaagagatatgcctaagccacccccaaaaactaagatcccaaagagcagatcagagggatccattcaagcccaccgcgtgctccagcctgagttaagcgacgggatcccccagctctccctgaggctgagttatagaaaggcttgcctggaggatatgaattcagccgagggcgcaatttcagccaagctcgtcccgtcatcacaagaggacgagcgcccacttagcccgttctacctgtcagcccatgtgcctcaggtgtcaaatgtatcagccaccggcgagctcctcgagagaacgatccggagcgctgtagagcagcatctttttgacgtaaataacagcggcggtcagtctagcgaagactcagagtccggcaccctctctgcttcttcagcgactagtgccaggcaaagacgcaggcagtccaaggaacaagatgaggtgagacatgggcgagataaaggactcattaataaggagaatacgcccagtggattcaaccaccttgatgactgtattctgaacacacaagaggtcgaaaaagtccacaaaaacacattcggttgcgccggtgagagaagcaagcctaagcgtcagaaatcctctacaaaactgtcagaactgcacgacaatcaggatgggttggttaacatggagtcgctcaactctaccagaagccacgaaagaaccggccctgacgacttcgaatggatgtctgatgaacggaaaggaaatgagaaggacggcggacatacccaacacttcgagtctcccaccatgaagatacaagaacatcccagtttatccgacaccaagcagcagcgcaatcaggatgctggcgaccaggaggagtcctttgtctccgaggttccccaaagtgaccttaccgcactgtgcgacgaaaaaaactgggaggagcctattccagcattcagcagttggcaaagagagaattccgatagcgatgaggcccacctcagccctcaggccggaaggctgatcagacagcttctcgacgaggatagtgatccgatgctttcgcccaggttctacgcttacggacagagtcggcagtaccttgacgacactgaggtcccaccttctccacccaactctcactcatttatgagaaggcgcagtagcagtttgggttcctacgatgatgagcaagaggacctcacccctgcacagctcacccgaaggattcagtcactgaagaaaaagataaggaagttcgaagatcgcttcgaagaagaaaagaaatataggccatctcacagcgataaagccgctaaccccgaggttctcaagtggactaatgatcttgccaagttccgcagacagctgaaagagagtaagctgaaaatttcagaggaggaccttacaccaagaatgagacagagatccaatacccttccaaagagcttcggttcccagctggaaaaagaagatgaaaagaagcaggaactcgtcgataaagccatcaagccttcagttgaggccacccttgagtccatccagagaaagctccaggagaagagagccgagagtagtcgacccgaagacatcaaagatatgacaaaggatcaaattgctaatgaaaaggtagctctgcagaaagctttattgtactatgagtcgattcacggcaggcctgttacaaaaaacgagagacaagtcatgaagcccttatacgacagatacaggttagtgaagcagatcttgagcagggcgaatacgattccaattattgggtctccaagtagcaaaaggcggtctcctttgttgcaaccgattatcgaaggcgagacagcgagtttcttcaaggaaatcaaagaagaagaagaaggttcagaagatgatagcaatgtgaagcctgatttcatggtgacgctcaagaccgacttctccgctagatgtttcttagatcagttcgaggacgatgccgatggtttcattagcccaatggatgataaaattccttctaagtgttctcaggatactgggttgagtaatcttcatgccgctagtatccccgagctcttagagcacctccaagagatgagagaagagaagaagcgcattcgaaagaagcttcgggacttcgaagacaacttttttagacagaatgggaggaacgttcagaaggaggataggacccccatggctgaggaatattccgagtacaagcacatcaaagctaagttgcgcctgcttgaagtcctcatctcaaagcgagacaccgacagtaaatcaatgtag

SEQ ID NO: 182860 - DNA, 3072 bp, Artificial Sequence
  derived and/or modified sequence
atgggcgccggcgccctggccatctgccagagcaaggccgccgtgagactgaaggaggacatgaagaagatcgtggccgtgcccctgaacgagcagaaggacttcacctaccagaagctgttcggcgtgagcctgcaggagctggagagacagggcctgaccgagaacggcatccccgccgtggtgtggaacatcgtggagtacctgacccagcacggcctgacccaggagggcctgttcagagtgaacggcaacgtgaaggtggtggagcagctgagactgaagttcgagagcggcgtgcccgtggagctgggcaaggacggcgacgtgtgcagcgccgccagcctgctgaagctgttcctgagagagctgcccgacagcctgatcaccagcgccctgcagcccagattcatccagctgttccaggacggcagaaacgacgtgcaggagagcagcctgagagacctgatcaaggagctgcccgacacccactactgcctgctgaagtacctgtgccagttcctgaccaaggtggccaagcaccacgtgcagaacagaatgaacgtgcacaacctggccaccgtgttcggccccaactgcttccacgtgccccccggcctggagggcatgaaggagcaggacctgtgcaacaagatcatggccaagatcctggagaactacaacaccctgttcgaggtggagtacaccgagaacgaccacctgagatgcgagaacctggccagactgatcatcgtgaaggaggtgtactacaagaacagcctgcccatcctgctgaccagaggcctggagagagacatgcccaagcccccccccaagaccaagatccccaagagcagaagcgagggcagcatccaggcccacagagtgctgcagcccgagctgagcgacggcatcccccagctgagcctgagactgagctacagaaaggcctgcctggaggacatgaacagcgccgagggcgccatcagcgccaagctggtgcccagcagccaggaggacgagagacccctgagccccttctacctgagcgcccacgtgccccaggtgagcaacgtgagcgccaccggcgagctgctggagagaaccatcagaagcgccgtggagcagcacctgttcgacgtgaacaacagcggcggccagagcagcgaggacagcgagagcggcaccctgagcgccagcagcgccaccagcgccagacagagaagaagacagagcaaggagcaggacgaggtgagacacggcagagacaagggcctgatcaacaaggagaacacccccagcggcttcaaccacctggacgactgcatcctgaacacccaggaggtggagaaggtgcacaagaacaccttcggctgcgccggcgagagaagcaagcccaagagacagaagagcagcaccaagctgagcgagctgcacgacaaccaggacggcctggtgaacatggagagcctgaacagcaccagaagccacgagagaaccggccccgacgacttcgagtggatgagcgacgagagaaagggcaacgagaaggacggcggccacacccagcacttcgagagccccaccatgaagatccaggagcaccccagcctgagcgacaccaagcagcagagaaaccaggacgccggcgaccaggaggagagcttcgtgagcgaggtgccccagagcgacctgaccgccctgtgcgacgagaagaactgggaggagcccatccccgccttcagcagctggcagagagagaacagcgacagcgacgaggcccacctgagcccccaggccggcagactgatcagacagctgctggacgaggacagcgaccccatgctgagccccagattctacgcctacggccagagcagacagtacctggacgacaccgaggtgccccccagcccccccaacagccacagcttcatgagaagaagaagcagcagcctgggcagctacgacgacgagcaggaggacctgacccccgcccagctgaccagaagaatccagagcctgaagaagaagatcagaaagttcgaggacagattcgaggaggagaagaagtacagacccagccacagcgacaaggccgccaaccccgaggtgctgaagtggaccaacgacctggccaagttcagaagacagctgaaggagagcaagctgaagatcagcgaggaggacctgacccccagaatgagacagagaagcaacaccctgcccaagagcttcggcagccagctggagaaggaggacgagaagaagcaggagctggtggacaaggccatcaagcccagcgtggaggccaccctggagagcatccagagaaagctgcaggagaagagagccgagagcagcagacccgaggacatcaaggacatgaccaaggaccagatcgccaacgagaaggtggccctgcagaaggccctgctgtactacgagagcatccacggcagacccgtgaccaagaacgagagacaggtgatgaagcccctgtacgacagatacagactggtgaagcagatcctgagcagagccaacaccatccccatcatcggcagccccagcagcaagagaagaagccccctgctgcagcccatcatcgagggcgagaccgccagcttcttcaaggagatcaaggaggaggaggagggcagcgaggacgacagcaacgtgaagcccgacttcatggtgaccctgaagaccgacttcagcgccagatgcttcctggaccagttcgaggacgacgccgacggcttcatcagccccatggacgacaagatccccagcaagtgcagccaggacaccggcctgagcaacctgcacgccgccagcatccccgagctgctggagcacctgcaggagatgagagaggagaagaagagaatcagaaagaagctgagagacttcgaggacaacttcttcagacagaacggcagaaacgtgcagaaggaggacagaacccccatggccgaggagtacagcgagtacaagcacatcaaggccaagctgagactgctggaggtgctgatcagcaagagagacaccgacagcaagagcatgtag

SEQ ID NO: 182861 - DNA, 558 bp, Artificial Sequence
  derived and/or modified sequence
atgacaacccctaataaaacaccccctggcgcggatccaaagcagctcgagcggacaggtacagtccgcgaaattggttcacaggcagtatggtccttatcttcatgcaaacccggatttggcgtagaccagctgcgggatgataacctcgagacatactggcaatctgacggctctcagcctcacttggttaacatccaattcaggaggaaaacaaccgttaaaacactctgcatttacgccgactacaagtctgacgagtcttacactccctccaagatctccgtcagagtagggaataacttccacaatctgcaggagattaggcaattggaactggttgagccatctgggtggatacacgtgcctttaacagataaccacaaaaaaccaacccgaacgtttatgatccaaattgcggtgctggccaaccatcagaacgggcgtgatacacatatgcgccagatcaagatttacacccccgtcgaggagtccagtattgggaagttccctagatgcactacaatagactttatgatgtatagaagcattcgctag

SEQ ID NO: 182862 - DNA, 558 bp, Artificial Sequence
  derived and/or modified sequence
atgacaacccccaacaagactccccccggcgccgaccccaagcagctggagcgaactggcactgtccgtgagattggcagccaagccgtctggagcctgtcatcttgcaagccggggttcggggttgaccagctgcgtgacgataatctggagacctattggcaatctgacggatctcaaccccatttggtgaacatacagtttagaagaaaaactacagtgaaaacactgtgcatttatgccgactataagtccgacgagagttacacccctagcaagatcagtgtgagggtcgggaataattttcacaatctccaggagatccgccaactggaactggtggagcccagtggctggattcatgttcctttaacagacaaccataagaaaccaacacggacattcatgattcaaatcgccgtgttggctaatcaccagaacggtagggatactcatatgagacaaatcaagatttacacgcctgtggaggaaagttccatcgggaaattcccccggtgtaccacaatcgactttatgatgtatcgtagcatccggtag

SEQ ID NO: 182863 - DNA, 558 bp, Artificial Sequence
  derived and/or modified sequence
atgaccacgccgaacaaaacgcctcccggggcagatccaaaacagttagagcgcactggcactgtgagggaaatcggctcacaggccgtatggagcctgtcctcttgcaaacccggatttggcgtggaccagctgagagacgacaacttggagacatactggcagagtgatgggagccagccacatctcgtgaacatccaattccgcagaaagactacagtgaaaacattgtgtatttatgccgattataaatctgacgagtcttataccccttctaaaattagcgtgcgcgtagggaataactttcacaatttgcaggaaattcggcagctggagttagtagaaccctcaggctggattcacgttccactgactgacaaccataagaaaccaacacgcacatttatgatacagatagcggtgctagcaaatcaccagaatggccgcgacacacatatgcgtcaaataaaaatttacactcctgtggaggagtcctcaatcgggaaattccctcgctgtaccaccatagatttcatgatgtatcggtctattagatag

SEQ ID NO: 182864 - DNA, 477 bp, Artificial Sequence
  derived and/or modified sequence
atgacaacaccaaataagacccccccgggcgcagatccaaagcaactggaacgaacaggaaccgtccgggagatcggaagtcaggccgtctggtctttgagttcttgcaagccaggattcggtgtggatcaactccgcgacgacaatctggagacttactggcagagtgatggttcccaacctcacctcgtgaatatccagtttcgaagaaagaccacagttaagactctgtgtatctacgcggattataagtccgacgagagttataccccaagcaagattagtgtgcgggtgggcaacaacttccacaatctccaagaaatcaggcagcttgaactggtggagcctagcggatggatacacgtgccactgacagacaatcacaagaaaccaactcgaacgtttatgattcagattgccgtgctggctaatcaccagaatggcagggatacccacatgcggcaaatcaagatatag

SEQ ID NO: 182865 - DNA, 477 bp, Artificial Sequence
  derived and/or modified sequence
atgaccacccccaataaaactccacctggcgccgacccaaaacagttagagcgcaccggcaccgttcgggagatcggtagccaggcagtgtggtccctatcaagctgtaagcctggctttggtgtggatcagctacgagacgataacctggagacttattggcaatctgatggctcacagccacatttggtcaatatacaattccggaggaaaacaaccgttaaaactctgtgcatctatgctgactataagtccgatgaatcctatactccatccaaaatttccgtgagggtgggtaataattttcacaacctgcaagagatccgtcagcttgaattggtggaaccctccggctggatacacgtgcctctgacagataaccacaaaaaaccaacaaggaccttcatgatccagatcgccgtactggctaatcatcaaaatgggagggatacacacatgaggcagatcaaaatctag

SEQ ID NO: 182866 - DNA, 558 bp, Artificial Sequence
  derived and/or modified sequence
atgaccacccccaacaagaccccacctggagctgaccccaagcagctggagaggactggaacagtgcgggagatcggcagccaggccgtgtggagcctgagcagctgcaagccaggcttcggcgtggaccagctgagagatgacaacctggagacctactggcagagtgatggcagccagccccacctggtgaacatccagttccggaggaagaccaccgtgaagaccctgtgcatctatgctgactacaagagtgatgagagctacacccccagcaagatctctgtgcgggtgggcaacaacttccacaacctgcaggagatccggcagctggagctggtggagcccagcggctggattcatgtgcccctgacagacaaccacaagaagcccaccaggaccttcatgatccagattgctgtgctggccaaccaccagaatggccgggacacccacatgaggcagatcaagatctacacccctgtggaggagagcagcatcggcaagttcccccgctgcaccaccatcgacttcatgatgtaccgcagcatcagatag

SEQ ID NO: 182867 - DNA, 477 bp, Artificial Sequence
  derived and/or modified sequence
atgaccacccccaacaagaccccacctggagctgaccccaagcagctggagaggactggaacagtgcgggagatcggcagccaggccgtgtggagcctgagcagctgcaagccaggcttcggcgtggaccagctgagagatgacaacctggagacctactggcagagtgatggcagccagccccacctggtgaacatccagttccggaggaagaccaccgtgaagaccctgtgcatctatgctgactacaagagtgatgagagctacacccccagcaagatctctgtgcgggtgggcaacaacttccacaacctgcaggagatccggcagctggagctggtggagcccagcggctggattcatgtgcccctgacagacaaccacaagaagcccaccaggaccttcatgatccagattgctgtgctggccaaccaccagaatggccgggacacccacatgaggcagatcaagatctag

SEQ ID NO: 182868 - DNA, 558 bp, Artificial Sequence
  derived and/or modified sequence
atgaccacccccaacaagaccccccccggcgccgaccccaagcagttagagcggaccgggaccgtacgcgagatcggtagtcaggccgtttggtcacttagctcgtgtaagccaggctttggggtggatcagctgcgggacgacaaccttgaaacatactggcagagcgatggctctcagccccacttggtgaatatccagtttcgtaggaaaacaactgtcaaaacactctgtatttatgccgactataagtctgacgaaagctacacgcccagcaagattagcgtgagagttggcaacaacttccataatcttcaagaaatcagacagctggagctggtcgagcctagtggatggatccacgtgccacttacggataatcacaagaagccaaccagaaccttcatgatccaaatcgccgtcctggctaatcatcaaaacggacgagacacacatatgagacagattaaaatatataccccagtggaagaaagtagtatcggcaagttcccgcggtgtaccacaatcgatttcatgatgtatcgctcaatccgctag

SEQ ID NO: 182869 - DNA, 558 bp, Artificial Sequence
  derived and/or modified sequence
atgaccacccccaacaagaccccccccggcgccgaccccaagcagcttgaacgtactgggacagtccgggagattggctctcaggccgtgtggagcctgagtagctgcaagccaggcttcggggtggaccagctgcgagatgacaacctcgaaacctattggcaaagtgatggatctcaacctcacctcgtgaacatacagttcaggcggaagaccaccgtcaagactttgtgcatctacgccgattacaaatccgacgagtcatacacacctagcaaaatcagcgtgagggttggaaataacttccacaatttacaggaaatccggcagctggaattggtcgaaccgtccggctggatccacgttccccttaccgacaatcataagaagcctactcgcaccttcatgattcagatcgccgtgctggccaaccaccagaacggtagggatacccacatgcggcagataaaaatttacacacctgttgaggagagtagcatcggcaagttcccacgctgcacgaccattgattttatgatgtacagatcaatacgttag

SEQ ID NO: 182870 - DNA, 558 bp, Artificial Sequence
  derived and/or modified sequence
atgaccacccccaacaagaccccccccggcgccgaccccaagcagcttgaacggacagggaccgttcgggagatcggatcgcaggctgtctggagcctgagctcttgtaagccgggtttcggcgttgaccaactgagggacgacaatctggagacttattggcagagcgacgggtctcagcctcacctggtcaacatacaattccgccggaaaactactgtcaagaccctgtgcatttatgcagattacaagagcgacgagtcctacaccccgtccaagatatcagtacgcgtggggaataattttcacaatttgcaggagatccggcagctcgaactggtggagccctccggttggatccatgtcccgctaacggataatcataagaagcccacccggaccttcatgattcagatcgctgttctcgccaatcaccagaacggaagagacacccacatgcggcaaatcaagatctacaccccagtggaagaaagctccatcgggaagttcccccgctgtaccacaatcgacttcatgatgtaccgttctatcaggtag

SEQ ID NO: 182871 - DNA, 477 bp, Artificial Sequence
  derived and/or modified sequence
atgaccacccccaacaagaccccccccggcgccgaccccaagcagcttgagcggactggcaccgtgcgtgaaatcggctctcaggctgtgtggagcctgagctcctgtaaaccaggattcggtgttgaccagctgcgcgatgataatctagaaacttactggcagagcgacgggagtcaaccccatctggtcaacattcagtttcgaagaaagacaacagttaagaccctgtgcatttatgcggattataaatctgacgaatcctacacaccatctaaaatcagtgtgcgcgtagggaataatttccacaacctccaggagatacgccagctggaattagtggagccgagcgggtggattcacgtgccactaactgacaaccacaagaagcctacccggactttcatgatccaaatcgcagtcttggcaaatcaccagaacggccgcgacacgcatatgaggcaaattaagatttag

SEQ ID NO: 182872 - DNA, 477 bp, Artificial Sequence
  derived and/or modified sequence
atgaccacccccaacaagaccccccccggcgccgaccccaagcagcttgagagaacaggcactgtgcgtgagataggctcccaagccgtttggtccctgtccagctgtaaaccaggctttggagtggatcagcttcgcgacgataaccttgagacttattggcagtccgacgggtcccaaccacatttggtgaacattcagttcagaagaaaaactactgttaagaccctttgcatctatgctgactacaaaagcgacgagtcctacaccccttccaaaataagcgtcagagtgggaaacaactttcacaacctgcaagaaatcagacagctcgagctggtggagccgagcggctggatccatgtgcctcttacagacaatcataagaaaccaacccgtacattcatgatccagatcgctgtgcttgcaaaccaccagaacgggcgagatacgcacatgcggcagataaagatatag

SEQ ID NO: 182873 - DNA, 558 bp, Artificial Sequence
  derived and/or modified sequence
atgacgactcctaataagacacccccaggcgctgaccctaagcagctggagcgaaccggcaccgtgcgagagatcggatcccaggcggtgtggagcctttcttcttgcaaaccgggtttcggcgtggatcagcttagagatgacaatttagagacttactggcagagcgatggctctcagccccacttggttaatatacaatttcgtagaaagactacagtcaagactttgtgtatctatgccgactataagtctgatgagtcttatactcccagcaaaatatccgtgcgggtaggaaataactttcacaatctccaggagatcaggcaactagaactggtcgagccctctggttggattcacgtgccattgacagataatcataagaaaccaacgcgcacgttcatgattcagatagcagtattggcaaatcatcagaacggaagggacacgcatatgcggcagattaaaatttatacaccggttgaagagtcttccatagggaaatttcccaggtgcacaactattgacttcatgatgtatcgttccattcggtag

SEQ ID NO: 182874 - DNA, 558 bp, Artificial Sequence
  derived and/or modified sequence
atgacgacaccaaataagaccccaccaggagctgacccaaagcaacttgaaagaactggtaccgttagagagattgggagccaggcagtgtggtctttatcttcatgtaagcccggatttggggtagaccaactgagggacgataatctggagacatactggcagagcgacggaagtcagccccatctggtcaacatccagttcaggagaaagacaaccgttaagactctctgcatttatgcagattacaagtccgacgaaagttacaccccctctaaaatttccgtgagggttgggaataactttcataacttgcaggagattagacagctggagctagtggagccgtccgggtggatccacgtcccattaactgataatcacaagaaaccaactaggacctttatgatacagatcgcggtcttagccaatcaccagaatggaagagacacgcatatgaggcagattaagatctatactcctgtagaagaatctagtattgggaagtttcctcgatgcacgacaatcgattttatgatgtaccgaagcattcgttag

SEQ ID NO: 182875 - DNA, 558 bp, Artificial Sequence
  derived and/or modified sequence
atgaccacccccaacaagactcctccaggagctgatcccaagcagctggaacggacaggcactgtaagggaaataggaagccaagcagtttggtcgctttctagctgtaagcccggatttggtgtcgatcaattaagagatgacaatctggagacctattggcagtccgacggttcacagccccatctcgttaatatccagttccgccgaaaaactaccgtcaagactctctgtatttacgccgactataagtccgacgagagctacactccctcaaagataagcgtccgagtcgggaataactttcacaaccttcaggagattcggcagctggaactggtagaaccatccggctggatccacgtgcctctgaccgacaaccataaaaagcccactcggacattcatgatccagatcgcggtgctagctaatcaccagaacggcagagatacgcacatgcgccagatcaagatctatactccagtggaggaaagtagcatcgggaagtttcccagatgtacaactatcgattttatgatgtatcggagcatccggtag

SEQ ID NO: 182876 - DNA, 477 bp, Artificial Sequence
  derived and/or modified sequence
atgacaaccccaaacaagacccctcccggtgcggatcccaaacaacttgagcggacaggtactgtacgggaaatcggctcgcaggcagtgtggtctttgagcagctgtaaacctgggttcggtgttgatcagcttcgcgatgacaacctggagacttactggcaatccgatggttctcagccgcatctagtgaatattcaattcaggagaaagactacagttaagaccctctgtatctatgccgactacaaatctgatgaaagctataccccaagtaaaataagtgtgcgagtgggtaacaacttccacaatctacaggaaatcaggcagctggaactcgtggagcctagtgggtggattcatgtgcctctgaccgacaatcataagaaacctaccagaactttcatgatccaaattgcagtgttggccaaccaccaaaatgggagagacactcacatgcgtcaaatcaagatttag

SEQ ID NO: 182877 - DNA, 477 bp, Artificial Sequence
  derived and/or modified sequence
atgacaaccccaaataagacccccccaggggctgaccctaagcagcttgagaggactggaaccgttagggagattggatctcaggctgtgtggagccttagtagttgtaaacccggattcggagtggaccagctcagggatgacaatctggagacgtattggcagtccgatggaagccaacctcaccttgttaacatccaattccgcaggaaaactaccgttaagacactgtgtatctatgcagattataagtcggatgagagctacacccccagcaagattagcgtccgggtaggaaataacttccataatctccaagaaattagacagctggaattggtggagccaagcggctggatccacgtccctcttaccgataaccacaagaagccaactcgaacgttcatgatccagatcgcagtcctcgccaaccatcagaatggaagagatacgcatatgcggcagattaagatctag

SEQ ID NO: 182878 - DNA, 558 bp, Artificial Sequence
  derived and/or modified sequence
atgaccacccccaacaagaccccccccggcgccgaccccaagcagctggagagaaccggcaccgtgagagagatcggcagccaggccgtgtggagcctgagcagctgcaagcccggcttcggcgtggaccagctgagagacgacaacctggagacctactggcagagcgacggcagccagccccacctggtgaacatccagttcagaagaaagaccaccgtgaagaccctgtgcatctacgccgactacaagagcgacgagagctacacccccagcaagatcagcgtgagagtgggcaacaacttccacaacctgcaggagatcagacagctggagctggtggagcccagcggctggatccacgtgcccctgaccgacaaccacaagaagcccaccagaaccttcatgatccagatcgccgtgctggccaaccaccagaacggcagagacacccacatgagacagatcaagatctacacccccgtggaggagagcagcatcggcaagttccccagatgcaccaccatcgacttcatgatgtacagaagcatcagatag

SEQ ID NO: 182879 - DNA, 477 bp, Artificial Sequence
  derived and/or modified sequence
atgaccacccccaacaagaccccccccggcgccgaccccaagcagctggagagaaccggcaccgtgagagagatcggcagccaggccgtgtggagcctgagcagctgcaagcccggcttcggcgtggaccagctgagagacgacaacctggagacctactggcagagcgacggcagccagccccacctggtgaacatccagttcagaagaaagaccaccgtgaagaccctgtgcatctacgccgactacaagagcgacgagagctacacccccagcaagatcagcgtgagagtgggcaacaacttccacaacctgcaggagatcagacagctggagctggtggagcccagcggctggatccacgtgcccctgaccgacaaccacaagaagcccaccagaaccttcatgatccagatcgccgtgctggccaaccaccagaacggcagagacacccacatgagacagatcaagatctag

SEQ ID NO: 182880 - protein, 260 aa, Artificial Sequence
  derived and/or modified sequence
MPQNEYIELHRKRYGYRLDYHEKKRKKESREAHERSKKAKKMIGLKAKLYHKQRHAEKIQMKKTIKMHEKRNTKQKNDEKTPQGAVPAYLLDREGQSRAKVLSNMIKQKRKEKAGKWEVPLPKVRAQGETEVLKVIRTGKRKKKAWKRMVTKVCFVGDGFTRKPPKYERFIRPMGLRFKKAHVTHPELKATFCLPILGVKKNPSSPLYTTLGVITKGTVIEVNVSELGLVTQGGKVIWGKYAQVTNNPENDGCINAVLLV

SEQ ID NO: 182881 - DNA, 783 bp, Artificial Sequence
  derived and/or modified sequence
atgcctcagaatgaatacatcgagctgcaccgcaagcggtatggttatcggctcgattaccatgagaagaaacgcaaaaaggaaagccgcgaagcccatgaaagatccaagaaggccaagaaaatgatcggtcttaaggcgaaactgtatcataaacaacgacatgccgaaaagatccagatgaagaaaactatcaagatgcatgagaaacgaaatactaaacagaagaatgatgaaaaaacaccccagggcgccgtcccagcttatctcttggacagagaaggtcagagccgcgctaaggtgttatcgaatatgatcaaacagaaacgaaaagaaaaggccggcaaatgggaagtaccgctacccaaagtgcgggcacagggagaaaccgaagtcttaaaggtcattaggactgggaagaggaagaagaaggcctggaagagaatggtgaccaaggtgtgttttgtgggagacggattcacgcggaaaccccctaaatacgagcgcttcatccgccctatgggcctgagattcaagaaagcgcatgttacacacccagaacttaaggctaccttttgcctgccgattctcggtgttaagaagaatccatcctcacccctgtacacaacactcggtgtgattaccaagggaacagtgatcgaagtcaatgtgtctgagctcggcctggtaacccagggcggcaaggtcatctggggaaagtacgcacaggtaactaacaatccagaaaatgacggatgtattaatgcagtgctgctcgtgtag

SEQ ID NO: 182882 - DNA, 783 bp, Artificial Sequence
  derived and/or modified sequence
atgccccagaatgagtacatcgagctgcacaggaagagatatggctaccgcctggactaccacgagaagaagaggaagaaggagagccgggaggcccacgagaggagcaagaaggccaagaagatgattggcctgaaggccaagctgtaccacaagcagagacatgctgagaagatccagatgaagaagaccatcaagatgcatgagaagaggaacaccaagcagaagaatgatgagaagaccccccagggcgctgtgcctgcctacctgctggaccgggagggccagagccgggccaaggtgctgagcaacatgatcaagcagaagaggaaggagaaggccggcaagtgggaggtgcccctgcccaaggtgcgggcccagggcgagacagaggtgctgaaggtgatcagaacaggcaagaggaagaagaaggcctggaagaggatggtgaccaaggtgtgctttgtgggagatggcttcaccaggaagccacccaagtatgagcgcttcatccggcccatgggcctgcgcttcaagaaggcccacgtgacccaccctgagctgaaggccaccttctgcctgcccatcctgggcgtgaagaagaaccccagcagccccctgtacaccaccctgggcgtcatcaccaagggcaccgtcatcgaggtgaatgtgtctgagctgggcctggtgacccagggcggcaaggtgatctggggcaagtatgcccaggtgaccaacaacccagaaaatgatggctgcatcaatgctgtgctgctggtgtag

SEQ ID NO: 182883 - DNA, 783 bp, Artificial Sequence
  derived and/or modified sequence
atgccccagaacgagtacatcgagctgcaccggaagcggtacggctatagactggactaccacgaaaagaaacgcaagaaagagagcagggaagcccacgaacggagtaaaaaggccaaaaagatgattggccttaaagccaagttgtaccataaacagaggcatgcagaaaaaatccagatgaaaaagacaattaagatgcacgaaaagagaaatacaaaacagaagaacgacgagaagacaccacagggcgcagtgcccgcataccttctcgatcgcgagggtcaatccagagccaaggtgctatctaatatgattaaacagaaacgaaaagagaaagcaggcaaatgggaggtccctctccctaaggtgcgcgctcagggtgagaccgaggtcctgaaggtcatacgcaccggtaagagaaagaagaaagcctggaagcggatggttacaaaggtctgcttcgttggcgatggttttacccggaagccaccgaaatatgaaagatttataagacctatggggctgaggtttaaaaaggcccacgtgacacaccctgaactaaaggccaccttctgcttgcccatactgggagtgaagaagaaccccagcagtcccttatatactacgctgggcgtgatcacaaaggggacagttattgaagtgaacgtgagtgagctgggactcgtcactcaaggtggcaaagttatttggggtaagtacgcacaggtcacgaacaaccctgagaacgacggctgcattaatgcggtgctcctggtttag

SEQ ID NO: 182884 - DNA, 783 bp, Artificial Sequence
  derived and/or modified sequence
atgccacagaacgagtacatcgagcttcacaggaagcgctacggataccgtctggactatcatgaaaagaaaaggaagaaggagtcccgtgaagcgcacgagaggagcaagaaagccaagaagatgattggactgaaggctaaactttaccataagcagaggcacgctgagaaaatacagatgaagaaaacgatcaagatgcatgaaaagcgcaacaccaaacagaagaatgacgagaaaacgccccaaggtgccgtgcccgcatatctccttgatcgggaggggcagtcccgcgcaaaggtcttgtctaacatgattaaacagaaacgcaaagagaaagcaggcaaatgggaggtgccactcccgaaagtgagggcccagggagagaccgaggttctgaaagttattcggacagggaagcgaaaaaagaaggcctggaaacgtatggtaacgaaggtttgtttcgtgggagacgggtttacacgaaagccacccaagtatgagagatttatccgcccaatgggcctcaggttcaagaaagctcatgtgacacacccggaactgaaggcaacattctgcttgccaatcctgggtgtgaaaaagaacccttcatctcccttatacactacacttggggtgattactaaaggcacggtcatagaagtgaatgtcagtgagctcgggctggtaacgcagggaggtaaagtaatttggggaaagtacgcacaagttactaacaatcctgagaatgatggctgcataaacgcggtactcttagtttag

SEQ ID NO: 182885 - DNA, 783 bp, Artificial Sequence
  derived and/or modified sequence
atgccccagaacgagtacatcgagctgcacagaaagagatacggctacagactggactaccacgagaagaagagaaagaaggagagcagagaggcccacgagagaagcaagaaggccaagaagatgatcggcctgaaggccaagctgtaccacaagcagagacacgccgagaagatccagatgaagaagaccatcaagatgcacgagaagagaaacaccaagcagaagaacgacgagaagaccccccagggcgccgtgcccgcctacctgctggacagagagggccagagcagagccaaggtgctgagcaacatgatcaagcagaagagaaaggagaaggccggcaagtgggaggtgcccctgcccaaggtgagagcccagggcgagaccgaggtgctgaaggtgatcagaaccggcaagagaaagaagaaggcctggaagagaatggtgaccaaggtgtgcttcgtgggcgacggcttcaccagaaagccccccaagtacgagagattcatcagacccatgggcctgagattcaagaaggcccacgtgacccaccccgagctgaaggccaccttctgcctgcccatcctgggcgtgaagaagaaccccagcagccccctgtacaccaccctgggcgtgatcaccaagggcaccgtgatcgaggtgaacgtgagcgagctgggcctggtgacccagggcggcaaggtgatctggggcaagtacgcccaggtgaccaacaaccccgagaacgacggctgcatcaacgccgtgctgctggtgtag

SEQ ID NO: 182886 - protein, 583 aa, Artificial Sequence
  derived and/or modified sequence
MSYGEIEGKFLGPREEVTSEPRCKKLKSTTESYVFHNHSNADFHRIQEKTGNDWVPVTIIDVRGHSYLQENKIKTTDLHRPLHDEMPGNRPDVIESIDSQVLQEARPPLVSADDEIYSTSKAFIGPIYKPPEKKKRNEGRNEAHVLNGINDRGGQKEKQKFNSEKSEIDNELFQFYKEIEELEKEKDGFENSCKESEPSQEQFVPFYEGHNNGLLKPDEEKKDLSNKAMPSHCDYQQNLGNEPDKYPCNGQVIPTFCDTSFTSFRPEWQSVYPFIVPYGPPLPSLNYHLNIQRFSGPPNPPSNIFQAQDDSQIQNGYYVNNCHVNWNCMTFDQNNEYTDCSENRSSVHPSGNGCSMQDRYVSNGFCEVRERCWKDHCMDKHNGTDRFVNQQFQEEKLNKLQKLLILLRGLPGSGKTTLSRILLGQNRDGIVFSTDDYFHHQDGYRYNVNQLGDAHDWNQNRAKQAIDQGRSPVIIDNTNIQAWEMKPYVEVAIGKGYRVEFHEPETWWKFDPEELEKRNKHGVSRKKIAQMLDRYEYQMSISIVMNSVEPSHKSTQRPPPPQGRQRWGGSLGSHNRVCVTNNH

SEQ ID NO: 182887 - DNA, 1752 bp, Artificial Sequence
  derived and/or modified sequence
atgagctacggcgagatcgagggcaagttcctgggccccagagaggaggtgaccagcgagcccagatgcaagaagctgaagagcaccaccgagagctacgtgttccacaaccacagcaacgccgacttccacagaatccaggagaagaccggcaacgactgggtgcccgtgaccatcatcgacgtgagaggccacagctacctgcaggagaacaagatcaagaccaccgacctgcacagacccctgcacgacgagatgcccggcaacagacccgacgtgatcgagagcatcgacagccaggtgctgcaggaggccagaccccccctggtgagcgccgacgacgagatctacagcaccagcaaggccttcatcggccccatctacaagccccccgagaagaagaagagaaacgagggcagaaacgaggcccacgtgctgaacggcatcaacgacagaggcggccagaaggagaagcagaagttcaacagcgagaagagcgagatcgacaacgagctgttccagttctacaaggagatcgaggagctggagaaggagaaggacggcttcgagaacagctgcaaggagagcgagcccagccaggagcagttcgtgcccttctacgagggccacaacaacggcctgctgaagcccgacgaggagaagaaggacctgagcaacaaggccatgcccagccactgcgactaccagcagaacctgggcaacgagcccgacaagtacccctgcaacggccaggtgatccccaccttctgcgacaccagcttcaccagcttcagacccgagtggcagagcgtgtaccccttcatcgtgccctacggcccccccctgcccagcctgaactaccacctgaacatccagagattcagcggcccccccaacccccccagcaacatcttccaggcccaggacgacagccagatccagaacggctactacgtgaacaactgccacgtgaactggaactgcatgaccttcgaccagaacaacgagtacaccgactgcagcgagaacagaagcagcgtgcaccccagcggcaacggctgcagcatgcaggacagatacgtgagcaacggcttctgcgaggtgagagagagatgctggaaggaccactgcatggacaagcacaacggcaccgacagattcgtgaaccagcagttccaggaggagaagctgaacaagctgcagaagctgctgatcctgctgagaggcctgcccggcagcggcaagaccaccctgagcagaatcctgctgggccagaacagagacggcatcgtgttcagcaccgacgactacttccaccaccaggacggctacagatacaacgtgaaccagctgggcgacgcccacgactggaaccagaacagagccaagcaggccatcgaccagggcagaagccccgtgatcatcgacaacaccaacatccaggcctgggagatgaagccctacgtggaggtggccatcggcaagggctacagagtggagttccacgagcccgagacctggtggaagttcgaccccgaggagctggagaagagaaacaagcacggcgtgagcagaaagaagatcgcccagatgctggacagatacgagtaccagatgagcatcagcatcgtgatgaacagcgtggagcccagccacaagagcacccagagacccccccccccccagggcagacagagatggggcggcagcctgggcagccacaacagagtgtgcgtgaccaacaaccactag

SEQ ID NO: 182888 - DNA, 1752 bp, Artificial Sequence
  derived and/or modified sequence
atgtcttatggcgagatcgagggcaagtttctgggcccccgcgaggaagtgacttctgagccacgctgtaaaaaactgaagtctaccactgaaagttacgtgttccacaaccattcgaatgccgactttcaccgtatccaggagaaaacagggaacgactgggtaccggtgactatcatcgatgtgaggggacactcctacctgcaagaaaacaagataaaaacgactgatctccataggcccctccatgatgaaatgcccggcaaccgccctgatgtgattgagagcatcgatagccaggtcctgcaagaggctaggcctcctctggttagcgcagacgacgaaatttatagtacatcgaaagccttcatcggtccaatatataaacctccagaaaaaaagaagaggaacgagggacggaacgaagctcacgtgctgaacggcataaacgatcgtggaggccaaaaggagaagcaaaaattcaattctgaaaagagtgagatcgataacgagctctttcaattttataaggaaattgaggaactggaaaaagagaaagatggcttcgagaattcttgtaaggaaagcgagccgagccaggagcaattcgtacctttctatgagggtcacaacaatggcctgcttaagcccgacgaggagaagaaggacctctccaataaggcgatgccatcccactgtgattaccagcaaaacctcggcaatgagcccgataagtatccttgcaatggacaggtgattcccactttctgcgacaccagtttcaccagcttccgcccagagtggcagtctgtttacccatttattgtgccatacggtccccctttgccgagtctgaactatcatttgaatattcagcggttcagtggccctcctaaccctccaagtaatatcttccaggcccaagacgatagccagatccaaaatggctattacgtcaacaattgtcacgtcaattggaattgcatgacgttcgaccaaaacaacgagtatactgattgtagcgaaaaccggtcgtccgtccacccgagcggcaatggctgctccatgcaggaccgatacgtttccaatgggttctgcgaagtgcgagaaagatgctggaaggatcactgtatggacaagcataatggcactgatcgcttcgtgaaccagcagtttcaagaagagaagttaaacaaactgcaaaagctgttgatcttgctgaggggcctgcctggtagcggcaagacaacactaagccgcatcttgttaggtcagaacagagatggcattgtattctccacagacgattactttcatcatcaggacgggtataggtataacgtaaatcaactcggggatgcccatgactggaaccagaatagggcaaagcaggccattgatcagggccggagccctgtaatcatagacaatacaaatatacaggcctgggaaatgaaaccttacgtggaggtggccataggaaaaggatatcgggtagagttccatgagcctgaaacttggtggaagtttgatcccgaggaactcgaaaagaggaacaaacatggtgtgtcccgaaaaaagatcgcacagatgcttgatcgatacgagtatcagatgtcgataagcatcgtgatgaatagcgttgaaccttcccacaaaagcacccagcggcctccacccccccaaggcagacagaggtggggcggtagcctagggagccacaatagggtctgcgtgactaataaccactag

SEQ ID NO: 182889 - DNA, 1752 bp, Artificial Sequence
  derived and/or modified sequence
atgtcctatggagaaattgagggcaagttcctgggcccccgggaggaggtgaccagcgagccccgctgcaagaagctgaagagcaccacagagagctatgtgttccacaaccacagcaatgctgacttccaccgcatccaggagaagacaggaaatgactgggtgcctgtgaccatcattgatgtgcggggccacagctacctgcaggagaacaagatcaagaccacagacctgcaccggcccctgcatgatgagatgcctggcaacagaccagatgtgattgagagcattgacagccaggtgctgcaggaggcccggccccccctggtgtctgcagatgatgagatctacagcaccagcaaggccttcatcggccccatctacaagcccccagagaagaagaagagaaatgaaggaagaaatgaggcccacgtgctgaatggcatcaatgacagaggaggccagaaggagaagcagaagttcaacagcgagaagtcagaaattgacaatgagctgttccagttctacaaggagattgaggagctggagaaggagaaggatggctttgagaacagctgcaaggagagcgagcccagccaggagcagtttgtgcccttctatgagggccacaacaacggcctgctgaagccagatgaggagaagaaggacctgagcaacaaggccatgcccagccactgtgactaccagcagaacctgggcaatgaaccagacaagtacccctgcaatggccaggtgatccccaccttctgtgacaccagcttcaccagcttccggcctgagtggcagagcgtgtaccccttcatcgtgccctacggcccccccctgcccagcctgaactaccacctgaacatccagcgcttcagcggcccccccaacccccccagcaacatcttccaggcccaggatgacagccagatccagaatggctactacgtgaacaactgccacgtgaactggaactgcatgacctttgaccagaacaatgagtacacagactgcagcgagaacagaagctctgtgcaccccagcggaaatggctgcagcatgcaggaccgctacgtgtccaatggcttctgtgaggtgcgggagcgctgctggaaggaccactgcatggacaagcacaacggcacagacagatttgtgaaccagcagttccaggaggagaagctgaacaagctgcagaagctgctgatcctgctgcggggcctgcccggcagcggcaagaccaccctgagccgcatcctgctgggccagaacagagatggcatcgtgttcagcacagatgactacttccaccaccaggacggctaccgctacaacgtgaaccagctgggagatgcccatgactggaaccagaacagagccaagcaggccatcgaccagggccgcagccctgtgatcatcgacaacaccaacatccaggcctgggagatgaagccctacgtggaggtggccatcggcaagggctacagagtggagttccacgagcctgagacctggtggaagtttgatcctgaggagctggagaagaggaacaagcatggagtgtccaggaagaagatcgcccagatgctggacagatatgagtaccagatgagcatcagcatcgtgatgaacagcgtggagcccagccacaagagcacccagaggcctcctccaccccagggccggcagcgctggggcggcagcctgggcagccacaacagagtgtgtgtgaccaacaaccactag

SEQ ID NO: 182890 - DNA, 1752 bp, Artificial Sequence
  derived and/or modified sequence
atgagctacggcgagatcgagggcaagttcctgggcccccgggaggaagtgacatcagagcctcgctgtaaaaagctgaaaagcactacagagagttacgtgttccacaaccattctaacgccgattttcataggatacaggaaaagactggtaacgattgggtgccagtgaccataatcgacgtacgtgggcatagctatctgcaggagaataagattaagacgacagatctccaccgccccctccacgatgaaatgcctgggaacaggcctgacgtgatagagagcatcgattcccaggtcctgcaggaggcccggcccccgctcgtctcagctgacgacgagatctattccacaagtaaagcctttattggcccaatatacaagccacctgagaagaaaaaacgtaatgaagggcgcaatgaggctcatgtactgaatggcatcaatgatcggggggggcagaaagagaaacaaaagttcaacagcgagaagagcgaaatcgataatgagctgttccaattttataaggaaatcgaagagctggaaaaggagaaggacggctttgagaatagctgtaaagagtcagaaccctctcaggagcagtttgttccattctatgagggtcacaacaatggccttctgaaacccgatgaagagaaaaaagacctatccaacaaagcaatgccatctcattgcgactatcagcaaaatctaggcaatgagccagataaatacccttgtaacggtcaggtcatcccgacattttgcgatacttcatttacctcctttcgacctgaatggcagtccgtgtacccctttatcgtaccatatgggccaccacttccaagtctgaactatcaccttaatatccaacgcttcagtggacctcctaatcctccaagtaatatcttccaggcccaggatgactcacagatccaaaatggctactatgtgaataactgccatgtaaactggaactgcatgaccttcgaccagaataatgagtataccgattgcagcgagaacagatctagcgtacatcctagtggaaacggctgcagcatgcaggatcggtacgtgtcaaacgggttctgcgaagtcagggaacggtgctggaaggaccattgtatggacaagcataatgggactgatcgcttcgttaatcaacagttccaggaggagaagctgaacaaactccagaagcttctgattctattgcgcggcctgccaggatctggcaagactacactgtcaagaatcttattgggacagaatcgggacggcatcgtcttctcaactgacgactacttccatcaccaggacggctacaggtacaatgtgaaccaactcggtgatgcccacgactggaatcagaacagggctaaacaagcaatcgatcaagggaggagccctgtgatcatcgataatacaaatattcaggcttgggagatgaagccgtatgtcgaggttgccatcggaaaggggtatcgtgtggaatttcacgagcccgagacttggtggaagtttgacccagaagagttagagaaacggaataaacatggcgtcagtagaaagaagattgcccagatgctggacagatatgagtatcagatgtctatttcgatcgtgatgaatagtgtggaacccagccacaaaagcactcaaaggcctccccccccccagggacggcagcgttggggagggagtttaggaagtcacaacagagtctgcgttacgaacaaccactag

SEQ ID NO: 182891 - DNA, 2825 bp, Artificial Sequence
  derived and/or modified sequence
cggaggtgaggtttgttaccgcgattctgagaggtgggcttttagtccctccagacctcggctttagtgctgtctccgcttttctttcaccttcacagaggttcgtgtcttcctaaaagaaggttttattgggaggtaaaggtcaatgcgtaggggtagagtaagatgtcttatggtgaaattgaaggtaaattcttgggacctagagaagaagtaacgagtgagccacgctgtaaaaaattgaagtcaaccacagagtcgtatgtttttcacaatcatagtaatgctgattttcacagaatccaagagaaaactggaaatgattgggtccctgtgaccatcattgatgtcagaggacatagttatttgcaggagaacaaaatcaaaactacagatttgcatagacctttgcatgatgagatgcctggtaatagaccagatgttattgaatccattgattcacaggttttacaggaagcacgtcctccattagtatccgcagacgatgagatatatagcacaagtaaagcatttataggacccatttacaaaccccctgagaaaaagaaacgtaatgaagggaggaatgaggcacatgttctaaatggtataaatgacagaggaggacaaaaagagaaacagaaatttaactctgaaaaatcagagattgacaatgaattattccagttttacaaagaaattgaagagcttgaaaaggaaaaagatggttttgagaacagttgtaaagaatctgaaccttctcaggaacaatttgttccattttatgagggtcataataatggtctcttaaaacctgatgaagaaaagaaagatcttagtaataaagctatgccatcacattgtgattatcagcagaacttggggaatgagccagacaaatatccctgtaatggacaagtaatacctacattttgtgacacttcatttacttctttcaggcctgaatggcagtcagtatatccttttatagtgccctatggtccccctcttcccagtttgaactatcatttaaacattcagagattcagtggtccaccaaatccaccatcaaatattttccaagcccaagatgactctcagatacaaaatggatattatgtaaataattgtcatgttaactggaattgcatgacttttgatcagaacaatgaatatactgactgtagtgagaataggagtagtgttcatccctctggaaatggctgcagtatgcaagatcgatatgtgagtaatggtttctgtgaagtcagagaaagatgctggaaagatcattgtatggacaagcataatggaacagacaggtttgtgaaccagcagtttcaagaggaaaagttaaataaattgcagaagttacttattcttttaagaggtctgcctggttctgggaaaacaacattgtctcgaattctgcttggtcagaatcgtgatggcattgtgttcagcactgatgactattttcaccatcaagatgggtacaggtataatgttaatcaacttggtgatgcccatgactggaaccagaacagagcaaaacaagctatcgatcagggaagatctccagttataatagataacactaatatacaagcttgggaaatgaagccatatgtggaagtggccataggaaaaggatacagagtagagtttcatgaacctgaaacttggtggaaatttgatcctgaagaattagaaaagaggaataaacatggtgtgtctcgaaagaagattgctcagatgttggatcgttatgaatatcaaatgtccatttctattgtaatgaattcagtggaaccatcacacaaaagcacacaaagacctcctcctccacaggggagacagaggtggggaggctctcttggctcacataatcgtgtctgtgtcacaaataatcattaaattagctattttcagctaacacatttgttgttgcacttgaaaaagagttagtgagcctgtcttggagtttaagtagtttcaaataaaaaaaggctacagtgcctcacaaaggatgttcccagcaagttgtttaaattcccagcaagttgttaaagtgtaaataaaaatatatgaaattgtattttaaatgtttttatattctcttgttgtaatactcttggctgttatggaagcacctgagtaatagagtggtgggtaggagctaggatgtttttctacaatcgaattttaaactaatttatctattttatagacactattgaacagttttttaatagttcatatctaaatctaacttttcataaaactttacggtttttccttcactaccttaaatatgcaagaaatactgacttggtatagggtaccttagttttctctattcattagacaggtaaaattatatttcagctgattgatctgtgtgacaaaattatttcttagctataatcagcacatcacttagttcaaacaaaattccccagcaaatgttagatagtaggtatatcagtcacctggggagttttcttcataatatgcatattcatcttgtaatgcatacatagttatcatcctccttctcaacccatctccctaaccccacatgcttgccagttcttgaagggataaagtgattctaataatgttttacttctctctgttcaatttaatgtgatataattctagtataaaaatattttggacagttgcttaacatggtcataagaggatttgtactatagaatatcttctagtactaatttttctgtagagcaaattatatttctctcactggatagtttttagatgtgtttcttcatataaaattaaaaactgagatggaattc

SEQ ID NO: 182892 - DNA, 1752 bp, Artificial Sequence
  derived and/or modified sequence
atgtcttatggagaaatcgaaggcaaatttttgggcccaagagaagaggtaacaagcgaacctagatgcaagaagctcaagtccacaacagaaagctacgtcttccacaatcacagcaacgccgatttccaccggatacaggaaaaaaccgggaatgactgggtgcctgtgaccatcattgacgtacggggacacagctacctgcaagagaataagattaaaaccactgatctccatagaccccttcacgacgagatgcctgggaataggccagatgtcatagaatcgattgattcacaggtgcttcaagaagctcggcctcctctggtgtcagccgacgacgagatttacagtacatcaaaagcctttatcggcccaatctacaaaccaccagagaagaaaaagagaaatgaaggcaggaacgaggcccacgttctgaatggtataaacgataggggtggacagaaagaaaagcagaaatttaattctgagaagagcgaaattgataatgaactttttcagttctacaaggaaattgaggaattagaaaaggagaaagatgggtttgagaacagctgcaaggagagcgaacccagccaggaacaattcgttcccttctatgagggtcacaacaacggcctgctgaagcccgatgaggaaaaaaaagatctgagcaacaaggctatgcccagccattgcgactaccagcagaacctggggaatgaaccagacaagtacccctgcaacggccaggtgatcccaacattttgtgatacaagttttacttcatttcgccctgagtggcaatcagtgtacccttttatcgttccttacggaccaccgcttccatccctgaattaccatcttaatattcaaaggttcagcggaccgcctaacccccctagtaatatcttccaggcccaggatgatagtcagatccagaacggctattatgtaaacaactgccacgtaaattggaattgtatgacattcgaccagaacaacgaatacaccgattgctccgagaacagaagctcggtgcacccaagtggcaacgggtgctccatgcaggatcgctacgtgtctaacggcttttgcgaggtgagggagaggtgttggaaggaccactgtatggacaaacataacgggacagatcgattcgtaaaccagcagttccaagaagagaaacttaacaagttgcagaaattactcatcctgttgcggggactccctggctccgggaagaccaccctgagcagaatcctgctgggccagaatagggatggtattgtgttttctacagacgattactttcaccatcaagatggctacagatacaacgtcaatcaattaggggacgcgcatgattggaaccaaaaccgagcaaaacaagctattgatcaggggaggtctcccgtgataatcgacaacaccaacatccaagcttgggaaatgaagccgtacgtggaggtggccattgggaaaggctacagagtagagttccatgagccagagacctggtggaaattcgacccagaagagctggaaaagcgcaataaacatggagtgagtcggaaaaagatcgcacagatgttggatagatacgagtatcaaatgtctattagtatcgtcatgaattctgtggagccctcacacaaatccacacaacggcctcctccgccacaggggaggcagaggtggggaggatctctggggtcccacaatcgcgtttgtgtgactaataaccactag

SEQ ID NO: 182893 - protein, 227 aa, Artificial Sequence
  derived and/or modified sequence
MRVAGAAKLVVAVAVFLLTFYVISQVFEIKMDASLGNLFARSALDTAARSTKPPRYKCGISKACPEKHFAFKMASGAANVVGPKICLEDNVLMSGVKNNVGRGINVALANGKTGEVLDTKYFDMWGGDVAPFIEFLKAIQDGTIVLMGTYDDGATKLNDEARRLIADLGSTSITNLGFRDNWVFCGGKGIKTKSPFEQHIKNNKDTNKYEGWPEVVEMEGCIPQKQD

SEQ ID NO: 182894 - protein, 151 aa, Artificial Sequence
  derived and/or modified sequence
MRVAGAAKLVVAVAVFLLTFYVISQVFEIKMDASLGNLFARSALDTAARSTKPPRYKCGISKACPEKHFAFKMASGAANVVGPKICLEDNVLMSGVKNNVGRGINVALANGKTGEVLDTKYFDMWGGDVAPFIEFLKAIQDGTIVLMGTYD

SEQ ID NO: 182895 - protein, 77 aa, Artificial Sequence
  derived and/or modified sequence
MRVAGAAKLVVAVAVFLLTFYVISQVFEIKMDASLGNLFARSALDTAARSTKPPRYKCGISKACPEKHFAFKMASGA

SEQ ID NO: 182896 - DNA, 684 bp, Artificial Sequence
  derived and/or modified sequence
atgcgtgtagcaggcgctgccaaacttgtggtggctgtggctgttttcctcctcaccttctacgtgatcagccaagtatttgagattaaaatggacgctagtctggggaatttatttgcgcgttccgcattggacactgccgctaggtcaaccaaaccaccgagatacaagtgcggcatctcaaaagcctgtcccgaaaagcacttcgccttcaagatggccagtggagccgcaaatgtggtgggacctaagatttgcttggaggataacgtcctgatgtcaggcgtcaagaacaacgtcggtcggggtattaacgtagccttagcaaacggaaagactggagaggtgctggacactaagtactttgatatgtggggtggcgacgtggcacccttcattgaattcctgaaggccattcaggatggcaccattgtactgatgggaacctacgacgacggcgcaaccaaactcaacgatgaagctagacgtctaatagcagacctgggctctacaagtatcacgaacctcggcttcagggacaactgggtgttctgcggcggaaaaggcattaagaccaagtctcctttcgagcaacacataaagaacaacaaggatactaataagtacgaagggtggcccgaagtggtggagatggaggggtgtattccgcagaagcaggactag

SEQ ID NO: 182897 - DNA, 456 bp, Artificial Sequence
  derived and/or modified sequence
atgagggtggcaggagctgccaagctcgtggttgcagtcgcagtgttcctgctaacattctacgtcatcagccaggtttttgagatcaaaatggatgcctccctcggaaatctttttgccaggtctgctttggatacggcagccagatccaccaagcccccacggtacaagtgcggcatcagcaaagcatgccctgaaaagcatttcgcttttaaaatggcgagcggcgctgcaaacgttgtcgggccaaaaatttgcttggaagataatgtactgatgtccggggtcaaaaacaatgtggggaggggcatcaacgttgcactcgcgaacggaaagaccggagaggtgctcgacaccaagtactttgacatgtggggaggggacgttgccccatttatagagttcctcaaagctattcaggacggcactatcgtcctcatgggtacctacgattag

SEQ ID NO: 182898 - DNA, 561 bp, Artificial Sequence
  derived and/or modified sequence
gtcgcggccgggaagcgtgggaggaggcccagcggcgagctggctttctcctggccacttgccggggagcatattaatgaaaagtgccataaactgaaaaaccaaacatgagggtagcaggtgctgcaaagttggtggtagctgtggcagtgtttttactgacattttatgttatttctcaagtatttgaaataaaaatggatgcaagtttaggaaatctatttgcaagatcagcattggacacagctgcacgttctacaaagcctcccagatataagtgtgggatctcaaaagcttgccctgagaagcattttgcttttaaaatggcaagtggagcagccaacgtggtgggacccaaaatctgcctggaagataatgttttaatgagtggtgttaagaataatgttggaagagggatcaatgttgccttggcaaatggaaaaacaggagaagtattagacactaaatattttgacatgtggggaggagatgtggcaccatttattgagtttctgaaggccatacaagatggaacaatagttttaatgggaacatacgatg

SEQ ID NO: 182899 - DNA, 234 bp, Artificial Sequence
  derived and/or modified sequence
atgagagtagcaggtgcagccaagctggtggtggcagttgccgtattcctcctgacattctatgtgatatctcaggtgtttgagatcaaaatggatgccagtctggggaacctgttcgcccgtagcgcgctggataccgctgctcgttccacaaagcctccacgatacaagtgtggtatcagcaaggcctgtcctgaaaagcactttgcgttcaagatggctagcggtgcttag

SEQ ID NO: 182900 - DNA, 684 bp, Artificial Sequence
  derived and/or modified sequence
atgagagttgccggcgctgctaaactggtggtggctgtcgcggtgtttctccttaccttttatgttattagtcaggtcttcgagattaagatggacgcctcgctcggcaatctgtttgctcgaagcgccctagacacagccgcaagaagtacaaaacccccacgttacaagtgcggaatcagcaaagcatgtccagaaaagcactttgcattcaagatggcgtcaggtgcggccaacgtggtggggcctaaaatctgcttggaggataatgtgttgatgagcggggtcaaaaacaacgtaggcagagggattaatgtggcgctggctaacggcaagactggagaagtgttggacacaaagtacttcgacatgtggggcggggacgttgctccgtttatcgagttcctgaaagcgatccaggacggaacgattgtgctgatgggaacctacgacgacggggccacgaaattgaatgatgaagctaggcgacttatcgcagacctgggcagcactagtattactaacctgggctttagagacaactgggtgttctgcgggggaaaaggaattaagaccaagtcacctttcgaacagcatatcaaaaacaataaggatacaaataaatatgaggggtggccagaagtcgttgaaatggaggggtgtattccgcagaagcaagattag

SEQ ID NO: 182901 - DNA, 456 bp, Artificial Sequence
  derived and/or modified sequence
atgcgcgtagcaggggccgccaaactggtagttgccgtggctgtttttctcctcacattctatgtgatcagccaagtcttcgagatcaaaatggacgcgtcgctgggcaacttgttcgcccgatctgctcttgatacagcggccagaagcacaaaacccccaagatacaagtgcggcatctctaaggcttgcccagagaagcatttcgcgttcaaaatggcttcaggcgctgccaacgtggtcggaccaaaaatttgcctggaagataacgtgctcatgagcggcgtaaagaataatgttgggagaggtataaatgtggccctagctaatggcaaaactggcgaagtgctcgataccaaatatttcgacatgtggggaggggacgttgcaccatttatagaatttctgaaggccatccaagacgggactattgtcttgatgggtacctacgactag

SEQ ID NO: 182902 - DNA, 234 bp, Artificial Sequence
  derived and/or modified sequence
atgcgagtcgccggcgccgctaagctggttgtcgctgtggctgtcttccttctgacattttacgtgatttcacaagtatttgagattaagatggatgctagcttgggaaatttatttgctaggagtgcccttgacactgctgcccgttcaactaagccccctcgttacaagtgcggcatcagtaaagcctgtcccgaaaagcattttgccttcaagatggccagtggggcctag

SEQ ID NO: 182903 - DNA, 684 bp, Artificial Sequence
  derived and/or modified sequence
atgagagtagccggggccgccaaacttgtggtcgcagtggctgtctttctgctcaccttttatgtaatcagccaggttttcgagatcaaaatggacgcctcgcttggaaatttgttcgcccgatcagccctggacaccgccgccagaagcaccaagccccctagatacaagtgtggtattagtaaagcctgtcccgaaaaacacttcgctttcaagatggcatctggcgccgctaacgtggtgggcccgaagatttgtttggaggataatgtgttgatgtcaggtgtgaagaataacgtgggcagaggtatcaatgtagctcttgcaaatggcaaaacaggggaggtattggacaccaagtattttgacatgtggggaggggacgtggcaccctttatcgaatttttaaaagcaatccaggacgggacaatcgtgttgatgggtacttacgacgacggcgccactaaacttaatgacgaggccagacggctaattgccgacctggggagtactagcatcaccaacttgggctttagggataattgggtgttttgcggcggaaaaggtattaagaccaaatcaccgtttgagcagcacattaaaaataataaagatacaaataagtacgagggttggccagaagtggtagaaatggagggctgcattccacagaagcaggattag

SEQ ID NO: 182904 - DNA, 460 bp, Artificial Sequence
  derived and/or modified sequence
ttgccggggtgaggggcagccggaggagtccgagaggaagcggaggcgcgagctggaggcggcggctcccgtcggcctccggcaggactgagcgctgggaggccggaaggcgggcgcgcgcggcggagaggcgggcgggaggccgctcgggaccacggatgatgattagtggccctagatctgaatatgagcatattaatgaaaagtgccataaactgaaaaaccaaacatgagggtagcaggtgctgcaaagttggtggtagctgtggcagtgtttttactgacattttatgttatttctcaagtatttgaaataaaaatggatgcaagtttaggaaatctatttgcaagatcagcattggacacagctgcacgttctacaaagcctcccagatataagtgtgggatctcaaaagcttgccctgagaagcattttgcttttaaaatggcaagtggagca

SEQ ID NO: 182905 - DNA, 456 bp, Artificial Sequence
  derived and/or modified sequence
atgcgcgtcgctggagccgcaaaactggtagtagccgtcgccgttttccttctgactttttatgtgatcagccaagttttcgagattaagatggacgcgagcttaggcaatttgtttgcaaggtcagccctcgatactgcagccagaagtacaaagccgcctcggtacaaatgcggcatttcgaaagcctgtcccgaaaaacatttcgcttttaagatggcttccggagctgcaaatgtggtgggaccaaagatttgcttagaagacaatgtacttatgagcggagtcaagaataacgtcggacggggaatcaacgtcgctttggccaacggcaaaacaggtgaggtgctggataccaaatattttgatatgtggggcggagatgtggctccattcatagaatttctaaaggcaattcaggacgggactattgtactcatgggaacatacgactag

SEQ ID NO: 182906 - DNA, 684 bp, Artificial Sequence
  derived and/or modified sequence
atgagagtggccggcgccgccaagctggtggtggccgtggccgtgttcctgctgaccttctacgtgatcagccaggtgttcgagatcaagatggacgccagcctgggcaacctgttcgccagaagcgccctggacaccgccgccagaagcaccaagccccccagatacaagtgcggcatcagcaaggcctgccccgagaagcacttcgccttcaagatggccagcggcgccgccaacgtggtgggccccaagatctgcctggaggacaacgtgctgatgagcggcgtgaagaacaacgtgggcagaggcatcaacgtggccctggccaacggcaagaccggcgaggtgctggacaccaagtacttcgacatgtggggcggcgacgtggcccccttcatcgagttcctgaaggccatccaggacggcaccatcgtgctgatgggcacctacgacgacggcgccaccaagctgaacgacgaggccagaagactgatcgccgacctgggcagcaccagcatcaccaacctgggcttcagagacaactgggtgttctgcggcggcaagggcatcaagaccaagagccccttcgagcagcacatcaagaacaacaaggacaccaacaagtacgagggctggcccgaggtggtggagatggagggctgcatcccccagaagcaggactag

SEQ ID NO: 182907 - DNA, 456 bp, Artificial Sequence
  derived and/or modified sequence
atgagagtggccggcgccgccaagctggtggtggccgtggccgtgttcctgctgaccttctacgtgatcagccaggtgttcgagatcaagatggacgccagcctgggcaacctgttcgccagaagcgccctggacaccgccgccagaagcaccaagccccccagatacaagtgcggcatcagcaaggcctgccccgagaagcacttcgccttcaagatggccagcggcgccgccaacgtggtgggccccaagatctgcctggaggacaacgtgctgatgagcggcgtgaagaacaacgtgggcagaggcatcaacgtggccctggccaacggcaagaccggcgaggtgctggacaccaagtacttcgacatgtggggcggcgacgtggcccccttcatcgagttcctgaaggccatccaggacggcaccatcgtgctgatgggcacctacgactag

SEQ ID NO: 182908 - DNA, 234 bp, Artificial Sequence
  derived and/or modified sequence
atgagagtggccggcgccgccaagctggtggtggccgtggccgtgttcctgctgaccttctacgtgatcagccaggtgttcgagatcaagatggacgccagcctgggcaacctgttcgccagaagcgccctggacaccgccgccagaagcaccaagccccccagatacaagtgcggcatcagcaaggcctgccccgagaagcacttcgccttcaagatggccagcggcgcctag

SEQ ID NO: 182909 - DNA, 684 bp, Artificial Sequence
  derived and/or modified sequence
atgcgggtggccggcgccgccaaattggtcgtggctgttgccgtgttcttacttacgttttacgttatatcccaagtgttcgaaatcaaaatggacgcctccctgggcaacctcttcgcgcggtccgcgttagacaccgccgccaggtctactaaaccccccaggtacaagtgtggcatcagtaaagcatgccctgaaaagcacttcgcgtttaagatggcttcaggagctgctaacgtggttggccccaagatatgtttagaagataatgtcctgatgagcggcgttaaaaataacgttggtagggggatcaacgttgctctagctaacggcaaaacaggtgaggttctggatacaaagtattttgacatgtgggggggagacgtggcccctttcatcgagttcttgaaggcaattcaggacgggactatcgttcttatgggaacctatgatgatggcgccaccaagcttaatgacgaagctcgtcgactcattgccgacctgggctctacctcgattactaatctgggctttagggacaactgggttttttgcgggggcaaagggattaaaactaaatcacctttcgagcagcacataaagaacaacaaggacaccaacaagtatgaagggtggcccgaggtggtcgagatggagggctgtatcccacagaagcaagactag

SEQ ID NO: 182910 - DNA, 456 bp, Artificial Sequence
  derived and/or modified sequence
atgcgagtagctggagcggcaaagcttgtggtggcagtcgctgtgttcttgcttactttctacgtaatctcccaggtcttcgaaattaagatggacgctagcctgggtaaccttttcgcccggtccgctctagacaccgccgcccgtagtacgaagcctcccagatataaatgcggaatcagcaaagcctgcccagagaaacacttcgcatttaagatggcctctggggccgcaaacgtcgtcggaccaaaaatttgcctggaggataatgttctaatgtcgggagtgaaaaataatgtggggagagggatcaacgtggccctggccaatgggaaaaccggggaagttctggacaccaaatatttcgacatgtggggtggagatgtggccccctttatcgagtttctgaaagcaatacaggacgggaccatcgtgttgatggggacgtacgactag

SEQ ID NO: 182911 - DNA, 234 bp, Artificial Sequence
  derived and/or modified sequence
atgcgcgttgcaggcgccgcaaaactggtagtggctgttgcagtcttcttactgactttctatgttatctcccaggtgttcgaaattaagatggacgccagcctcggcaacctgtttgctcgcagtgcgcttgacaccgctgcacgcagcaccaagcctccgcggtacaaatgcggaataagcaaggcttgccctgagaagcactttgcatttaaaatggcatcaggggcttag

SEQ ID NO: 182912 - DNA, 2508 bp, Artificial Sequence
  derived and/or modified sequence
agcggcgagctggctttctcctggccacttgccggggtgaggggcagccggaggagtccgagaggaagcggaggcgcgagctggaggcggcggctcccgtcggcctccggcaggactgagcgctgggaggccggaaggcgggcgcgcgcggcggagaggcgggcgggaggccggagcatattaatgaaaagtgccataaactgaaaaaccaaacatgagggtagcaggtgctgcaaagttggtggtagctgtggcagtgtttttactgacattttatgttatttctcaagtatttgaaataaaaatggatgcaagtttaggaaatctatttgcaagatcagcattggacacagctgcacgttctacaaagcctcccagatataagtgtgggatctcaaaagcttgccctgagaagcattttgcttttaaaatggcaagtggagcagccaacgtggtgggacccaaaatctgcctggaagataatgttttaatgagtggtgttaagaataatgttggaagagggatcaatgttgccttggcaaatggaaaaacaggagaagtattagacactaaatattttgacatgtggggaggagatgtggcaccatttattgagtttctgaaggccatacaagatggaacaatagttttaatgggaacatacgatgatggagcaaccaaactcaatgatgaggcacggcggctcattgctgatttggggagcacatctattactaatcttggttttagagacaactgggtcttctgtggtgggaagggcattaagacaaaaagcccttttgaacagcacataaagaacaataaggatacaaacaaatatgaaggatggcctgaagttgtagaaatggaaggatgcatcccccagaagcaagactaatggaaatgtggagagaattgaagaaagcgcactttcactcttaatgggagagctataaatggcagagctatgtgtaaatattttaagagcatgcagccatcttggtgtgtgcatgagtattgtctcttttgatatcaggattatttattgctaacgtaaatagatagcattgtaaataatcatcacaatgatcaaatcactgaaccatgtctccgcacatttccctaaaagtacaatgtttagactgctatggtaatacatattttaaattctaaaagcatacacaatgtgtaactgaatggtttgtgaaaaatatattgatatatatactagttgctatgaaaatatcatggaataatagggattttagggtggatactttattttcttttatgtttctatatgttgcgttgtgatgacattatcttttaaattaaaaagagatttggctagttgtgtgtgtaatgttactttacagtccgactctcctgatgtacctcttttcatgatctttttctttccttcccaagaaactgaggaatgtttaatatgaaaacatacatcggatatgtgaaaagcacaacaaaattcttaatgtacacagtaaaaaagtaaatatataaatgtagatggcatttaggaccacagcttgctggatttgtgttagctatgggaataacttgattttgtataagctatttagagtgaggctggaggtggcagcttcacagaactggagaaccaggccaagtcccctccccaacctaattaggtcattcaggacagctaagtcagtatatttagagcaatactagcatacgtttttcttaattgttatcagcattgaccaagtggtttggaaggaggcatgctttaatatcacaataattttgatttgtaaaccaagaaattaatcctgtgtttatctaacttcataatagcaattattgcccgaagctatagtggcatatttacaaaagttcttattactgggcggactgataacatttaaaaaataattgtgtttgaccccaaatgactttatacccaattctacataaaaatatagaagatctatctttttttgttaccttcagatgttcactaaataactcagtttttaagcagaagttttcagggcattaaatatatgttgtgtatgaagtatctcaaactggaacataaatttagtgatcaaactgccattcacagtgtaaggcagcacttaaatttcgaacctaaagtttagatgcattgtataaaaaaacctaaaagcagtatctgttatttagctgtaaaccaagttggaagctattcggataatttcttaaatattgatgaactttggagtactgtttcttccttcaaactgaatgtaattaattcatgaataaatgcaccttatatgtttaaacaatctttgtatacttttgggatttttggtgcttatatgctaaatcacattcagcatgtgtattttgacatttaaaatacttccctcaattctgtaaattaaaagaatagttattttacagttccagggattgtgaaataaatgttgcagttttttaaaataatgaaaataaatactcttggttttgctttgtgaa

SEQ ID NO: 182913 - DNA, 684 bp, Artificial Sequence
  derived and/or modified sequence
atgagggtggccggggccgccaagctggtggtggccgtggccgtgttcctgctgaccttctacgtgatcagccaggtgtttgagatcaagatggatgccagcctgggcaacctgtttgcccggagcgccctggacacagctgcccggagcaccaagcccccacgctacaagtgtggcatcagcaaggcctgcccagagaagcactttgccttcaagatggccagcggggccgccaacgtggtgggccccaagatctgcctggaggacaacgtgctgatgtctggagtgaagaacaacgtgggccggggcatcaacgtggccctggccaacgggaagacaggagaggtgctggacaccaagtactttgacatgtggggcggagatgtggcccccttcatcgagttcctgaaggccatccaggacggcaccatcgtgctgatgggcacctatgatgatggagccaccaagctgaatgatgaggcccggcggctgattgctgacctgggcagcaccagcatcaccaacctgggcttccgggacaactgggtgttctgtggcggcaagggcatcaagaccaagagcccctttgagcagcacatcaagaacaacaaggacaccaacaagtatgagggctggccagaggtggtggagatggagggctgcatcccccagaagcaggactag

SEQ ID NO: 182914 - DNA, 456 bp, Artificial Sequence
  derived and/or modified sequence
atgagggtggccggggccgccaagctggtggtggccgtggccgtgttcctgctgaccttctacgtgatcagccaggtgtttgagatcaagatggatgccagcctgggcaacctgtttgcccggagcgccctggacacagctgcccggagcaccaagcccccacgctacaagtgtggcatcagcaaggcctgcccagagaagcactttgccttcaagatggccagcggggccgccaacgtggtgggccccaagatctgcctggaggacaacgtgctgatgtctggagtgaagaacaacgtgggccggggcatcaacgtggccctggccaacgggaagacaggagaggtgctggacaccaagtactttgacatgtggggcggagatgtggcccccttcatcgagttcctgaaggccatccaggacggcaccatcgtgctgatgggcacctatgactag

SEQ ID NO: 182915 - DNA, 234 bp, Artificial Sequence
  derived and/or modified sequence
atgagggtggccggggccgccaagctggtggtggccgtggccgtgttcctgctgaccttctacgtgatcagccaggtgtttgagatcaagatggatgccagcctgggcaacctgtttgcccggagcgccctggacacagctgcccggagcaccaagcccccacgctacaagtgtggcatcagcaaggcctgcccagagaagcactttgccttcaagatggccagcggggcctag

SEQ ID NO: 182916 - DNA, 684 bp, Artificial Sequence
  derived and/or modified sequence
atgcgggtggccggcgccgccaagctggtggtggccgtggccgtgttcctgctgacattttatgttatcagccaggtgtttgagattaagatggacgcttccctgggaaatctgttcgcaaggagcgccctcgatactgccgcccgctctacaaaacccccccgctacaaatgcggtatttcaaaagcctgccccgagaagcattttgccttcaagatggcatccggggcggcgaacgtcgtgggaccaaagatctgcctcgaagataacgtactaatgagtggagttaagaataatgtggggcgcgggattaacgtggcactggcgaatggaaagacaggggaggttctggacaccaaatactttgacatgtgggggggcgacgtggccccttttattgaattccttaaagccattcaagatgggaccatcgtcctaatggggacctatgacgacggcgccacaaagcttaatgatgaggctaggagactgatcgccgatctcggatctacaagcattacaaatctgggattccgggataattgggtgttctgcggtggcaaaggcatcaagacaaaatctccattcgaacagcatatcaaaaacaataaagatactaataaatatgaagggtggcctgaggtggtcgagatggaaggttgcattccgcagaaacaggattag

SEQ ID NO: 182917 - DNA, 456 bp, Artificial Sequence
  derived and/or modified sequence
atgcgggtggccggcgccgccaagctggtggtggccgtggccgtgttccttttgactttttacgtgatcagccaagtatttgaaatcaaaatggacgcatccctcggtaacctgttcgcccggtcagcccttgatacggcagcaaggtctactaagccccctcgatataagtgcggcatcagcaaagcttgcccagagaaacacttcgccttcaaaatggcctcaggcgccgcaaatgttgtcggccccaagatttgcctcgaggacaatgtgttaatgtctggagtgaaaaataatgtcgggcgcggaattaatgtcgcgctcgccaacgggaaaactggggaggtcctagataccaaatattttgatatgtgggggggggacgtggccccctttatcgaatttctgaaggccatccaggatgggaccatcgttctcatgggtacctacgattag

SEQ ID NO: 182918 - DNA, 234 bp, Artificial Sequence
  derived and/or modified sequence
atgcgggtggccggcgccgccaagctggtggtggccgtggccgtgtttctgcttaccttctatgtgatcagtcaggtgtttgaaatcaaaatggacgcttccctgggaaacctcttcgcaagatcagccctggatacggcagcccgctcaactaaacccccacggtacaagtgcgggatctctaaagcatgtcccgaaaagcactttgcctttaaaatggcctcaggagcatag

SEQ ID NO: 182919 - RNA, 684 nt, Artificial Sequence
  derived and/or modified sequence
augagaguugccggcgcugcuaaacuggugguggcugucgcgguguuucuccuuaccuuuuauguuauuagucaggucuucgagauuaagauggacgccucgcucggcaaucuguuugcucgaagcgcccuagacacagccgcaagaaguacaaaacccccacguuacaagugcggaaucagcaaagcauguccagaaaagcacuuugcauucaagauggcgucaggugcggccaacgugguggggccuaaaaucugcuuggaggauaauguguugaugagcggggucaaaaacaacguaggcagagggauuaauguggcgcuggcuaacggcaagacuggagaaguguuggacacaaaguacuucgacauguggggcggggacguugcuccguuuaucgaguuccugaaagcgauccaggacggaacgauugugcugaugggaaccuacgacgacggggccacgaaauugaaugaugaagcuaggcgacuuaucgcagaccugggcagcacuaguauuacuaaccugggcuuuagagacaacuggguguucugcgggggaaaaggaauuaagaccaagucaccuuucgaacagcauaucaaaaacaauaaggauacaaauaaauaugagggguggccagaagucguugaaauggagggguguauuccgcagaagcaagauuag

SEQ ID NO: 182920 - RNA, 456 nt, Artificial Sequence
  derived and/or modified sequence
augcgcguagcaggggccgccaaacugguaguugccguggcuguuuuucuccucacauucuaugugaucagccaagucuucgagaucaaaauggacgcgucgcugggcaacuuguucgcccgaucugcucuugauacagcggccagaagcacaaaacccccaagauacaagugcggcaucucuaaggcuugcccagagaagcauuucgcguucaaaauggcuucaggcgcugccaacguggucggaccaaaaauuugccuggaagauaacgugcucaugagcggcguaaagaauaauguugggagagguauaaauguggcccuagcuaauggcaaaacuggcgaagugcucgauaccaaauauuucgacauguggggaggggacguugcaccauuuauagaauuucugaaggccauccaagacgggacuauugucuugauggguaccuacgacuag

SEQ ID NO: 182921 - RNA, 234 nt, Artificial Sequence
  derived and/or modified sequence
augcgagucgccggcgccgcuaagcugguugucgcuguggcugucuuccuucugacauuuuacgugauuucacaaguauuugagauuaagauggaugcuagcuugggaaauuuauuugcuaggagugcccuugacacugcugcccguucaacuaagcccccucguuacaagugcggcaucaguaaagccugucccgaaaagcauuuugccuucaagauggccaguggggccuag

SEQ ID NO: 182922 - RNA, 684 nt, Artificial Sequence
  derived and/or modified sequence
augagaguagccggggccgccaaacuuguggucgcaguggcugucuuucugcucaccuuuuauguaaucagccagguuuucgagaucaaaauggacgccucgcuuggaaauuuguucgcccgaucagcccuggacaccgccgccagaagcaccaagcccccuagauacaagugugguauuaguaaagccugucccgaaaaacacuucgcuuucaagauggcaucuggcgccgcuaacguggugggcccgaagauuuguuuggaggauaauguguugaugucaggugugaagaauaacgugggcagagguaucaauguagcucuugcaaauggcaaaacaggggagguauuggacaccaaguauuuugacauguggggaggggacguggcacccuuuaucgaauuuuuaaaagcaauccaggacgggacaaucguguugauggguacuuacgacgacggcgccacuaaacuuaaugacgaggccagacggcuaauugccgaccuggggaguacuagcaucaccaacuugggcuuuagggauaauuggguguuuugcggcggaaaagguauuaagaccaaaucaccguuugagcagcacauuaaaaauaauaaagauacaaauaaguacgaggguuggccagaagugguagaaauggagggcugcauuccacagaagcaggauuag

SEQ ID NO: 182923 - RNA, 456 nt, Artificial Sequence
  derived and/or modified sequence
augcgcgucgcuggagccgcaaaacugguaguagccgucgccguuuuccuucugacuuuuuaugugaucagccaaguuuucgagauuaagauggacgcgagcuuaggcaauuuguuugcaaggucagcccucgauacugcagccagaaguacaaagccgccucgguacaaaugcggcauuucgaaagccugucccgaaaaacauuucgcuuuuaagauggcuuccggagcugcaaauguggugggaccaaagauuugcuuagaagacaauguacuuaugagcggagucaagaauaacgucggacggggaaucaacgucgcuuuggccaacggcaaaacaggugaggugcuggauaccaaauauuuugauauguggggcggagauguggcuccauucauagaauuucuaaaggcaauucaggacgggacuauuguacucaugggaacauacgacuag

SEQ ID NO: 182924 - protein, 1037 aa, Artificial Sequence
  derived and/or modified sequence
MWRCGGRQGLCVLRRLSGGHAHHRAWRWNSNRACERALQYKLGDKIHGFTVNQVTSVPELFLTAVKLTHDDTGARYLHLAREDTNNLFSVQFRTTPMDSTGVPHILEHTVLCGSQKYPCRDPFFKMLNRSLSTFMNAFTASDYTLYPFSTQNPKDFQNLLSVYLDATFFPCLRELDFWQEGWRLEHENPSDPQTPLVFKGVVFNEMKGAFVNNERIFSQHLQNRLLPDHTYSVVSGGDPLCIPELTWEQLKQFHATHYHPSNARFFTYGNFPLEQHLKQIHEEALSKFQKIEPSTVVPAQTPWDKPREFQITCGPDSFATDPSKQTTISVSFLLPDITDTFEAFTLSLLSSLLTSGPNSPFYKALIESGLGTDFSPDVGYNGYTREAYFSVGLQGIAEKDIETVRSLIDRTIDEVVEKGFEDDRIEALLHKIEIQMKHQSTSFGLMLTSYIASCWNHDGDPVELLKLGNQLAKFRQCLQENPKFLQEKVKQYFKNNQHKLTLSMRPDDKYHEKQAQVEATKLKQKVEALSPGDRQQIYEKGLELRSQQSKPQDASCLPALKVSDIEPTIPVTELDVVLTAGDIPVQYCAQPTNGMVYFRAFSSLNTLPEELRPYVPLFCSVLTKLGCGLLDYREQAQQIELKTGGMSASPHVLPDDSHMDTYEQGVLFSSLCLDRNLPDMMQLWSEIFNNPCFEEEEHFKVLVKMTAQELANGIPDSGHLYASIRAGRTLTPAGDLQETFSGMDQVRLMKRIAEMTDIKPILRKLPRIKKHLLNGDNMRCSVNATPQQMPQTEKAVEDFLRSIGRSKKERRPVRPHTVEKPVPSSSGGDAHVPHGSQVIRKLVMEPTFKPWQMKTHFLMPFPVNYVGECIRTVPYTDPDHASLKILARLMTAKFLHTEIREKGGAYGGGAKLSHNGIFTLYSYRDPNTIETLQSFGKAVDWAKSGKFTQQDIDEAKLSVFSTVDAPVAPSDKGMDHFLYGLSDEMKQAHREQLFAVSHDKLLAVSDRYLGTGKSTHGLAILGPENPKIAKDPSWIIQ

SEQ ID NO: 182925 - protein, 1030 aa, Artificial Sequence
  derived and/or modified sequence
MRNVALRRAAGPVCAEAAERRTCTPQSVAMEQYKLGDKIHGFTVNQVTSVPELFLTAVKLTHDDTGARYLHLAREDTNNLFSVQFRTTPMDSTGVPHILEHTVLCGSQKYPCRDPFFKMLNRSLSTFMNAFTASDYTLYPFSTQNPKDFQNLLSVYLDATFFPCLRELDFWQEGWRLEHENPSDPQTPLVFKGVVFNEMKGAFTDNERIFSQHLQNRLLPDHTYSVVSGGDPLCIPELTWEQLKQFHATHYHPSNARFFTYGNFPLEQHLKQIHEEALSKFQKIEPSTVVPAQTPWDKPREFQITCGPDSFATDPSKQTTISVSFLLPDITDTFEAFTLSLLSSLLTSGPNSPFYKALIESGLGTDFSPDVGYNGYTREAYFSVGLQGIAEKDIETVRSLIDRTIDEVVEKGFEDDRIEALLHKIEIQMKHQSTSFGLMLTSYIASCWNHDGDPVELLKLGNQLAKFRQCLQENPKFLQEKVKQYFKNNQHKLTLSMRPDDKYHEKQAQVEATKLKQKVEALSPGDRQQIYEKGLELRSQQSKPQDASCLPALKVSDIEPTIPVTELDVVLTAGDIPVQYCAQPTNGMVYFRAFSSLNTLPEELRPYVPLFCSVLTKLGCGLLDYREQAQQIELKTGGMSASPHVLPDDSHMDTYEQGVLFSSLCLDRNLPDMMQLWSEIFNNPCFEEEEHFKVLVKMTAQELANGIPDSGHLYASIRAGRTLTPAGDLQETFSGMDQVRLMKRIAEMTDIKPILRKLPRIKKHLLNGDNMRCSVNATPQQMPQTEKAVEDFLRSIGRSKKERRPVRPHTVEKPVPSSSGGDAHVPHGSQVIRKLVMEPTFKPWQMKTHFLMPFPVNYVGECIRTVPYTDPDHASLKILARLMTAKFLHTEIREKGGAYGGGAKLSHNGIFTLYSYRDPNTIETLQSFGKAVDWAKSGKFTQQDIDEAKLSVFSTVDAPVAPSDKGMDHFLYGLSDEMKQAHREQLFAVSHDKLLAVSDRYLGTGKSTHGLAILGPENPKIAKDPSWIIQ

SEQ ID NO: 182926 - protein, 595 aa, Artificial Sequence
  derived and/or modified sequence
MWKSSFQYIASCWNHDGDPVELLKLGNQLAKFRQCLQENPKFLQEKVKQYFKNNQHKLTLSMRPDDKYHEKQAQVEATKLKQKVEALSPGDRQQIYEKGLELRSQQSKPQDASCLPALKVSDIEPTIPVTELDVVLTAGDIPVQYCAQPTNGMVYFRAFSSLNTLPEELRPYVPLFCSVLTKLGCGLLDYREQAQQIELKTGGMSASPHVLPDDSHMDTYEQGVLFSSLCLDRNLPDMMQLWSEIFNNPCFEEEEHFKVLVKMTAQELANGIPDSGHLYASIRAGRTLTPAGDLQETFSGMDQVRLMKRIAEMTDIKPILRKLPRIKKHLLNGDNMRCSVNATPQQMPQTEKAVEDFLRSIGRSKKERRPVRPHTVEKPVPSSSGGDAHVPHGSQVIRKLVMEPTFKPWQMKTHFLMPFPVNYVGECIRTVPYTDPDHASLKILARLMTAKFLHTEIREKGGAYGGGAKLSHNGIFTLYSYRDPNTIETLQSFGKAVDWAKSGKFTQQDIDEAKLSVFSTVDAPVAPSDKGMDHFLYGLSDEMKQAHREQLFAVSHDKLLAVSDRYLGTGKSTHGLAILGPENPKIAKDPSWIIQ

SEQ ID NO: 182927 - protein, 259 aa, Artificial Sequence
  derived and/or modified sequence
  misc_feature (1)..(1): Xaa can be any naturally occurring amino acid
XFSSLCLDRNLPDMMQLWSEIFNNPCFEEEEHFKVLVKMTAQELANGIPDSGHLYASIRAGRTLTPAGDLQETFSGMDQVRLMKRIAEMTDIKPILRKLPRIKKHLLNGDNMRCSVNATPQQMPQTEKAVEDFLRSIGRSKKERRPVRPHTVEKPVPSSSGGDAHVPHGSQVIRKLVMEPTFKPWQMKTHFLMPFPVNYVGECIRTVPYTDPDHARKRPVCGSGDLGLISPRASSRSLCLCCRPSHHCLPRLLSEVDVF

SEQ ID NO: 182928 - DNA, 3114 bp, Artificial Sequence
  derived and/or modified sequence
atgtggagatgcggcggcagacagggcctgtgcgtgctgagaagactgagcggcggccacgcccaccacagagcctggagatggaacagcaacagagcctgcgagagagccctgcagtacaagctgggcgacaagatccacggcttcaccgtgaaccaggtgaccagcgtgcccgagctgttcctgaccgccgtgaagctgacccacgacgacaccggcgccagatacctgcacctggccagagaggacaccaacaacctgttcagcgtgcagttcagaaccacccccatggacagcaccggcgtgccccacatcctggagcacaccgtgctgtgcggcagccagaagtacccctgcagagaccccttcttcaagatgctgaacagaagcctgagcaccttcatgaacgccttcaccgccagcgactacaccctgtaccccttcagcacccagaaccccaaggacttccagaacctgctgagcgtgtacctggacgccaccttcttcccctgcctgagagagctggacttctggcaggagggctggagactggagcacgagaaccccagcgacccccagacccccctggtgttcaagggcgtggtgttcaacgagatgaagggcgccttcgtgaacaacgagagaatcttcagccagcacctgcagaacagactgctgcccgaccacacctacagcgtggtgagcggcggcgaccccctgtgcatccccgagctgacctgggagcagctgaagcagttccacgccacccactaccaccccagcaacgccagattcttcacctacggcaacttccccctggagcagcacctgaagcagatccacgaggaggccctgagcaagttccagaagatcgagcccagcaccgtggtgcccgcccagaccccctgggacaagcccagagagttccagatcacctgcggccccgacagcttcgccaccgaccccagcaagcagaccaccatcagcgtgagcttcctgctgcccgacatcaccgacaccttcgaggccttcaccctgagcctgctgagcagcctgctgaccagcggccccaacagccccttctacaaggccctgatcgagagcggcctgggcaccgacttcagccccgacgtgggctacaacggctacaccagagaggcctacttcagcgtgggcctgcagggcatcgccgagaaggacatcgagaccgtgagaagcctgatcgacagaaccatcgacgaggtggtggagaagggcttcgaggacgacagaatcgaggccctgctgcacaagatcgagatccagatgaagcaccagagcaccagcttcggcctgatgctgaccagctacatcgccagctgctggaaccacgacggcgaccccgtggagctgctgaagctgggcaaccagctggccaagttcagacagtgcctgcaggagaaccccaagttcctgcaggagaaggtgaagcagtacttcaagaacaaccagcacaagctgaccctgagcatgagacccgacgacaagtaccacgagaagcaggcccaggtggaggccaccaagctgaagcagaaggtggaggccctgagccccggcgacagacagcagatctacgagaagggcctggagctgagaagccagcagagcaagccccaggacgccagctgcctgcccgccctgaaggtgagcgacatcgagcccaccatccccgtgaccgagctggacgtggtgctgaccgccggcgacatccccgtgcagtactgcgcccagcccaccaacggcatggtgtacttcagagccttcagcagcctgaacaccctgcccgaggagctgagaccctacgtgcccctgttctgcagcgtgctgaccaagctgggctgcggcctgctggactacagagagcaggcccagcagatcgagctgaagaccggcggcatgagcgccagcccccacgtgctgcccgacgacagccacatggacacctacgagcagggcgtgctgttcagcagcctgtgcctggacagaaacctgcccgacatgatgcagctgtggagcgagatcttcaacaacccctgcttcgaggaggaggagcacttcaaggtgctggtgaagatgaccgcccaggagctggccaacggcatccccgacagcggccacctgtacgccagcatcagagccggcagaaccctgacccccgccggcgacctgcaggagaccttcagcggcatggaccaggtgagactgatgaagagaatcgccgagatgaccgacatcaagcccatcctgagaaagctgcccagaatcaagaagcacctgctgaacggcgacaacatgagatgcagcgtgaacgccaccccccagcagatgccccagaccgagaaggccgtggaggacttcctgagaagcatcggcagaagcaagaaggagagaagacccgtgagaccccacaccgtggagaagcccgtgcccagcagcagcggcggcgacgcccacgtgccccacggcagccaggtgatcagaaagctggtgatggagcccaccttcaagccctggcagatgaagacccacttcctgatgcccttccccgtgaactacgtgggcgagtgcatcagaaccgtgccctacaccgaccccgaccacgccagcctgaagatcctggccagactgatgaccgccaagttcctgcacaccgagatcagagagaagggcggcgcctacggcggcggcgccaagctgagccacaacggcatcttcaccctgtacagctacagagaccccaacaccatcgagaccctgcagagcttcggcaaggccgtggactgggccaagagcggcaagttcacccagcaggacatcgacgaggccaagctgagcgtgttcagcaccgtggacgcccccgtggcccccagcgacaagggcatggaccacttcctgtacggcctgagcgacgagatgaagcaggcccacagagagcagctgttcgccgtgagccacgacaagctgctggccgtgagcgacagatacctgggcaccggcaagagcacccacggcctggccatcctgggccccgagaaccccaagatcgccaaggaccccagctggatcatccagtag

SEQ ID NO: 182929 - DNA, 3114 bp, Artificial Sequence
  derived and/or modified sequence
atgtggagatgcggcggacggcagggtctctgtgtgctcaggcgactgtcgggcggacatgctcaccaccgcgcatggagatggaactccaacagggcctgtgaaagggcactgcagtataagctcggcgataaaatacatggatttacggtcaaccaggtcacaagcgttccggagctgttcctcaccgccgtaaaactgacccacgacgacaccggggcaaggtacttgcatttagctagagaagataccaataatctcttttcagtgcagtttaggaccaccccgatggatagcacaggggtcccgcacatactcgaacatactgtcttgtgcgggtctcagaagtatccctgtcgagacccattttttaaaatgcttaatcggagccttagtacatttatgaacgcattcactgcgagcgactacacactctatcccttctcaacccaaaatccaaaggattttcagaatttactcagcgtctaccttgacgccacttttttcccatgcctgagggagctggatttttggcaggaagggtggcgattggaacacgagaatcctagtgatccccaaaccccgttggtattcaagggcgtcgtgtttaatgaaatgaagggcgcttttgtaaacaacgaacgtattttctcgcagcatctgcagaacaggctcttgccagaccacacctactctgtggttagcggcggagacccgctgtgcattcccgaacttacgtgggagcagttgaaacagttccatgctactcactaccacccaagtaacgcgcggtttttcacctatggtaatttccctctcgagcagcacctgaagcagatccatgaggaggcattgagcaaatttcagaaaatcgagccaagcacagtggtgcctgcgcagacaccatgggataagccccgagagttccagatcacctgtggccctgacagtttcgcaacggaccctagcaaacagactaccatctcggtgtcctttttactgccagatataacagacaccttcgaagcttttacgcttagtctgctgtcctcactgttgacatccggcccaaactcccctttctataaagccttgatagagtcaggcctcgggaccgacttttcaccagacgtcggttacaacggctacacacgtgaggcctacttctcagttggccttcaaggcatcgcagaaaaggacatcgagacagtacgctctctaatagatagaacaatcgatgaggtcgtggaaaaaggcttcgaagatgataggattgaggccctcttgcacaaaattgaaattcaaatgaaacaccaaagcacttctttcgggctcatgcttacgtcttacatcgctagttgttggaaccacgacggcgatccggtcgaattgctcaagcttggcaaccagctcgccaagttcaggcaatgcctgcaagagaaccccaagttcctgcaggagaaggttaaacaatactttaagaacaaccagcacaaactgaccttgagcatgagacccgacgataaataccacgagaaacaggcccaggtcgaggcaaccaaactaaaacagaaagtggaggccctctccccaggagatagacaacagatatatgaaaaaggtctggagttgcgatcccaacagagcaaacctcaggatgcgtcatgcctcccggccttgaaggtctccgacattgagccaactatccccgtgacggaactcgacgtggtgcttaccgccggtgatatccctgtgcaatattgtgcccaacctacaaacgggatggtctactttcgggcctttagtagcctcaacacactccccgaagaactgcgaccttatgtgcctctgttctgtagtgtgctcaccaagttgggctgcggcctgttggattaccgggagcaggcacagcagattgagctcaagaccggcggtatgtctgcctctcctcatgtgctgcccgacgactcacacatggacacatacgagcaaggtgtgctattctcatccctttgtctcgaccgtaatcttccggacatgatgcagctgtggtccgaaatctttaataacccatgcttcgaagaagaagagcacttcaaagtcctggtgaaaatgacagcccaggaactggcaaacgggattcccgacagtggacatctctacgccagcattcgagctggacggacgctcacacctgctggagatctacaggagacgtttagcgggatggaccaggtgcgtctgatgaaacggatcgcagagatgacagacatcaaacctattttaagaaagctccctcgcatcaaaaaacatttgctgaacggcgataacatgagatgctcagtgaacgccacgcctcagcagatgccgcagacggagaaagcagtggaagattttcttagatcaataggcaggagtaagaaggagagacgacccgttagaccccacactgtggagaaaccagtaccctcatccagcggcggggacgcgcatgtgccccatggctctcaggtcataaggaagttggtcatggagccgacctttaaaccatggcagatgaaaacgcactttctgatgccttttcccgtgaattatgtgggcgagtgcatccgaacagtcccctatacagacccagaccacgcttctcttaaaatccttgctcggctgatgacagccaagttcctgcacacagagattcgggagaagggtggtgcctatggcggtggcgccaagctgagtcacaatggaatcttcaccctatactcctatcgggacccgaacaccatagagacactgcagtcgtttgggaaagcagttgactgggcgaagtcagggaagttcactcagcaggatatcgacgaagcaaagctcagcgtgttttctaccgtggacgcccccgtggctcctagcgataaggggatggaccattttttgtacggacttagcgatgaaatgaagcaggctcaccgagaacagttattcgcagtcagccacgacaagctgctcgcagtgagtgatagatacctcggaacgggaaaaagcacacatggtctcgctattctaggccctgaaaatccgaaaatcgccaaggacccctcttggatcatacagtag

SEQ ID NO: 182930 - DNA, 3114 bp, Artificial Sequence
  derived and/or modified sequence
atgtggaggtgtggcggccggcagggcctgtgtgtgctgcggcggctgagcggcggccacgcccaccaccgggcctggcgctggaacagcaacagagcctgtgagcgggccctgcagtacaagctgggggacaagatccacggcttcaccgtgaaccaggtgacctctgtgcctgagctgttcctgacagctgtgaagctgacccatgatgacaccggggcccgctacctgcacctggcccgggaggacaccaacaacctcttctctgtgcagttccgcaccacccccatggacagcactggagtgccccacatcctggagcacacagtgctgtgtggcagccagaagtacccctgccgggaccccttcttcaagatgctgaacagaagcctgagcaccttcatgaatgccttcaccgccagtgactacaccctgtaccccttcagcacccagaaccccaaggacttccagaacctgctgtctgtgtacctggatgccaccttcttcccctgcctgcgggagctggacttctggcaggagggctggaggctggagcacgagaaccccagcgacccccagacccccctggtgttcaagggcgtggtgttcaatgagatgaagggggcctttgtgaacaatgaaagaatcttcagccagcacctgcagaaccggctgctgcctgaccacacctacagcgtggtgtctggaggagaccccctgtgcatccctgagctgacctgggagcagctgaagcagttccacgccacccactaccaccccagcaatgcccgcttcttcacctacggcaacttccccctggagcagcacctgaagcagatccacgaggaggccctgagcaagttccagaagattgagcccagcacagtggtgcctgcccagaccccctgggacaagccccgggagttccagatcacctgtggccctgacagctttgccacagaccccagcaagcagaccaccatctctgtgtccttcctgctgcctgacatcacagacacctttgaggccttcaccctgagcctgctgagcagcctgctgaccagcggccccaacagccccttctacaaggccctgattgagagcggcctgggcacagacttctccccagatgtgggctacaacggctacacccgggaggcctacttctctgtgggcctgcagggcattgctgagaaggacattgaaacagtgcgcagcctgattgacaggaccattgatgaggtggtggagaagggctttgaagatgacagaattgaggccctgctgcacaagattgagatccagatgaagcaccagagcaccagctttggcctgatgctgaccagctacatcgccagctgctggaaccatgatggagaccctgtggagctgctgaagctgggcaaccagctggccaagttccggcagtgcctgcaggagaaccccaagttcctgcaggagaaggtgaagcagtacttcaagaacaaccagcacaagctgaccctgtccatgaggccagatgacaagtaccacgagaagcaggcccaggtggaggccaccaagctgaagcagaaggtggaggccctgagccctggggaccggcagcagatctatgagaagggcctggagctgcggagccagcagagcaagccccaggatgccagctgcctgcctgccctgaaggtgtctgacatcgagcccaccatccctgtgacagagctggatgtggtgctgacagctggggacatccctgtgcagtactgtgcccagcccaccaacggcatggtgtacttccgggccttcagcagcctgaacaccctgcctgaggagctgcggccctacgtgcccctcttctgcagcgtgctgaccaagctgggctgcggcctgctggactaccgggagcaggcccagcagatcgagctgaagacaggaggcatgtctgccagcccccacgtgctgcctgatgacagccacatggacacctatgagcagggcgtgctcttcagcagcctgtgcctggacaggaacctgcctgacatgatgcagctgtggagcgagatcttcaacaacccctgctttgaggaggaggagcacttcaaggtgctggtgaagatgacagcccaggagctggccaacggcatcccagattctggccacctgtatgccagcatccgggccggccgcaccctgaccccagctggggacctgcaggagaccttcagcggcatggaccaggtgcggctgatgaagagaattgctgagatgacagacatcaagcccatcctgaggaagctgccccgcatcaagaagcacctgctgaatggagacaacatgcgctgcagcgtgaatgccaccccccagcagatgccccagacagagaaggctgtggaggacttcctgcggagcatcggccgcagcaagaaggagcggcggcctgtgcggccccacacagtggagaagcctgtgcccagcagcagtggaggagatgcccacgtgccccacggcagccaggtgatcaggaagctggtgatggagcccaccttcaagccctggcagatgaagacccacttcctgatgcccttccctgtgaactacgtgggggagtgcatcagaacagtgccctacacagatcctgaccacgccagcctgaagatcctggcccggctgatgacagccaagttcctgcacacagagatccgggagaagggcggggcctacggcggcggggccaagctgagccacaacggcatcttcaccctgtacagctacagagaccccaacaccatcgagaccctgcagagctttgggaaggctgtggactgggccaagagcggcaagttcacccagcaggacattgatgaggccaagctgagcgtcttcagcacagtggatgcccctgtggcccccagcgacaagggcatggaccacttcctgtatggcctgagtgatgagatgaagcaggcccaccgggagcagctgtttgctgtgtcccatgacaagctgctggccgtgtctgaccgctacctgggcaccgggaagagcacccacggcctggccatcctgggccctgagaaccccaagatcgccaaggaccccagctggatcatccagtag

SEQ ID NO: 182931 - DNA, 3114 bp, Artificial Sequence
  derived and/or modified sequence
atgtggcggtgcggcggccggcagggcctgtgcgtgctgcggcggctctctggaggacacgcccaccacagagcctggaggtggaatagcaacagagcatgcgagagggcgctgcaatataaactgggagacaagatccatggatttacggtgaaccaggtcacaagtgttcctgagctgtttttaaccgccgtgaagctcacacacgatgacactggagcccgttatctgcacctggccagggaagacactaataacctgtttagcgtgcaattcaggacgacgccgatggacagcactggagtgcctcacatcctggaacacaccgtactgtgtggatcacaaaagtatccttgccgcgatcctttctttaaaatgttaaatcggagtctcagcactttcatgaacgcatttacagcttcagactacactttgtacccttttagtacacagaatcccaaggactttcagaaccttctttccgtctatctcgatgccaccttcttcccatgtctgagggagctggacttctggcaggaggggtggaggctggagcatgagaatccaagtgacccccagaccccacttgtgttcaaaggagttgtcttcaacgagatgaagggcgcctttgttaataacgagaggatatttagccagcacttacagaacaggttgctgcccgaccacacttattccgtcgtctcaggaggcgatcccctgtgtatacccgagctcacttgggagcagcttaagcagtttcacgctactcactatcaccctagcaacgcccggttcttcacgtacgggaatttccctctggaacagcaccttaaacaaattcacgaggaggccctttctaagttccagaaaattgagccatcaacagtggtacctgctcaaactccctgggataagccacgggagttccagattacatgcggcccagacagtttcgctacagaccccagcaagcagaccaccatttccgtgagcttcctgttgccggatattaccgatactttcgaagccttcaccttgtcattgctcagttcactgcttacttctggacctaacagccctttctacaaggcactgattgaatcaggcttggggaccgatttctctccagatgtcggatataacggctacacacgggaggcctatttcagcgtgggcctgcaagggatcgccgaaaaggacatagaaaccgttcgctcattgattgacagaaccatcgacgaggtggtggaaaagggtttcgaggacgatagaatcgaggccctgttacacaagatagaaatccaaatgaaacaccagagcacctcatttggcctgatgctcactagctacatcgcctcatgctggaatcatgacggagacccagttgagctgctgaagctggggaaccagctagcaaaattccggcagtgcctacaagagaacccaaagttcctgcaggagaaggtgaaacagtattttaaaaataaccagcacaagttgaccttgtccatgcgccctgatgacaaataccacgagaagcaggcacaggtagaagcaacaaaactgaaacaaaaagtggaagccctgtctcctggcgacagacaacaaatttatgaaaaggggcttgaattgcgctcccagcagagcaaaccccaggacgcttcctgtttgcccgctctgaaggtctctgacatcgaaccaacaattcccgtcacagagttggacgttgtactaaccgccggtgacattccagtccagtactgtgcccagccgaccaatggcatggtgtactttcgcgccttttcgagtctcaatactcttcccgaggaactgaggccatatgtgcctctattctgtagtgttcttacaaagttggggtgtggacttctagattaccgagaacaggcccagcagatcgagcttaaaaccggcggcatgtcagcctcaccccacgtactgcctgacgattctcatatggatacatacgagcaaggcgtcctgttttcctcactgtgtctggatagaaacctgcccgacatgatgcagctgtggagtgaaattttcaataatccctgcttcgaggaggaggaacacttcaaggtacttgtcaagatgaccgcccaggaactcgctaatggcattcctgatagtggccacttatacgcttcgattagggccgggagaaccctgacaccagcaggggaccttcaggagaccttttccggcatggaccaagttcgactcatgaaaaggatcgctgagatgaccgacatcaagcctatcctgagaaaactaccccggatcaaaaagcacttgttaaacggcgacaatatgcggtgttccgtaaatgcaacgccacagcaaatgccccagactgagaaagcagtcgaggacttcctacgctcaattgggagatccaagaaggagagaaggcctgtgagaccccatacagttgagaagccagttcccagctcaagtggaggcgatgcacacgtgccccacggatcccaggtcatcagaaagctggtcatggagccaactttcaagccgtggcagatgaagactcattttctcatgcccttcccagttaactacgtgggcgagtgtattcgcactgtgccatatactgatcccgatcacgcatctctgaagattttggcccggcttatgactgccaaatttctccacacggagatccgggagaaaggaggcgcatacggaggcggagccaaactgagtcataacggtatcttcaccttgtattcttaccgagatcctaatactatcgagacactgcagtctttcggaaaagccgtggactgggctaagtctggaaaattcacacagcaggatatagatgaagccaagttaagtgtgttctcaactgtcgatgctcccgtcgccccttccgacaaggggatggaccatttcctttacggattgagtgatgagatgaagcaggcgcatcgcgagcagcttttcgccgtttctcatgataaattgttggctgtgagcgataggtacctcgggacaggaaagagcacccacggtctggccatcttgggccctgaaaaccctaagattgctaaggacccctcctggatcattcagtag

SEQ ID NO: 182932 - DNA, 3114 bp, Artificial Sequence
  derived and/or modified sequence
atgtggcgttgcggaggcaggcagggcctgtgcgtgctaaggcggctgtcgggcggacatgcccatcacagagcttggcgatggaactctaatcgggcttgcgagcgggctctgcaatataagctaggggacaaaatccatggattcaccgtgaaccaggtgacttctgttccagagctgttcctgacagccgtgaaactcacccacgatgacaccggggctaggtaccttcacctggcacgcgaagacacaaacaacctgttctcagtgcaattcaggacgacacccatggacagtacaggggttccgcacattctggagcataccgtgctctgtgggagccaaaaatatccttgtcgggatcccttctttaagatgctgaataggagcctgagtacttttatgaacgccttcactgctagcgattacaccctttaccccttttcgacccagaatccaaaggactttcagaatctcttgtcggtttacttggatgctacattctttccctgcctgagagagttagacttttggcaagaaggctggcgcctggagcacgagaatcccagtgatccccagaccccactggtgtttaagggtgtcgtatttaacgaaatgaagggcgctttcgtcaataatgaacgaattttctctcagcatcttcaaaaccggctcttaccggaccatacctactcagttgtaagcgggggagatcccttatgtatccccgaactgacatgggagcagctgaaacaatttcatgccacgcattaccatccatcaaatgctagattctttacttacgggaactttccactagagcagcacctcaagcagatccacgaagaagccctatccaagttccagaagatcgagcccagtaccgtcgtgcctgcgcagactccgtgggataaaccgcgagagttccagatcacatgcggtcctgactcctttgcgaccgatccttccaagcaaacaaccatctccgtgtcgttcttactgcctgacataacggacacctttgaggcatttactctgagcctcctttcttctctactgacctctggccctaactccccattctacaaagccctgattgagagcggactcggtactgatttttcccccgacgtcggatataacgggtacacacgcgaggcgtatttttccgtggggctgcaaggcatagctgaaaaagacatcgagaccgtgcgaagcctgatcgaccgaacaatagatgaagtggtcgaaaaaggattcgaagacgatcggatcgaggccctacttcacaaaatcgagatccagatgaagcatcagtcaaccagtttcggcttaatgctgacaagctacattgcaagttgttggaatcacgacggcgacccagtagaactgttaaaattaggaaatcagctggctaagttcaggcaatgcctgcaggaaaatcctaaatttctccaggagaaggtcaaacaatattttaagaataatcagcataagctcactttgtccatgcgcccagatgacaaataccacgaaaagcaggctcaggtggaggcgacaaaattgaagcagaaggtggaggccctgagtcccggagacagacagcagatctatgaaaaggggctagagctgaggagccagcagtctaagccacaggacgcgtcatgtcttccagctctaaaggtgtccgatattgaaccaacaatccctgtgactgaattggatgtcgtccttaccgccggagacattcctgttcagtattgcgcccagcccacgaacggtatggtgtattttcgtgccttctcatctctaaatacattgccagaggagctgagaccttacgtccctctcttctgtagtgtgctgactaaactgggttgtggccttctagattaccgcgagcaggcccaacaaattgaacttaagactggcggaatgtctgctagcccccacgtgttgcccgacgactctcatatggatacctacgagcaaggggtgctgttctcttctttgtgcctcgaccgtaatctcccagatatgatgcaattgtggagcgaaatattcaataatccctgctttgaggaggaggaacacttcaaggtgctggtgaaaatgaccgctcaggagttggccaacggcatccccgactctggacacctgtacgctagtatcagggctgggaggacacttactcccgcaggagacctacaagagacattctcaggaatggatcaggtgaggctgatgaagaggatcgcggagatgacagatatcaaacccattttaaggaaattgccacgcataaagaaacatctgctgaatggtgataatatgcggtgtagtgttaatgcaaccccccagcagatgcctcaaacggagaaggctgtggaggacttcctcagatccataggcaggagtaagaaggagaggagaccagttcgaccccacacagtggagaagcccgtgccgtcttcatctgggggagacgcccatgtccctcatggaagtcaggtcatccgaaagcttgtgatggagcccacattcaagccttggcagatgaaaacccacttccttatgccattccctgtcaattacgtcggcgagtgtatccgaacggtcccgtacaccgatcctgatcatgcctctctgaaaattctggctaggctcatgacagctaaattccttcataccgaaatcagagagaagggcggtgcgtacggcggaggcgctaagctgtcacacaacggcatatttacgctctatagttaccgggatcccaatacaattgaaacactgcagagcttcgggaaggccgtggattgggcaaaaagcggcaagttcacccaacaggatatcgacgaagccaaacttagcgtctttagcacggtcgatgcgccagtggccccatccgacaaagggatggatcacttcctgtacggcctaagcgacgagatgaagcaggcacaccgagaacagctgtttgccgtgagccacgacaagcttcttgctgtcagcgatcgctatctgggtaccggaaagagcacccacgggctggccattcttggacctgagaacccaaagatcgcaaaggacccatcttggattattcagtag

SEQ ID NO: 182933 - DNA, 3093 bp, Artificial Sequence
  derived and/or modified sequence
atgagaaacgtggccctgagaagagccgccggccccgtgtgcgccgaggccgccgagagaagaacctgcaccccccagagcgtggccatggagcagtacaagctgggcgacaagatccacggcttcaccgtgaaccaggtgaccagcgtgcccgagctgttcctgaccgccgtgaagctgacccacgacgacaccggcgccagatacctgcacctggccagagaggacaccaacaacctgttcagcgtgcagttcagaaccacccccatggacagcaccggcgtgccccacatcctggagcacaccgtgctgtgcggcagccagaagtacccctgcagagaccccttcttcaagatgctgaacagaagcctgagcaccttcatgaacgccttcaccgccagcgactacaccctgtaccccttcagcacccagaaccccaaggacttccagaacctgctgagcgtgtacctggacgccaccttcttcccctgcctgagagagctggacttctggcaggagggctggagactggagcacgagaaccccagcgacccccagacccccctggtgttcaagggcgtggtgttcaacgagatgaagggcgccttcaccgacaacgagagaatcttcagccagcacctgcagaacagactgctgcccgaccacacctacagcgtggtgagcggcggcgaccccctgtgcatccccgagctgacctgggagcagctgaagcagttccacgccacccactaccaccccagcaacgccagattcttcacctacggcaacttccccctggagcagcacctgaagcagatccacgaggaggccctgagcaagttccagaagatcgagcccagcaccgtggtgcccgcccagaccccctgggacaagcccagagagttccagatcacctgcggccccgacagcttcgccaccgaccccagcaagcagaccaccatcagcgtgagcttcctgctgcccgacatcaccgacaccttcgaggccttcaccctgagcctgctgagcagcctgctgaccagcggccccaacagccccttctacaaggccctgatcgagagcggcctgggcaccgacttcagccccgacgtgggctacaacggctacaccagagaggcctacttcagcgtgggcctgcagggcatcgccgagaaggacatcgagaccgtgagaagcctgatcgacagaaccatcgacgaggtggtggagaagggcttcgaggacgacagaatcgaggccctgctgcacaagatcgagatccagatgaagcaccagagcaccagcttcggcctgatgctgaccagctacatcgccagctgctggaaccacgacggcgaccccgtggagctgctgaagctgggcaaccagctggccaagttcagacagtgcctgcaggagaaccccaagttcctgcaggagaaggtgaagcagtacttcaagaacaaccagcacaagctgaccctgagcatgagacccgacgacaagtaccacgagaagcaggcccaggtggaggccaccaagctgaagcagaaggtggaggccctgagccccggcgacagacagcagatctacgagaagggcctggagctgagaagccagcagagcaagccccaggacgccagctgcctgcccgccctgaaggtgagcgacatcgagcccaccatccccgtgaccgagctggacgtggtgctgaccgccggcgacatccccgtgcagtactgcgcccagcccaccaacggcatggtgtacttcagagccttcagcagcctgaacaccctgcccgaggagctgagaccctacgtgcccctgttctgcagcgtgctgaccaagctgggctgcggcctgctggactacagagagcaggcccagcagatcgagctgaagaccggcggcatgagcgccagcccccacgtgctgcccgacgacagccacatggacacctacgagcagggcgtgctgttcagcagcctgtgcctggacagaaacctgcccgacatgatgcagctgtggagcgagatcttcaacaacccctgcttcgaggaggaggagcacttcaaggtgctggtgaagatgaccgcccaggagctggccaacggcatccccgacagcggccacctgtacgccagcatcagagccggcagaaccctgacccccgccggcgacctgcaggagaccttcagcggcatggaccaggtgagactgatgaagagaatcgccgagatgaccgacatcaagcccatcctgagaaagctgcccagaatcaagaagcacctgctgaacggcgacaacatgagatgcagcgtgaacgccaccccccagcagatgccccagaccgagaaggccgtggaggacttcctgagaagcatcggcagaagcaagaaggagagaagacccgtgagaccccacaccgtggagaagcccgtgcccagcagcagcggcggcgacgcccacgtgccccacggcagccaggtgatcagaaagctggtgatggagcccaccttcaagccctggcagatgaagacccacttcctgatgcccttccccgtgaactacgtgggcgagtgcatcagaaccgtgccctacaccgaccccgaccacgccagcctgaagatcctggccagactgatgaccgccaagttcctgcacaccgagatcagagagaagggcggcgcctacggcggcggcgccaagctgagccacaacggcatcttcaccctgtacagctacagagaccccaacaccatcgagaccctgcagagcttcggcaaggccgtggactgggccaagagcggcaagttcacccagcaggacatcgacgaggccaagctgagcgtgttcagcaccgtggacgcccccgtggcccccagcgacaagggcatggaccacttcctgtacggcctgagcgacgagatgaagcaggcccacagagagcagctgttcgccgtgagccacgacaagctgctggccgtgagcgacagatacctgggcaccggcaagagcacccacggcctggccatcctgggccccgagaaccccaagatcgccaaggaccccagctggatcatccagtag

SEQ ID NO: 182934 - DNA, 1788 bp, Artificial Sequence
  derived and/or modified sequence
atgtggaagagcagcttccagtacatcgccagctgctggaaccacgacggcgaccccgtggagctgctgaagctgggcaaccagctggccaagttcagacagtgcctgcaggagaaccccaagttcctgcaggagaaggtgaagcagtacttcaagaacaaccagcacaagctgaccctgagcatgagacccgacgacaagtaccacgagaagcaggcccaggtggaggccaccaagctgaagcagaaggtggaggccctgagccccggcgacagacagcagatctacgagaagggcctggagctgagaagccagcagagcaagccccaggacgccagctgcctgcccgccctgaaggtgagcgacatcgagcccaccatccccgtgaccgagctggacgtggtgctgaccgccggcgacatccccgtgcagtactgcgcccagcccaccaacggcatggtgtacttcagagccttcagcagcctgaacaccctgcccgaggagctgagaccctacgtgcccctgttctgcagcgtgctgaccaagctgggctgcggcctgctggactacagagagcaggcccagcagatcgagctgaagaccggcggcatgagcgccagcccccacgtgctgcccgacgacagccacatggacacctacgagcagggcgtgctgttcagcagcctgtgcctggacagaaacctgcccgacatgatgcagctgtggagcgagatcttcaacaacccctgcttcgaggaggaggagcacttcaaggtgctggtgaagatgaccgcccaggagctggccaacggcatccccgacagcggccacctgtacgccagcatcagagccggcagaaccctgacccccgccggcgacctgcaggagaccttcagcggcatggaccaggtgagactgatgaagagaatcgccgagatgaccgacatcaagcccatcctgagaaagctgcccagaatcaagaagcacctgctgaacggcgacaacatgagatgcagcgtgaacgccaccccccagcagatgccccagaccgagaaggccgtggaggacttcctgagaagcatcggcagaagcaagaaggagagaagacccgtgagaccccacaccgtggagaagcccgtgcccagcagcagcggcggcgacgcccacgtgccccacggcagccaggtgatcagaaagctggtgatggagcccaccttcaagccctggcagatgaagacccacttcctgatgcccttccccgtgaactacgtgggcgagtgcatcagaaccgtgccctacaccgaccccgaccacgccagcctgaagatcctggccagactgatgaccgccaagttcctgcacaccgagatcagagagaagggcggcgcctacggcggcggcgccaagctgagccacaacggcatcttcaccctgtacagctacagagaccccaacaccatcgagaccctgcagagcttcggcaaggccgtggactgggccaagagcggcaagttcacccagcaggacatcgacgaggccaagctgagcgtgttcagcaccgtggacgcccccgtggcccccagcgacaagggcatggaccacttcctgtacggcctgagcgacgagatgaagcaggcccacagagagcagctgttcgccgtgagccacgacaagctgctggccgtgagcgacagatacctgggcaccggcaagagcacccacggcctggccatcctgggccccgagaaccccaagatcgccaaggaccccagctggatcatccagtag

SEQ ID NO: 182935 - DNA, 780 bp, Artificial Sequence
  derived and/or modified sequence
tgattcagcagcctgtgcctggacagaaacctgcccgacatgatgcagctgtggagcgagatcttcaacaacccctgcttcgaggaggaggagcacttcaaggtgctggtgaagatgaccgcccaggagctggccaacggcatccccgacagcggccacctgtacgccagcatcagagccggcagaaccctgacccccgccggcgacctgcaggagaccttcagcggcatggaccaggtgagactgatgaagagaatcgccgagatgaccgacatcaagcccatcctgagaaagctgcccagaatcaagaagcacctgctgaacggcgacaacatgagatgcagcgtgaacgccaccccccagcagatgccccagaccgagaaggccgtggaggacttcctgagaagcatcggcagaagcaagaaggagagaagacccgtgagaccccacaccgtggagaagcccgtgcccagcagcagcggcggcgacgcccacgtgccccacggcagccaggtgatcagaaagctggtgatggagcccaccttcaagccctggcagatgaagacccacttcctgatgcccttccccgtgaactacgtgggcgagtgcatcagaaccgtgccctacaccgaccccgaccacgccagaaagagacccgtgtgcggcagcggcgacctgggcctgatcagccccagagccagcagcagaagcctgtgcctgtgctgcagacccagccaccactgcctgcccagactgctgagcgaggtggacgtgttctag

SEQ ID NO: 182936 - DNA, 3093 bp, Artificial Sequence
  derived and/or modified sequence
atgagaaacgtcgcgcttagaagggctgcaggaccagtatgtgcagaggcagcggagaggaggacctgtacgccccagtccgtggccatggaacaatacaagctaggagacaagatacacgggtttacggtgaatcaggtcaccagcgttcccgaactgtttctaaccgccgtgaaactcacacatgacgacaccggagctcgctatcttcatctggccagagaagatactaacaatttgttctctgttcaatttcggaccacaccaatggactccactggagtgccccatattctggagcacactgttttatgtggtagccagaaatatccctgccgggatcctttctttaagatgctcaaccgcagcttatctaccttcatgaacgccttcactgcctctgattataccctctatccgttttccacacagaatccaaaggattttcaaaatttgcttagtgtatacctggatgcaactttctttccttgcctgagagaacttgacttttggcaggagggatggagactcgagcatgagaacccctcagatccacagacgccactcgttttcaaaggagttgtgtttaatgagatgaaaggcgcttttaccgataatgagcgcattttcagccagcacctacagaatagattgctgcccgaccatacctattccgtcgtctccggcggcgatcccttatgcatacctgagttaacctgggaacagcttaaacaatttcatgcaacacattatcacccgtccaatgccaggttctttacttacggcaacttccctctggaacagcacctcaagcagatccatgaggaggcactgtctaaattccagaagatcgaaccgtcaaccgtggtgcccgcacagacaccatgggataaaccacgggaattccaaatcacctgcggtcccgactcgttcgctactgacccaagcaagcagactactatatccgtctcttttctgttgccggatattactgacactttcgaggccttcactctatccctcttatcctccctgctgacaagtggaccaaacagtcctttctataaagcgctgattgagtcgggcctcgggacagacttttctccagacgtagggtataatggttatacgcgtgaagcttacttctccgtggggctccagggcattgctgagaaagacatcgagaccgttcggtcgttaatagataggactatcgacgaggtcgtggagaaaggatttgaggatgatcgtattgaggctctcttgcataaaatcgaaatccaaatgaagcaccagtctacctcctttggccttatgctgacgagctacatcgcatcttgctggaatcacgacggagacccagtggaactcctgaagttgggcaaccagctagccaagtttcggcaatgtctccaggaaaaccccaagttcctccaggaaaaggtgaaacagtacttcaagaacaaccagcataaactgactctatccatgaggcctgatgataaataccatgagaagcaggctcaggtagaagctaccaaactcaaacagaaagtggaagcgctgagcccaggcgatagacagcagatatacgaaaaggggttagaactcagaagccagcaaagtaagccccaggacgccagttgtcttcctgcattgaaggtcagcgatatcgagccgacaatcccagtgacggaactggacgtcgtcctgacagccggggatatcccagtccagtattgtgcccagcccactaatggcatggtctattttcgagcattctcatcattgaacaccctccccgaagagctgaggccttacgttcccctgttttgcagcgtcctgacaaaactgggatgtggtctgttggactatagagagcaggcccagcagattgaactcaagacaggcggaatgagtgcttctccccacgtgttgccagacgacagccatatggacacgtacgagcagggcgtgctcttctccagtttatgtctggatcggaatcttcccgacatgatgcagctatggtcggaaatcttcaataatccctgttttgaggaagaggaacacttcaaggtactcgttaaaatgaccgctcaagaactcgccaatggcatacctgacagcggtcacctctacgcctccatccgcgcggggcggacactaactcctgccggcgacctccaggagaccttcagtgggatggatcaggtgcgactgatgaaaaggattgccgagatgactgatatcaaacctattctgagaaagctgcctcgcatcaagaaacatcttctcaatggtgataatatgcgctgcagcgtgaatgccactcctcagcagatgcctcagacagagaaagccgtcgaggattttctacgctctatcggccgttctaaaaaggaaaggaggccagtgcgcccacacacggtggagaaacctgtcccaagttcgtctggcggcgacgcccatgtaccgcacggatcccaggtgattaggaagctcgtgatggagcctaccttcaagccatggcaaatgaaaacccacttcctgatgccatttcctgttaactatgtcggtgagtgcattcgcactgtcccctacactgaccctgatcacgcttctctcaagatcttggcaaggctgatgactgccaagtttctgcacacagagatccgcgagaagggcggcgcttatggcggtggggccaaacttagccacaacggcatattcacgctgtatagctacagggatcctaacaccattgagaccctgcaaagcttcggcaaagccgtggactgggccaaatcagggaagttcacccagcaagatattgacgaggctaagcttagtgtattctccaccgtagatgcacctgtagcccccagcgacaagggaatggatcacttcctttacggattgtcagatgaaatgaagcaagcacatagggaacagttgttcgccgtgagtcatgacaaattgctggccgtgtccgacaggtacctgggtaccggaaaatcaacgcacgggctggccatcctgggtccagaaaacccaaagatagccaaggatccaagctggataatccagtag

SEQ ID NO: 182937 - DNA, 1788 bp, Artificial Sequence
  derived and/or modified sequence
atgtggaaatctagtttccagtatattgccagctgctggaatcatgacggagatcccgtagaactcttgaaacttgggaatcaattggccaagttcagacaatgtctccaggagaaccccaagttcttacaagaaaaggtgaagcagtatttcaagaacaatcagcataagctgactctcagcatgaggcccgatgataagtaccacgaaaaacaggctcaggtggaagctacgaagctgaaacagaaagtagaggccctctcacccggtgaccggcagcaaatctatgaaaagggtctagaactcaggtcacaacagtccaagccccaagacgcgagctgtcttcccgccctgaaggtgtccgacatcgagccaaccatcccagtgaccgagcttgacgtcgtactaaccgccggggacatccctgtgcaatactgtgcacagcccaccaatggcatggtgtactttcgggccttctcctctctcaatactctgcctgaagagctgaggccttacgtccctctgttttgttcagtcctcactaagttgggatgtggactgctggattatcgagagcaggctcagcagattgagctcaagaccggcggcatgagcgccagtccccacgtacttcctgatgattcccatatggatacctatgagcaaggcgtgctgttttcaagcctgtgcctcgataggaatctgcctgatatgatgcagctctggtccgaaatattcaacaacccctgttttgaagaagaggagcactttaaagtcttagtcaagatgactgcccaagagttagctaacgggattccagattccgggcacctatatgcttctatacgggccggtagaaccttaacacccgcgggcgacctccaagaaactttctctggcatggaccaggtgaggctcatgaagagaatcgctgagatgacagatattaagcccatactgcgtaagttgccaagaatcaagaagcatctcctgaacggagacaatatgcgttgttcggttaatgcaacaccacagcagatgccgcaaacagaaaaggccgtagaggacttcttgcggagtatcggccgttccaaaaaagaacgtagacctgtcaggccccacaccgtggaaaagccagtgccttcctcctcaggaggcgacgcgcacgtgccacacggctcccaggtgatccgaaagctcgtgatggagccaacatttaaaccctggcagatgaagacccacttcctcatgccattcccagtcaattacgttggtgaatgtattcgcacagtgccctatacggaccctgaccacgccagtttgaaaattctggcccgactgatgacggctaagttcttgcatactgagattcgagagaagggtggagcttacggcggcggcgcaaaactgtcccacaacggtattttcacactgtactcgtatcgggatcctaataccatcgaaacactgcagtcctttgggaaggcagtggactgggcaaagtcagggaaatttacacagcaggacatcgatgaagccaagttgtccgtttttagtaccgtcgacgccccagtggctcctagcgacaaggggatggaccattttctgtacggactgagcgacgagatgaaacaggcccacagggaacagctcttcgccgtgtcccatgacaagctgctagcggtctctgatcgttacctcggcaccggcaagagcacacacgggcttgccatcctgggcccagaaaatcccaagatcgccaaagacccatcctggatcatccagtag

SEQ ID NO: 182938 - DNA, 780 bp, Artificial Sequence
  derived and/or modified sequence
tgattttcatccctctgcttggacagaaatcttcccgacatgatgcaactctggtccgagatcttcaataacccttgttttgaagaggaggaacacttcaaggtgctggtgaagatgactgcccaagaactggcaaatgggataccagactccggacacctgtatgcctctatcagagcaggtagaacactgactcctgccggagacctgcaggagaccttttcgggtatggatcaggtccgcctgatgaaacgaatcgccgagatgacggatattaagccgatccttcgcaagcttccgcggatcaagaagcatctgttaaacggagacaatatgagatgttccgtaaatgccacaccgcagcagatgccccaaaccgagaaggctgttgaggattttctgcggtcaattggccgctccaaaaaagagcgtcggcctgttcgccctcacactgttgaaaaaccagtgccttcgtcttcaggaggcgacgcacatgttccccacggctcacaggtgattagaaagctagttatggaacccaccttcaaaccgtggcagatgaagacacattttcttatgccctttcccgtaaactacgtgggtgaatgtatcaggaccgtgccatacaccgatcccgaccacgctcggaagagacccgtgtgcggttctggcgatctcggtctcataagccccagggcttcgagtagaagcctctgcttgtgctgccgacctagtcatcactgcctccctcggctactctccgaggttgatgtcttttag

SEQ ID NO: 182939 - DNA, 3093 bp, Artificial Sequence
  derived and/or modified sequence
atgagaaatgtggccctgcggcgggccgccggccctgtgtgtgccgaggccgctgagaggaggacctgcaccccccagagcgtggccatggagcagtacaagctgggggacaagatccacggcttcaccgtgaaccaggtgacctctgtgcctgagctgttcctgacagctgtgaagctgacccatgatgacacaggagcccgctacctgcacctggcccgggaggacaccaacaacctcttctctgtgcagttccgcaccacccccatggacagcactggagtgccccacatcctggagcacacagtgctgtgtggcagccagaagtacccctgccgggaccccttcttcaagatgctgaacagaagcctgagcaccttcatgaatgccttcaccgccagtgactacaccctgtaccccttcagcacccagaaccccaaggacttccagaacctgctgtctgtgtacctggatgccaccttcttcccctgcctgcgggagctggacttctggcaggagggctggaggctggagcacgagaaccccagcgacccccagacccccctggtgttcaagggcgtggtgttcaatgagatgaagggggccttcacagacaatgaaagaatcttcagccagcacctgcagaaccggctgctgcctgaccacacctacagcgtggtgtctggaggagaccccctgtgcatccctgagctgacctgggagcagctgaagcagttccacgccacccactaccaccccagcaatgcccgcttcttcacctacggcaacttccccctggagcagcacctgaagcagatccacgaggaggccctgagcaagttccagaagattgagcccagcacagtggtgcctgcccagaccccctgggacaagccccgggagttccagatcacctgtggccctgacagctttgccacagaccccagcaagcagaccaccatctctgtgtccttcctgctgcctgacatcacagacacctttgaggccttcaccctgagcctgctgagcagcctgctgaccagcggccccaacagccccttctacaaggccctgattgaaagtggcctgggcacagacttctccccagatgtgggctacaacggctacacccgggaggcctacttctctgtgggcctgcagggcattgctgagaaggacatcgagaccgtgcgcagcctgattgacaggaccattgatgaggtggtggagaagggctttgaagatgaccgcatcgaggccctgctgcacaagattgagatccagatgaagcaccagagcaccagctttggcctgatgctgaccagctacatcgccagctgctggaaccatgatggagaccctgtggagctgctgaagctgggcaaccagctggccaagttccggcagtgcctgcaggagaaccccaagttcctgcaggagaaggtgaagcagtacttcaagaacaaccagcacaagctgaccctgtccatgaggccagatgacaagtaccacgagaagcaggcccaggtggaggccaccaagctgaagcagaaggtggaggccctgagccctggggaccggcagcagatctatgagaagggcctggagctgcggagccagcagagcaagccccaggatgccagctgcctgcctgccctgaaggtgtctgacatcgagcccaccatccctgtgacagagctggatgtggtgctgacagctggggacatccctgtgcagtactgtgcccagcccaccaacggcatggtgtacttccgggccttcagcagcctgaacaccctgcctgaggagctgcggccctacgtgcccctcttctgcagcgtgctgaccaagctgggctgcggcctgctggactaccgggagcaggcccagcagatcgagctgaagacaggaggcatgtctgccagcccccacgtgctgcctgatgacagccacatggacacctatgagcagggcgtgctcttcagcagcctgtgcctggacaggaacctgcctgacatgatgcagctgtggagcgagatcttcaacaacccctgctttgaggaggaggagcacttcaaggtgctggtgaagatgacagcccaggagctggccaacggcatcccagacagcggccacctgtatgccagcatccgggccggccgcaccctgaccccagctggggacctgcaggagaccttcagcggcatggaccaggtgcggctgatgaagagaattgctgagatgacagacatcaagcccatcctgaggaagctgccccgcatcaagaagcacctgctgaatggagacaacatgcgctgcagcgtgaatgccaccccccagcagatgccccagacagagaaggctgtggaggacttcctgcggagcatcggccgcagcaagaaggagaggaggcctgtgcggccccacacagtggagaagcctgtgcccagcagcagtggaggagatgcccacgtgccccacggcagccaggtgatcaggaagctggtgatggagcccaccttcaagccctggcagatgaagacccacttcctgatgcccttccctgtgaactacgtgggggagtgcatcagaacagtgccctacacagatcctgaccacgccagcctgaagatcctggcccggctgatgacagccaagttcctgcacacagagatccgggagaagggcggggcctatggaggaggagccaagctgagccacaacggcatcttcaccctgtacagctacagagaccccaacaccatcgagaccctgcagagctttgggaaggctgtggactgggccaagagcggcaagttcacccagcaggacattgatgaggccaagctgtctgtgttcagcacagtggatgcccctgtggcccccagcgacaagggcatggaccacttcctgtatggcctgagtgatgagatgaagcaggcccaccgggagcagctgtttgctgtgtcccatgacaagctgctggccgtgtctgaccgctacctgggcaccgggaagagcacccacggcctggccatcctgggccctgagaaccccaagatcgccaaggaccccagctggatcatccagtag

SEQ ID NO: 182940 - DNA, 1788 bp, Artificial Sequence
  derived and/or modified sequence
atgtggaagagcagcttccagtacatcgccagctgctggaaccatgatggagaccctgtggagctgctgaagctgggcaaccagctggccaagttccggcagtgcctgcaggagaaccccaagttcctgcaggagaaggtgaagcagtacttcaagaacaaccagcacaagctgaccctgtccatgaggccagatgacaagtaccacgagaagcaggcccaggtggaggccaccaagctgaagcagaaggtggaggccctgagccctggggaccggcagcagatctatgagaagggcctggagctgcggagccagcagagcaagccccaggatgccagctgcctgcctgccctgaaggtgtctgacatcgagcccaccatccctgtgacagagctggatgtggtgctgacagctggggacatccctgtgcagtactgtgcccagcccaccaacggcatggtgtacttccgggccttcagcagcctgaacaccctgcctgaggagctgcggccctacgtgcccctcttctgcagcgtgctgaccaagctgggctgcggcctgctggactaccgggagcaggcccagcagatcgagctgaagacaggaggcatgtctgccagcccccacgtgctgcctgatgacagccacatggacacctatgagcagggcgtgctcttcagcagcctgtgcctggacaggaacctgcctgacatgatgcagctgtggagcgagatcttcaacaacccctgctttgaggaggaggagcacttcaaggtgctggtgaagatgacagcccaggagctggccaacggcatcccagattctggccacctgtatgccagcatccgggccggccgcaccctgaccccagctggggacctgcaggagaccttcagcggcatggaccaggtgcggctgatgaagagaattgctgagatgacagacatcaagcccatcctgaggaagctgccccgcatcaagaagcacctgctgaatggagacaacatgcgctgcagcgtgaatgccaccccccagcagatgccccagacagagaaggctgtggaggacttcctgcggagcatcggccgcagcaagaaggagcggcggcctgtgcggccccacacagtggagaagcctgtgcccagcagcagtggaggagatgcccacgtgccccacggcagccaggtgatcaggaagctggtgatggagcccaccttcaagccctggcagatgaagacccacttcctgatgcccttccctgtgaactacgtgggggagtgcatcagaacagtgccctacacagatcctgaccacgccagcctgaagatcctggcccggctgatgacagccaagttcctgcacacagagatccgggagaagggcggggcctacggcggcggggccaagctgagccacaacggcatcttcaccctgtacagctacagagaccccaacaccatcgagaccctgcagagctttgggaaggctgtggactgggccaagagcggcaagttcacccagcaggacattgatgaggccaagctgagcgtcttcagcacagtggatgcccctgtggcccccagcgacaagggcatggaccacttcctgtatggcctgagtgatgagatgaagcaggcccaccgggagcagctgtttgctgtgtcccatgacaagctgctggccgtgtctgaccgctacctgggcaccgggaagagcacccacggcctggccatcctgggccctgagaaccccaagatcgccaaggaccccagctggatcatccagtag

SEQ ID NO: 182941 - DNA, 780 bp, Artificial Sequence
  derived and/or modified sequence
tgattcagcagcctgtgcctggacaggaacctgcctgacatgatgcagctgtggagcgagatcttcaacaacccctgctttgaggaggaggagcacttcaaggtgctggtgaagatgacagcccaggagctggccaacggcatcccagattctggccacctgtatgccagcatccgggccggccgcaccctgaccccagctggggacctgcaggagaccttcagcggcatggaccaggtgcggctgatgaagagaattgctgagatgacagacatcaagcccatcctgaggaagctgccccgcatcaagaagcacctgctgaatggagacaacatgcgctgcagcgtgaatgccaccccccagcagatgccccagacagagaaggctgtggaggacttcctgcggagcatcggccgcagcaagaaggagcggcggcctgtgcggccccacacagtggagaagcctgtgcccagcagcagtggaggagatgcccacgtgccccacggcagccaggtgatcaggaagctggtgatggagcccaccttcaagccctggcagatgaagacccacttcctgatgcccttccctgtgaactacgtgggggagtgcatcagaacagtgccctacacagatcctgaccacgccaggaagaggcctgtgtgtggcagcggggacctgggcctcatcagcccccgggccagcagccgcagcctgtgcctgtgctgccggcccagccaccactgcctgccccggctgctgtctgaggtggatgtgttctag

SEQ ID NO: 182942 - DNA, 3093 bp, Artificial Sequence
  derived and/or modified sequence
atgcggaacgtggccctgcggcgggccgccggccccgtgtgcgccgaggccgcagagcggcggacctgtacaccacaatccgttgctatggaacaatacaagctgggcgacaaaattcacggctttacagtgaatcaggtgacttccgtgccagaactcttcctgacagcagtaaaacttacgcacgatgacacaggtgccagatatcttcacctggcaagggaagacaccaacaacctgttcagtgtgcagttcaggactaccccaatggattccacaggagtaccacacatcctggagcacaccgtattgtgcggcagccaaaaatacccatgccgcgacccctttttcaagatgctgaaccgtagcctgagcactttcatgaacgcctttacagcctctgactataccctttacccattttctacccagaatccaaaagattttcagaacctgctcagcgtgtacctggacgcaactttctttccatgtctgcgtgaactggatttttggcaggagggttggagactggaacacgagaatcccagtgacccccaaacccctttggtgttcaagggagtggtattcaacgaaatgaagggagccttcacggacaacgagaggattttctctcagcatcttcagaataggctgctacctgaccacacttacagtgtagtgtccggaggggatcccttgtgtataccagagctcacatgggaacaactgaaacagttccatgccacacactatcatccatccaatgcgcgattcttcacctacggcaattttccgttggagcagcacctaaagcagattcacgaagaggcattgtctaagtttcagaaaattgagccatccacagtggtcccagctcagacaccctgggataagccgcgggaatttcagatcacttgcggaccggactccttcgctaccgacccaagtaaacagacgacaatttcagtgtctttcctattgccggatatcactgataccttcgaggccttcaccctgtcgttactgtcaagtcttctgacctccgggcccaacagtcctttctacaaggctctgattgaatccgggctcggaaccgacttcagtcccgatgtgggatataacgggtacaccagagaagcgtatttttctgtaggtctacaagggatcgctgagaaagacatcgagacagtgcgcagcttgatcgatcgcaccattgacgaagtcgtcgaaaaaggcttcgaagacgatcgaattgaggcacttcttcacaaaattgagattcagatgaagcaccagtcaacctccttcggtctcatgctgacctcctacatagcatcctgctggaatcacgatggcgacccagtggagctcctgaagctgggaaaccagctcgccaagtttcgccaatgtctccaggagaatcctaaatttttgcaagagaaggttaaacaatacttcaaaaacaatcagcacaagctgaccctaagtatgagacccgacgacaagtaccatgagaaacaggctcaagtggaggctacaaaactgaaacagaaggtggaagcgctatcccccggtgaccggcagcagatatacgagaaaggattggagctgcgctcccagcagagtaaaccgcaggatgcatcctgtctgcccgcgctgaaggtatcggacattgaaccaaccatcccagtcacagagctggatgtggtgctcaccgctggcgatatccccgtgcagtactgtgcgcagcctactaatggcatggtttatttccgtgccttttcaagcctcaataccctgcctgaggagctgaggccttacgttccactcttttgcagcgtcctcaccaagcttggctgcggccttctggactatcgcgaacaagcacaacagatcgaactgaagactggggggatgtctgccagtcctcacgtcctgccagacgactcccacatggacacgtacgaacagggcgtgctgtttagctccctttgtctggacagaaacctgcccgatatgatgcagctatggtcggaaatcttcaataatccgtgctttgaggaggaggagcattttaaagtgttggtgaaaatgacagcccaggaactagccaatgggatccccgactcagggcatctttacgccagcatccgcgccggcaggactctgactcccgccggcgacctgcaggagaccttctccggcatggaccaagtgcgactgatgaagcgcatcgccgagatgactgatataaagcctatcctgcgcaagctgcctagaattaagaagcacctgctgaacggcgataacatgcgctgcagtgtcaatgctaccccccaacagatgcctcagaccgaaaaagccgtggaggactttttaagaagtatcgggcgatcaaaaaaggaacgcagaccggtgaggcctcacaccgtcgaaaaacctgtaccaagtagttctggcggagatgcccacgttccacacgggtcgcaggtgatccgcaaactggtcatggaaccaacattcaagccatggcagatgaagacccacttcttgatgccattccctgtcaactacgtcggagagtgcatccggacagtgccctacactgatcctgatcacgcttcccttaaaatcctcgcaaggctcatgaccgcaaagtttctgcacaccgaaataagagagaagggaggcgcttatgggggtggggcgaaactttcccataacggaatttttacgctttacagctaccgggatccaaacacaatcgaaaccttacagtcatttggtaaagcagtagactgggcaaagtcaggaaagttcactcaacaggatatcgacgaggccaaattaagtgtattctcaacagtggatgcccctgtggctcccagtgataagggtatggaccatttcctttatggactgtccgatgagatgaagcaggctcatcgggagcaacttttcgcggtgtcacacgataagctgttggctgtgtccgacagatacctggggacagggaagagtacccatggcctggcaatactggggccagagaaccctaagatcgccaaagacccctcttggatcatccagtag

SEQ ID NO: 182943 - DNA, 1788 bp, Artificial Sequence
  derived and/or modified sequence
atgtggaagagcagcttccagtacatcgccagctgctggaaccacgacggcgaccccgtggaacttctgaagttgggcaatcagctggccaagtttagacagtgtctccaggagaacccaaagttcctgcaagagaaagtgaaacaatactttaagaataatcagcataaacttacactgtctatgagaccagatgataagtaccatgagaagcaggcacaggtagaggctacaaaacttaagcagaaggttgaggccctctcccctggagatagacagcagatctacgagaaaggcctggaattgaggagccagcagagtaagccccaggacgcctcttgcctgcccgctctgaaagtaagtgacatcgagccaacaatacctgtaaccgaactggatgtggttctgacagcaggcgatattcctgtgcagtattgtgctcagccaacgaacgggatggtctattttcgtgccttttcaagtctgaatactctgccagaggagttacggccgtacgtacccctgttctgctccgtcttaactaagctgggctgcggcctgttggactatcgcgaacaggctcaacagatcgagctgaagaccgggggaatgtctgcctctcctcatgtcctgccggatgactctcacatggatacctatgagcaaggagttctcttctcttccctgtgtttagacagaaacctgcccgacatgatgcagctctggagcgagatttttaataatccttgcttcgaggaagaggagcactttaaggttttggttaagatgaccgctcaggaactcgccaatggaatccccgatagcgggcatctgtatgcgagtatcagagccggcaggacgctaacacccgcaggcgatcttcaagaaacattttccggaatggatcaggtgcgccttatgaagaggatcgctgagatgactgacatcaagcccattcttagaaagctgcctcgcattaaaaagcacctactaaacggagataacatgcgttgttccgttaatgcaacacctcaacaaatgccccaaaccgagaaagcagtagaggatttcttgcgctctatcggacgcagtaaaaaagagcggcgtcctgttcgaccacacacagtagagaagcccgtcccaagctcctcaggaggcgatgctcatgtaccccacgggtctcaggtcatacgaaaactagtgatggagcctactttcaagccctggcagatgaagacacatttcctaatgcctttcccagtaaactacgtaggagagtgtatccgcactgtaccatatacagaccctgaccatgccagcctcaagattctcgcccgacttatgaccgcgaagttcctgcataccgagattcgagaaaagggtggcgcctatggaggaggtgctaagctttctcacaacgggatatttacactatattcctatcgagatcctaatacgattgaaaccctgcagtctttcgggaaggcggttgactgggctaaaagtgggaagttcacccagcaagatattgacgaagcaaaactcagtgttttttccaccgttgacgccccagttgccccatcagacaaaggcatggaccatttcctttacggactgtcagatgaaatgaaacaggcacacagggagcagctctttgctgtgtcccatgacaagctgctggctgtttccgatcgctacctggggaccgggaagagcactcacgggcttgccattctgggccccgaaaatccaaaaattgctaaggatccaagctggatcatacagtag

SEQ ID NO: 182944 - DNA, 780 bp, Artificial Sequence
  derived and/or modified sequence
tgattcagcagcctgtgcctggaccggaacctgcccgacatgatgcagctttggagtgaaatcttcaacaacccctgctttgaagaggaagagcactttaaagtgttggtgaagatgacagcccaagaactggcaaacggcatccccgactctggccatctctacgccagtattagagctgggcgaacacttaccccagctggggacttgcaggaaactttttccggtatggaccaggtgaggttgatgaagaggattgctgaaatgactgatatcaaaccaatcttgaggaaactcccgcggatcaagaagcacttgcttaatggtgataatatgaggtgcagcgttaatgccacgccccagcagatgccacaaactgagaaagccgttgaggattttttgagatccatcgggcgctctaaaaaagagaggcggccagtccggccacacaccgttgaaaaacccgttcccagcagttccggcggcgacgcccatgtcccccatgggtcccaggtcattaggaagttggtgatggaacctacattcaaaccatggcaaatgaagactcactttttaatgccgttcccagtcaattacgttggagaatgtatccggaccgtgccatacacagatccggatcacgctcgcaaacgcccggtctgcgggtcaggtgacttgggattgatctctccacgtgcttcttctcgttctctctgtctttgttgccgtccgagccatcattgtcttccacgcctcctgtcagaggttgatgtattctag

SEQ ID NO: 182945 - DNA, 3450 bp, Artificial Sequence
  derived and/or modified sequence
ggggttcctcgccagccaggtgctcgtcatgcgcaatgtggcgctgcggcgggcggcagggcctgtgtgtgctgaggcggctgagcggcggacatgcacaccacagagcgtggcgatggaacagtaaccgggcttgtgagagggctctgcagtataaactaggagacaagatccatggattcaccgtaaaccaggtgacatctgttcccgagctgttcctgactgcagtgaagctcacccatgatgacacaggagccaggtatttacacctggccagagaagacacgaataatctgttcagcgtgcagttccgtactactcccatggacagtactggtgttcctcacattcttgagcataccgtcctttgtgggtctcagaaatatccgtgcagagaccctttcttcaaaatgttgaaccggtccctctccacgttcatgaacgccttcacagctagtgattatactctgtatccattttccacacaaaatcccaaggactttcagaatctcctctcggtgtatttggatgccacctttttcccatgtttacgcgagctggatttctggcaggaaggatggcggctggaacatgagaatccgagcgacccccagacgcccttggtctttaaaggagtcgtctttaatgagatgaagggagcgtttgtaaacaatgagaggatattctcccagcaccttcagaacagacttcttcctgaccacacgtactcagtggtctccgggggtgacccactgtgcatcccggagcttacatgggagcagcttaagcagtttcatgccactcactatcacccaagcaatgctaggttcttcacgtacggtaattttccattagaacagcatctgaaacaaattcacgaggaagcactgagcaaattccagaaaattgaaccaagcaccgtggtgccagctcagacaccctgggacaagcctagggaattccagataacatgtggcccggattcatttgctacagatccctctaaacaaacaaccatcagcgttagcttcctcttaccggacatcaccgacacatttgaagccttcacattaagtcttctgtcttcactcttgacttctgggcccaattctcccttttacaaagccttgattgaatctggccttggcacagacttttctcctgatgttggatataatggctacacgagggaggcctactttagtgtcggcctccaagggattgcggagaaagacattgagaccgtcagaagcctcatagacagaacgattgatgaagtagttgagaaaggatttgaagatgatcgaattgaggctttacttcataaaattgaaatacagatgaaacatcagtctaccagctttgggctgatgctgacatcatacatagcttcttgctggaaccatgatggggaccctgtggagctcttgaagttgggaaatcagttagctaaattcagacagtgcctgcaggaaaatccaaaatttttgcaagaaaaagtaaaacagtattttaagaataaccagcataagctgactttatcgatgaggccagatgacaagtatcacgagaagcaggcacaggtggaagccacgaagctcaagcagaaggtcgaggctctgtcccccggagacaggcagcagatctacgagaaaggtctagaattacggagtcaacaaagcaaacctcaagatgcctcttgtctgccagcgttgaaagtttccgatattgaacccaccatacctgtcacagagttggacgtggtcctgacagctggagatatccctgttcagtactgcgcccagcccaccaatggcatggtgtatttccgggccttctccagcctgaacacactccccgaggagctgaggccctatgtgcccctcttctgcagcgtcctcaccaagctgggctgcggccttcttgactaccgggagcaggctcagcagatagaattgaagaccggagggatgagtgcttctccccacgtgctccccgacgactcacacatggacacctacgagcagggtgtgcttttctcctctctctgcctggatcgaaacctgccagacatgatgcagctatggagtgaaatatttaacaacccgtgctttgaagaagaggagcacttcaaggtgctggtgaagatgaccgcccaggagctcgccaatggaattcctgactctgggcacctgtacgcatccatcagggcaggccggaccctcacgcccgcaggggacctgcaggagaccttcagcgggatggatcaggtgcggctgatgaagaggattgcagaaatgacagatatcaaacccatcctgaggaagctcccgcgtatcaagaaacacttgttaaatggtgataatatgaggtgttcagtgaatgcgactcctcagcagatgcctcagacagaaaaagcggtcgaagacttccttagaagcatcggtcggagtaaaaaggaacggaggcctgtgcgcccacacacggtcgagaaacctgtgcccagcagctctggtggagatgcccacgttccccatggctcccaggtcattaggaagctggtcatggaacccaccttcaagccctggcagatgaagactcacttcctgatgcccttcccggtgaattacgtgggtgaatgcatccgaactgtcccctacacggacccagatcatgccagtcttaaaatccttgcacgtttgatgactgccaaattcttgcatacagaaattcgagaaaaaggcggtgcttatggtggaggcgcaaaactcagccacaatgggattttcaccctttactcttacagggacccaaatacaatagagacgctccagtcttttgggaaggctgtcgactgggctaagtctggaaaattcacacagcaagacatcgacgaagccaaactttctgtcttctcaaccgtagatgctcctgtcgctccttcagacaaaggaatggaccacttcttgtacggcctctcggatgagatgaagcaggcccacagagagcagctctttgctgtcagccacgacaagctcctggccgtgagcgatagatacctcggcactgggaagagcacacacggcctggccatcctcggacccgagaacccgaaaattgccaaggacccatcctggatcatccaatgagcagccgtggcgctcgactgcacaggagcccgagacaatacacctccgagctgaatatgaaaagtcagaaatgctactgctttttccaagaatattatgtcattgagtgtcgccaaagcccttgactggcgagtcaaaaactcagatctatcttaagagtgaccaggaagaggttcattgaaataatcatgcatgaagcgccaaagatgcaccatgtagaattttcactttgtactggcaggctcgttttacctcattctagaatatttaagaatctaaaaataaagggcaactctgactt

SEQ ID NO: 182946 - DNA, 3426 bp, Artificial Sequence
  derived and/or modified sequence
agagggggttcctcgccagccaggtgctcgtcatgcgcaatgtggcgctgcggcgggcggcagggcctgtgtgtgctgaggcggctgagcggcggacatgcacaccacagagcgtggcgatggaacagtataaactaggagacaagatccatggattcaccgtaaaccaggtgacatctgttcccgagctgttcctgactgcagtgaagctcacccatgatgacacaggagccaggtatttacacctggccagagaagacacgaataatctgttcagcgtgcagttccgtactactcccatggacagtactggtgttcctcacattcttgagcataccgtcctttgtgggtctcagaaatatccgtgcagagaccctttcttcaaaatgttgaaccggtccctctccacgttcatgaacgccttcacagctagtgattatactctgtatccattttccacacaaaatcccaaggactttcagaatctcctctcggtgtatttggatgccacctttttcccatgtttacgcgagctggatttctggcaggaaggatggcggctggaacatgagaatccgagcgacccccagacgcccttggtctttaaaggagtcgtctttaatgagatgaagggagcgtttacagacaatgagaggatattctcccagcaccttcagaacagacttcttcctgaccacacgtactcagtggtctccgggggtgacccactgtgcatcccggagcttacatgggagcagcttaagcagtttcatgccactcactatcacccaagcaatgctaggttcttcacgtacggtaattttccattagaacagcatctgaaacaaattcacgaggaagcactgagcaaattccagaaaattgaaccaagcaccgtggtgccagctcagacaccctgggacaagcctagggaattccagataacatgtggcccggattcatttgctacagatccctctaaacaaacaaccatcagcgttagcttcctcttaccggacatcaccgacacatttgaagccttcacattaagtcttctgtcttcactcttgacttctgggcccaattctcccttttacaaagccttgattgaatctggccttggcacagacttttctcctgatgttggatataatggctacacgagggaggcctactttagtgtcggcctccaagggattgcggagaaagacattgagaccgtcagaagcctcatagacagaacgattgatgaagtagttgagaaaggatttgaagatgatcgaattgaggctttacttcataaaattgaaatacagatgaaacatcagtctaccagctttgggctgatgctgacatcatacatagcttcttgctggaaccatgatggggaccctgtggagctcttgaagttgggaaatcagttagctaaattcagacagtgcctgcaggaaaatccaaaatttttgcaagaaaaagtaaaacagtattttaagaataaccagcataagctgactttatcgatgaggccagatgacaagtatcacgagaagcaggcacaggtggaagccacgaagctcaagcagaaggtcgaggctctgtcccccggagacaggcagcagatctacgagaaaggtctagaattacggagtcaacaaagcaaacctcaagatgcctcttgtctgccagcgttgaaagtttccgatattgaacccaccatacctgtcacagagttggacgtggtcctgacagctggagatatccctgttcagtactgcgcccagcccaccaatggcatggtgtatttccgggccttctccagcctgaacacactccccgaggagctgaggccctatgtgcccctcttctgcagcgtcctcaccaagctgggctgcggccttcttgactaccgggagcaggctcagcagatagaattgaagaccggagggatgagtgcttctccccacgtgctccccgacgactcacacatggacacctacgagcagggtgtgcttttctcctctctctgcctggatcgaaacctgccagacatgatgcagctatggagtgaaatatttaacaacccgtgctttgaagaagaggagcacttcaaggtgctggtgaagatgaccgcccaggagctcgccaatggaattcctgactctgggcacctgtacgcatccatcagggcaggccggaccctcacgcccgcaggggacctgcaggagaccttcagcgggatggatcaggtgcggctgatgaagaggattgcagaaatgacagatatcaaacccatcctgaggaagctcccgcgtatcaagaaacacttgttaaatggtgataatatgaggtgttcagtgaatgcgactcctcagcagatgcctcagacagaaaaagcggtcgaagacttccttagaagcatcggtcggagtaaaaaggaacggaggcctgtgcgcccacacacggtcgagaaacctgtgcccagcagctctggtggagatgcccacgttccccatggctcccaggtcattaggaagctggtcatggaacccaccttcaagccctggcagatgaagactcacttcctgatgcccttcccggtgaattacgtgggtgaatgcatccgaactgtcccctacacggacccagatcatgccagtcttaaaatccttgcacgtttgatgactgccaaattcttgcatacagaaattcgagaaaaaggcggtgcttatggtggaggcgcaaaactcagccacaatgggattttcaccctttactcttacagggacccaaatacaatagagacgctccagtcttttgggaaggctgtcgactgggctaagtctggaaaattcacacagcaagacatcgacgaagccaaactttctgtcttctcaaccgtagatgctcctgtcgctccttcagacaaaggaatggaccacttcttgtacggcctctcggatgagatgaagcaggcccacagagagcagctctttgctgtcagccacgacaagctcctggccgtgagcgatagatacctcggcactgggaagagcacacacggcctggccatcctcggacccgagaacccgaaaattgccaaggacccatcctggatcatccaatgagcagccgtggcgctcgactgcacaggagcccgagacaatacacctccgagctgaatatgaaaagtcagaaatgctactgctttttccaagaatattatgtcattgagtgtcgccaaagcccttgactggcgagtcaaaaactcagatctatcttaagagtgaccaggaagaggttcattgaaataatcatgcatgaagcgccaaagatgcaccatgtagaattttcactttgtactggcaggctcgttttacctcattctagaatatttaagaatctaaaaataaagggcaactctgactt

SEQ ID NO: 182947 - DNA, 2579 bp, Artificial Sequence
  derived and/or modified sequence
tgagaccgtcagaagcctcatagacagaacgattgatgaagtagttgagaaaggatttgaagatgatcgaattgaggctttacttcataaaattgaaatacagatgaaacatcagtctaccagctttgggctgatgctgacatcagtaagtgatctctcaacaattttgtttttgttttataatagacattttgtcttgttactagcttaactggctttttgatatttttatgtgaaatagattactttaaatgggtaagggtttataactagtaatctgttggttatttcctaaacattatttcagcctgtgctttttattttattggaacaaaacagggctaaagtaagtttttttgtttctccatccaaagaattacatgacttttgttataaacaatcatctgtggtatatttaaatacagaaactaggattttagtatcaagtctgggctgttggtggaggttgtactgtggtaccagctgcattgtggatgtggaaatcttccttccagtacatagcttcttgctggaaccatgatggggaccctgtggagctcttgaagttgggaaatcagttagctaaattcagacagtgcctgcaggaaaatccaaaatttttgcaagaaaaagtaaaacagtattttaagaataaccagcataagctgactttatcgatgaggccagatgacaagtatcacgagaagcaggcacaggtggaagccacgaagctcaagcagaaggtcgaggctctgtcccccggagacaggcagcagatctacgagaaaggtctagaattacggagtcaacaaagcaaacctcaagatgcctcttgtctgccagcgttgaaagtttccgatattgaacccaccatacctgtcacagagttggacgtggtcctgacagctggagatatccctgttcagtactgcgcccagcccaccaatggcatggtgtatttccgggccttctccagcctgaacacactccccgaggagctgaggccctatgtgcccctcttctgcagcgtcctcaccaagctgggctgcggccttcttgactaccgggagcaggctcagcagatagaattgaagaccggagggatgagtgcttctccccacgtgctccccgacgactcacacatggacacctacgagcagggtgtgcttttctcctctctctgcctggatcgaaacctgccagacatgatgcagctatggagtgaaatatttaacaacccgtgctttgaagaagaggagcacttcaaggtgctggtgaagatgaccgcccaggagctcgccaatggaattcctgactctgggcacctgtacgcatccatcagggcaggccggaccctcacgcccgcaggggacctgcaggagaccttcagcgggatggatcaggtgcggctgatgaagaggattgcagaaatgacagatatcaaacccatcctgaggaagctcccgcgtatcaagaaacacttgttaaatggtgataatatgaggtgttcagtgaatgcgactcctcagcagatgcctcagacagaaaaagcggtcgaagacttccttagaagcatcggtcggagtaaaaaggaacggaggcctgtgcgcccacacacggtcgagaaacctgtgcccagcagctctggtggagatgcccacgttccccatggctcccaggtcattaggaagctggtcatggaacccaccttcaagccctggcagatgaagactcacttcctgatgcccttcccggtgaattacgtgggtgaatgcatccgaactgtcccctacacggacccagatcatgccagtcttaaaatccttgcacgtttgatgactgccaaattcttgcatacagaaattcgagaaaaaggcggtgcttatggtggaggcgcaaaactcagccacaatgggattttcaccctttactcttacagggacccaaatacaatagagacgctccagtcttttgggaaggctgtcgactgggctaagtctggaaaattcacacagcaagacatcgacgaagccaaactttctgtcttctcaaccgtagatgctcctgtcgctccttcagacaaaggaatggaccacttcttgtacggcctctcggatgagatgaagcaggcccacagagagcagctctttgctgtcagccacgacaagctcctggccgtgagcgatagatacctcggcactgggaagagcacacacggcctggccatcctcggacccgagaacccgaaaattgccaaggacccatcctggatcatccaatgagcagccgtggcgctcgactgcacaggagcccgagacaatacacctccgagctgaatatgaaaagtcagaaatgctactgctttttccaagaatattatgtcattgagtgtcgccaaagcccttgactggcgagtcaaaaactcagatctatcttaagagtgaccaggaagaggttcattgaaataatcatgcatgaagcgccaaagatgcaccatgtagaattttcactttgtactggcaggctcgttttacctcattctagaatatttaagaatctaaaaataaagggcaactctg

SEQ ID NO: 182948 - DNA, 875 bp, Artificial Sequence
  derived and/or modified sequence
tttctcctctctctgcctggatcgaaacctgccagacatgatgcagctatggagtgaaatatttaacaacccgtgctttgaagaagaggagcacttcaaggtgctggtgaagatgaccgcccaggagctcgccaatggaattcctgactctgggcacctgtacgcatccatcagggcaggccggaccctcacgcccgcaggggacctgcaggagaccttcagcgggatggatcaggtgcggctgatgaagaggattgcagaaatgacagatatcaaacccatcctgaggaagctcccgcgtatcaagaaacacttgttaaatggtgataatatgaggtgttcagtgaatgcgactcctcagcagatgcctcagacagaaaaagcggtcgaagacttccttagaagcatcggtcggagtaaaaaggaacggaggcctgtgcgcccacacacggtcgagaaacctgtgcccagcagctctggtggagatgcccacgttccccatggctcccaggtcattaggaagctggtcatggaacccaccttcaagccctggcagatgaagactcacttcctgatgcccttcccggtgaattacgtgggtgaatgcatccgaactgtcccctacacggacccagatcatgccaggaaaaggcctgtctgtggaagcggcgacctggggctgatctcaccacgggcgtcttcaaggagcctgtgtctgtgctgcagaccctcccatcattgtctgccccgccttctgtcggaggtggatgtgttctagaatcagcttgaatgtgatgttaccgttcacagtggaaggcagaggaaattggccctgttcctagaaatgtgctttatcagagagtgtgtgttttctt

SEQ ID NO: 182949 - DNA, 3093 bp, Artificial Sequence
  derived and/or modified sequence
atgaggaatgtggcccttcgcagggccgctggcccagtgtgtgctgaggccgcagagaggcgaacatgtacaccacagtcagtcgctatggaacagtataaactgggagataaaatccacgggtttacagtgaatcaggtcacaagtgtacctgaactgttcctgacagcagttaaacttactcatgacgacactggagccagatatctgcatctggcaagagaagatactaacaacctcttcagcgtgcagttcaggaccacaccaatggattcaacgggcgtcccacatatattggaacataccgttctgtgcggaagccagaagtacccctgtcgcgacccattctttaaaatgcttaataggagcctgtcaactttcatgaatgcattcacagcttcagattatacgctgtacccattttcaacacaaaaccccaaggattttcagaacctgctgtccgtgtatctcgacgcaactttcttcccatgccttcgggaactggatttctggcaggagggatggcgactcgagcacgaaaatcccagtgacccccagaccccactcgtctttaagggcgtggtgttcaatgagatgaaaggcgcatttaccgacaacgaaaggatcttttctcaacatttacaaaaccggctcctccccgatcacacatatagtgttgtaagtggcggagatcccctgtgtattcctgagctcacctgggagcagctgaaacagttccatgccacacactatcacccatccaatgcaagattttttacctatgggaactttcctcttgagcagcacctgaagcagattcacgaggaagcactcagcaaattccagaagattgagccttcaacagtggtgccagcccagaccccctgggataagcctagggaattccaaatcacctgtggcccagacagcttcgcaaccgatcccagtaagcaaacaaccatctcggtgtcctttctcttaccagacatcactgataccttcgaagcctttacactttccctgctttctagcttgctcacgagtggaccaaattcacctttctacaaggctcttatcgaatccggcctgggaaccgatttcagccctgacgtgggatacaacggctacaccagagaggcctattttagcgtagggctgcagggaatcgcagagaaggatatagaaacagtacgtagcttgattgaccgtaccattgacgaggtagtcgaaaaaggatttgaggacgatcgaatagaagctctgctgcacaaaattgaaatacagatgaagcatcagagcacctcttttggtctgatgttgactagctacattgctagttgctggaaccatgacggtgatcctgtggaattacttaagctggggaatcagctcgccaagtttaggcaatgcctccaagaaaaccccaaatttttgcaggagaaggtgaaacagtattttaaaaataaccagcacaaactgacactgtccatgcggcctgacgacaaataccatgaaaagcaggcccaggtagaggcaacaaaactgaaacagaaagtggaggcactgtcccccggagaccgccagcagatttacgagaagggtcttgaactgaggagccagcaatctaagccacaggatgcaagttgtttaccggcattgaaggtgagcgacatagagcctacaattcctgtgaccgagttggatgttgtccttaccgcgggtgacattcccgtgcaatattgtgctcagccaaccaacgggatggtttactttagggccttcagcagtttaaacaccctccccgaggaactgaggccctacgtgcctctcttttgctcagtcctgacaaagttagggtgtggactattagattaccgcgagcaggcacagcagatcgagttgaagactggaggaatgagtgctagtccccacgttctgcctgacgattcccacatggatacctacgagcagggcgtgctcttttcgagcctgtgtctggatcgcaacctgcccgatatgatgcagctttggtctgagatcttcaataatccctgctttgaagaagaagagcatttcaaggtgttggttaagatgactgcacaagagctggcaaatggcatcccagactcgggacatctatatgcatccatccgcgcagggagaacgctgaccccggcaggggacctgcaagaaacctttagcggcatggaccaggtccgccttatgaagaggattgccgaaatgaccgatattaagcccatcttgcggaaactcccgcgaatcaaaaagcatctattgaatggtgacaatatgaggtgctctgtgaatgctactccgcaacagatgccgcaaaccgagaaagcagtcgaagattttctgcgaagcatcggacggtccaaaaaagagcgcagacctgtcaggccccataccgtggaaaaacctgttccatctagcagcggtggggatgctcacgttcctcacggcagtcaggtgatacggaagctggtcatggaaccaacctttaagccatggcagatgaaaacccacttcctcatgccattccccgtcaactatgtgggagagtgtattagaacggtgccttacaccgatcctgaccatgcgtcactgaaaatactcgctcggcttatgacggccaagtttctccacaccgagatcagagagaaggggggtgcatacggaggcggtgcaaaactgtcccacaatggaatttttaccctgtattcctatagggatcccaacaccatagaaacactgcaatccttcgggaaggcagttgattgggccaagtctggcaagttcacccagcaggacatcgacgaggcaaaactgagcgttttctcgacagttgacgcaccagtggctccttcagataagggcatggaccatttcctgtacggcttgagtgatgagatgaagcaggctcaccgggaacagttgttcgcagttagccacgataaactcctggccgtatctgaccgctatctcggaaccggaaagagcacgcatggactggctatcctgggccctgagaatcccaaaatcgctaaggatccttcatggataattcagtag

SEQ ID NO: 182950 - DNA, 1788 bp, Artificial Sequence
  derived and/or modified sequence
atgtggaagtcctcctttcagtatatagcctcttgctggaaccacgatggcgaccccgtcgagctgctcaagttaggcaatcagctggctaaattcagacagtgtctgcaggagaatccgaagttcttgcaagaaaaggtgaaacaatacttcaaaaacaaccagcataagctcaccctgtccatgcgacccgacgataagtaccatgagaaacaggcacaagtggaggctacaaaattgaagcagaaggtcgaagccctctctccaggtgaccggcaacagatatacgagaaaggcctagagctaaggagccaacagtccaagcctcaggatgcatcctgcctccccgctttgaaggtatccgacatcgagccgaccattcccgtgaccgaactggatgttgtgctgacggccggtgacatacccgtgcagtattgtgcccagcctaccaacgggatggtttatttcagggccttcagctccctgaacaccttgcccgaagagctgagaccctacgtgcccctcttttgttcggtcttgacaaaactcggttgtggtctgttggattacagggaacaagcccagcagatagagcttaagacaggaggaatgtcggcttctccacacgtgctgccggatgactctcatatggacacttacgaacagggagttctcttctcctcactgtgtctggacaggaatcttcccgatatgatgcagctttggagtgagatattcaacaacccatgctttgaggaggaggagcattttaaggtactagtgaaaatgaccgcgcaagagctcgccaacggaattccagattctgggcacctatacgcctccatccgcgctgggagaactttaacacctgccggagatctgcaggaaactttttctggaatggatcaggtgaggctgatgaagcgaatagccgagatgactgacataaagcctatcttgcgcaagctcccaagaatcaagaaacatctcctgaacggggataacatgagatgttctgtgaacgccacaccccagcagatgcctcaaacagaaaaagcagttgaggacttcttacgatccattggcaggtccaaaaaagagcgaaggccagtgaggcctcacaccgttgaaaaacccgtaccatccagctccggtggtgacgctcacgtgccccatggcagccaggtgattcggaagctggtgatggagcccaccttcaaaccgtggcagatgaagacacacttcctgatgcccttccccgtaaactatgtaggcgagtgcattcgaactgtgccatacacggatcccgatcacgcttccctcaagattttagcacggctcatgacagctaaatttctgcataccgagatccgcgaaaaaggcggagcttacgggggaggggcaaagctgtctcacaacggcatcttcacactgtactcctatagagacccaaacacgattgaaacattacagtcatttggaaaggccgtggattgggctaagtcaggaaaattcacccaacaggatatagatgaagccaagctgtcagtgttcagtacagtggacgctcctgtcgcgcctagcgataagggaatggatcactttctttacggactgtcagatgagatgaagcaagcgcatagagagcagctgtttgctgtatctcacgacaagttgcttgctgtgagcgaccggtatctgggcactggcaaatctactcatggattggctatcttgggccctgagaaccccaaaattgccaaagatccatcatggattatacagtag

SEQ ID NO: 182951 - DNA, 780 bp, Artificial Sequence
  derived and/or modified sequence
tgattcagttcactgtgtctggatcgcaacctgcctgacatgatgcagctctggagcgagatcttcaacaatccatgctttgaagaagaagaacactttaaagtccttgttaagatgaccgctcaggagctggccaacggcattccagactcaggccacctctacgcctccattcgcgctgggagaaccctgactccagctggagacctccaggagacattttccggtatggaccaggtccgattaatgaagcgcatcgccgaaatgactgacataaagccaatacttagaaagctgccaaggataaagaagcatttgctgaatggggataacatgaggtgttctgtcaatgcgaccccacaacagatgccccaaaccgagaaggccgtcgaggatttcctacgctccatcggtagatcaaaaaaggaaagacgcccagttaggccgcacaccgtggagaagcccgtaccctccagcagtggcggagacgctcacgttccacatggaagtcaggtcattcgcaagctggtcatggagcccaccttcaaaccatggcagatgaaaactcacttcctaatgccctttcctgtgaattacgtgggagaatgcatcaggaccgtaccctataccgatccagaccacgcaaggaagagacctgtctgcggatcaggcgacttaggtctcattagccctcgggcatccagccggtcactatgcttatgctgccgcccaagccaccattgtttaccaagactcttgtccgaagttgatgtgttctag

SEQ ID NO: 182952 - protein, 181 aa, Artificial Sequence
  derived and/or modified sequence
MPKGGRKGGHKGRARQYTSPEEIDAQLQAEKQKAREEEEQKEGGDGAAGDPKKEKKSLDSDESEDEEDDYQQKRKGVEGLIDIENPNRVAQTTKKVTQLDLDGPKELSRREREEIEKQKAKERYMKMHLAGKTEQAKADLARLAIIRKQREEAARKKEEERKAKDDATLSGKRMQSLSLNK

SEQ ID NO: 182953 - DNA, 546 bp, Artificial Sequence
  derived and/or modified sequence
atgcctaaaggtgggcggaagggaggccacaaaggccgtgctagacaatacacatctcctgaggaaatcgatgcccagcttcaagccgagaagcaaaaggcacgggaagaggaagagcaaaaagagggaggtgatggggccgcgggcgaccctaaaaaagagaagaaatctcttgactcagacgaatccgaggacgaagaggacgactaccaacagaagaggaagggcgtggaaggactgattgacattgagaatccgaatcgtgttgctcagactacgaaaaaggtgacgcagttggacttggatgggcccaaggagcttagtagacgggaaagagaggaaatcgagaagcagaaggctaaggagaggtacatgaagatgcacctcgcaggcaaaacagagcaggcaaaagctgatctcgccagactagcaataattaggaaacagcgcgaggaagcggcacgcaagaaggaagaggaaagaaaagccaaggacgacgcgacactgtccggcaagcgcatgcagagtctctctctgaacaagtag

SEQ ID NO: 182954 - DNA, 546 bp, Artificial Sequence
  derived and/or modified sequence
atgcccaagggcggcaggaaaggaggccacaagggccgggcccggcagtacaccagccctgaggagattgatgcccagctgcaggccgagaagcagaaggcccgggaggaggaggagcagaaggagggcggagatggagctgctggggaccccaagaaggagaagaagagcctggacagtgatgaaagtgaagatgaagaagatgactaccagcagaagaggaaaggagtggagggcctgattgatattgagaaccccaacagagtggcccagaccaccaagaaggtgacccagctggacctggatggccccaaggagctgagcagaagagagcgggaggagattgagaagcagaaggccaaggagcgctacatgaagatgcacctggccggcaagacagagcaggccaaggctgacctggcccggctggccatcatcaggaagcagcgggaggaggccgccaggaagaaggaggaggagaggaaggccaaggatgatgccaccctgagcggcaagaggatgcagagcctgagcctgaacaagtag

SEQ ID NO: 182955 - DNA, 546 bp, Artificial Sequence
  derived and/or modified sequence
atgcccaagggcggccggaagggcggccacaagggccgggcccggcagtacacgtcaccggaggagattgatgctcagttacaagccgaaaaacagaaggcacgagaagaagaggagcagaaagaaggtggcgatggcgcagccggagatcccaagaaagaaaagaaatctcttgactcggacgagtccgaggacgaggaagacgattatcagcaaaagagaaagggtgtggaggggttgattgacattgagaacccaaaccgcgtggcccagactaccaagaaagtgacacagctggacctggacgggccgaaggaattgtctagaagagagcgcgaggaaatcgagaaacagaaagccaaagaaagatatatgaaaatgcacctcgccggaaagacagaacaggccaaggcggacctggctcggcttgctatcatccgaaagcaacgagaggaggctgcaagaaaaaaggaggaggagaggaaggccaaggacgacgcgactctgtccggcaaacgtatgcaatccttgtcactcaacaagtag

SEQ ID NO: 182956 - DNA, 2546 bp, Artificial Sequence
  derived and/or modified sequence
ctcacttccggtgggtggcaggcagggccacgcgtcttcccgaacggagagactaggggcgttgttgcctggcagcagacgggcaagcctggacttaggcggcgcgcaggacggtccgacttcgtgcggaggcctccctgaggtccgggtccttgcggccactgcggccactgaagcggcggcggcggctggcccaggaggaagaagtcgagcccaagctatttccggttccggtgtcagttcgaggcgccgccgccgccgccgcagccgccggagccgcaatgcctaaaggaggaagaaagggaggccacaaaggccgggcgaggcagtatacaagccctgaggagatcgacgcgcagctgcaggctgagaagcagaaggccagggaagaagaggagcaaaaagaaggtggagatggggctgcaggtgaccccaaaaaggagaagaaatctctagactcagatgagagtgaggatgaagaagatgactaccagcaaaagcgcaaaggcgttgaagggctcatcgacatcgagaaccccaaccgggtggcacagacaaccaaaaaggtcacacaactggatctggacgggccaaaggagctttcgaggagagaacgagaagagattgagaagcagaaggcaaaagagcgttacatgaaaatgcacttggccgggaagacagagcaagccaaggctgacctggcccggctggccatcatccggaaacagcgggaggaggctgcccggaagaaggaagaggaaaggaaagcaaaagacgatgccacattgtcaggaaaacgaatgcagtcactctccctgaataagtaactgcgacccgtgggaggagatgccggggacctgggccgcgctgccaggacctctgctgtgtctcgcccaccctgtgccctggcgccgctgcaacagcccctcatggccaggagccccccatggcctggggcctcctcttcatcttggcacagaaattgtttgggggatggggggggggactgggggaggggtagctgctatctttgagacagaaagatgcaggacagcatttcatatgtaaccatttgaatgtttttgctgtttttagaattcagagcccttgctggggggtgcctgggagatggggtaagaagagctttcatttgtctggtagatagatagcatgtaagggggtggttgtcccaggaggcagctgctgacaggtttgctacacacagccccggactgtgttgcctgggtgctcattcagagaggggctatcatctgggagcctgtgcccctgggtcctcgagggtcatggcttgtccctggtcagtcctgtctgactgacctcagggcctcacctctctgcccttccctgcccggttcctactcacctggctagggccagtgcccattttcagccctacccattgatcatttcaagaaacctctgtttactgtgtggcacccaggcaaaacatgctccacaaattcaacttgtatatttggcagattaaacttgacattatcgtaatctttgttttggcaatccatcctttggcttccgtgctcgagccgtttttacccagctgggtacggtgccacgttcaggcacgtgcacccggcaaggttcagggcacatacctacctggggcatgacatctgtcaggtggcaccgagcaggatgcggggatggaccctagataccacagcctgccccctcccctcctttagccaagtcaggatcttaggcctcagcaggcagggacccttccaggccacagtaggctgaagcagcaccaggatcctggcctggcctggcctgtaggtgtcccctggtggttataattctgtaactctaggggagaaggggaatagcactagcattggatgtcgccaaggcccacattttcctgagagaagccacaaaagatgtgcaaatgcccttcagcacaggacctggtgacatgacataaactccaagacagaacctcagtttacagcacacgaaaaaaatatcttgccaacattgtaatgacaaaataaattcccgtgaagttccacaaccaggccgggcatggtggctcatgcctgtaatcccagcactttgggaggtgaggtgggtggatcatctgaggtcaggagttcaagaccagcctggccaacatggagaaactccgtctctactaaaaatacaaaaattaaccaggcttggtggtgtatgcctgtaatcccagctacttgggaggctgaggcaggagaatcgcttgatcccaggaaggcagaggtggcagtgagctgagaacgcacaactgcactccagcctgggtgacgagcaaaactccatctcaaaacaaaagttccacaaccagcctggagtgtgtagcccctttgtccaggaatttgactagtcaatcagtgacacctggtactggcagttttgggagtggcagcccaggatggacagcagtggggagggaaccatttggcataaggccgttgggcttcaggatcaattttgttggcaagcagtaaaaataagctatctacctatgg

SEQ ID NO: 182957 - DNA, 546 bp, Artificial Sequence
  derived and/or modified sequence
atgcctaagggcggtagaaaaggcggtcacaaggggagagctaggcagtacacctcaccggaagagatagatgctcaattacaagcagagaaacagaaggctcgcgaggaggaagaacagaaggaaggaggtgacggggcagcaggcgatccgaagaaagagaagaagagtttggactccgatgaatccgaggacgaggaagatgattaccagcagaaaagaaagggggtggaagggctcattgacattgagaacccaaacagggtggcccagaccactaaaaaggtcacgcagctcgacctggacgggcctaaggagctgagcagacgcgagagagaggaaatcgaaaaacagaaggcgaaggaaaggtatatgaaaatgcatctggcaggcaagacagagcaggctaaggcagatttggccaggttagcaattatcagaaagcaacgggaagaggccgcacgtaaaaaagaagaagagcgaaaggccaaagacgatgcaaccctgtcaggaaagcggatgcagtcactatccctgaacaaatag

SEQ ID NO: 182958 - DNA, 546 bp, Artificial Sequence
  derived and/or modified sequence
atgcccaagggcggcagaaagggcggccacaagggcagagccagacagtacaccagccccgaggagatcgacgcccagctgcaggccgagaagcagaaggccagagaggaggaggagcagaaggagggcggcgacggcgccgccggcgaccccaagaaggagaagaagagcctggacagcgacgagagcgaggacgaggaggacgactaccagcagaagagaaagggcgtggagggcctgatcgacatcgagaaccccaacagagtggcccagaccaccaagaaggtgacccagctggacctggacggccccaaggagctgagcagaagagagagagaggagatcgagaagcagaaggccaaggagagatacatgaagatgcacctggccggcaagaccgagcaggccaaggccgacctggccagactggccatcatcagaaagcagagagaggaggccgccagaaagaaggaggaggagagaaaggccaaggacgacgccaccctgagcggcaagagaatgcagagcctgagcctgaacaagtag

SEQ ID NO: 182959 - protein, 1271 aa, Artificial Sequence
  derived and/or modified sequence
MEAVKTFNSELYSLNDYKPPISKAKMTQITKAAIKAIKFYKHVVQSVEKFIQKCKPEYKVPGLYVIDSIVRQSRHQFGQEKDVFAPRFSNNIISTFQNLYRCPGDDKSKIVRVLNLWQKNNVFKSEIIQPLLDMAAGIPPPVVTPVLASTTTAMSNTPGTPVTPVTPANVVQGLPDPWVSQITNTDTLAAVAQILQSPQGQQLQQLIQTLQIQQQKPQPSILQALDAGLVVQLQALTAQLTAAAAAANTLTPLEQGVSFNKKLMDRFDFGEDSEHSEEPKKEIPASQLSHVSESVNNSIFHQIAEQLQQQNLEHLRQQLLEQQQPQKATPQDSQEGTFGSEHSASPSQGSSQQHFLEPEVNLDDSIDIQQQDMDIDEGQDGVEEEVFEQEAKKVAVRSRSRTHSRSRSRSPRKRRSRSRSGSRKRKHRKRSRSRSRERKRKSSRSYSSERRAREREKERQKKGLPPIRSKTLSVCSTTLWVGQVDKKATQQDLTNLFEEFGQIESINMIPPRGCAYVCMVHRQDAFRALQKLSSGSYKIGSKVIKIAWALNKGVKTEYKQFWDVDLGVTYIPWEKVKVDDLEGFAEGGMIDQETVNTEWETVKSSEPVKETVQTTQSPTPVEKETVVTTQAEVFPPPVAMLQIPVAPAVPTVSLVPPAFPVSMPVPPPGFSPIPPPPFLRASFNPSQPPPGFMPPPVPPPVVPPPTIPPVVPTSLVQPSLSMTPETVKDVGFGSLVIPGGSVASNLATSALPAGNVFNAPTKQAEPEEKVPHLIDHQISSGENTRSVIPNDISSNAAILGGQPPNVTSNSGILGVQRPNVSSNSEILGVRPSNVSSSSGIIAAQPPNILNNSGILGIQPPSVSNSSGLLGVLPPNIPNNSGLVGVQPPNVPNTPGLLGTQPPAGPQNLPPLSIPNQRMPTMPMLDIRPGLIPQAPGPRFPLIQPGIPPQRGIPPPSVLDSALHPPPRGPFPPGDIFSQPERPFLAPGRQSVDNVTNPEKRIPLGNDNIQQEGDRDYRFPPIETRESISRPPPVDVRDVVGRPIDPREGPGRPPLDGRDHFGRPPVDIRENLVRPGIDHLGRRDHFGFNPEKPWGHRGDFDEREHRVLPVYGGPKGLHEERGRFRSGNYRFDPRSGPWNRGFGQEVHRDFDDRRRPWERQRDRDDRDFDFCREMNGNRLGRDRIQNTWVPPPHARVFDYFEGATSQRKGDNVPQVNGENTERHAQPPPIPVQNDPELYEKLTSSNEINKEKSDTVADIESEPVVESTETEGT

SEQ ID NO: 182960 - DNA, 3816 bp, Artificial Sequence
  derived and/or modified sequence
atggaggctgttaagacattcaatagcgaattgtactctctgaacgactacaaaccgccaatatcaaaagcaaagatgactcagattacaaaagcagctattaaagcaattaaattctataagcacgtggtgcaaagcgtggagaaattcatacaaaaatgcaagcctgagtataaggtgccagggttatatgtaatcgattccatcgtgagacaatccaggcaccagtttgggcaagaaaaggatgtctttgcccctcggttttccaataatatcattagcacgtttcagaatttgtacagatgtcctggtgacgataagagtaagatcgtccgggtgctcaatctttggcagaaaaataatgtgttcaagtctgaaatcattcagccactcttagacatggcagctggaataccccccccagtggttacacccgtcctggcctctactacaacagcaatgagcaacactcctggaacccccgtgactcccgtcacccccgccaatgttgttcaggggttaccagacccatgggtcagccagatcacgaacactgatacgttagccgctgtggcccagatactgcaatcgccccaagggcaacagctgcagcagttgatccagacactgcaaatacagcagcagaagccccagccatccatccttcaagcacttgatgcggggctggtcgtgcagctccaggcattaactgcccagctgaccgcagcggccgccgcagcgaacaccctgaccccattagagcaaggagtttctttcaacaagaagttaatggataggtttgattttggtgaggatagtgagcacagcgaggagccgaagaaagagatacccgcttctcagttgtcacatgttagcgagagtgtgaacaactccatatttcaccagatcgcagagcagttacagcaacagaaccttgagcatcttaggcagcagctgttggaacaacagcagccgcaaaaggcaacaccccaggattcacaggagggcacgtttggctccgagcacagtgcatcaccttcccaggggagcagccagcagcacttcctcgagccagaggtaaacctggacgacagcatagatattcagcagcaagatatggacatcgacgaaggccaggacggagtagaggaggaagttttcgagcaagaggcaaagaaggtagccgttcgttctcgatccaggactcatagtcgcagccgatctcgttcgccccgcaagcgccgatctcgctctaggagcgggagcaggaagcggaaacatcggaagaggagccgaagtcgctccagggaacggaaaaggaagtctagtagatcctacagctcagaaaggcgagccagggagcgggaaaaggagcgccagaaaaagggactgccacccataaggtctaaaactttatctgtgtgtagcaccacattgtgggtggggcaagtagataagaaggctacacagcaggaccttaccaacctgtttgaagaattcggacagattgagtctattaacatgattcccccacgaggttgcgcctatgtgtgcatggtgcaccgccaggatgcattccgcgcgctccagaaactgtcgagtggcagctacaaaataggctcaaaagtgatcaagattgcctgggctctgaacaaaggcgttaaaacagagtacaaacagttttgggatgtggacctgggcgtgacttacatcccttgggagaaagtcaaggtggatgacctggagggttttgccgaggggggaatgatagatcaggagacagtgaatacagagtgggaaactgtgaaaagtagtgagcccgttaaggaaacagtccaaaccacacagtctccgactcctgtggaaaaagagactgtcgtgactactcaggcggaggtgtttcctccccctgtggcaatgcttcagattccagtggcacccgcggtccctactgtttccctcgtgcctccagccttccccgtttccatgccagtgccgccgccaggcttctcaccaatcccgccccccccattcctgcgcgcttcctttaatccgtctcagcctccacctggcttcatgccccctcccgtgcctcctcccgtggtgccccccccgacaattcctcctgtcgtgcctactagtttagtgcagccatccctgtcaatgactcctgaaacggtaaaagacgtcggcttcgggagcttggtcatccctggggggtctgtggcctctaatctggccacttccgctcttcctgctggaaatgtcttcaatgcacccactaaacaggccgaacccgaggaaaaagtccctcacctcatagatcaccagatcagttccggcgaaaacactaggtcagtgatccccaatgacatttcgtccaatgccgctatactcggtggccaacctcccaatgttaccagtaattcaggaattttgggcgtgcaacgtccaaatgtctcttcaaactctgagatcctgggcgttaggcccagtaacgtgtcctcatcatcaggtatcatcgccgcccagccccctaacattctgaacaatagcggaatcttaggtatccaaccaccttcagtgtccaattcaagtggtctgctgggcgtactgccacctaatattccaaataactcaggactggtgggcgtccaacctcccaatgttcccaataccccgggcttgctgggcacacagccacctgccggcccccagaatctgccccccttgtcaatccctaatcagagaatgcccacaatgccaatgctggacattcgccctggccttatcccacaggctccaggaccccggttcccacttatacagcccggcatccctcctcagagaggtattcctccaccgtcagtgttagacagcgcactgcatcctcctcccaggggcccatttccccctggtgatatctttagtcagccggagcgccctttcctggctcctggtcgccagagcgttgataacgtgacgaatcctgaaaagcgaattcccctaggtaatgacaacattcagcaggagggagatagagattatagattcccccctattgaaacccgtgaaagtattagcaggccccctccagtcgacgtccgcgatgtggtaggtagacccatagacccgcgtgaggggcccggtaggcccccgctcgacggacgagatcacttcggccggccccctgtcgacatccgggagaacttagtaagacccgggatcgaccacctggggcggagggatcatttcggctttaatccggagaagccctggggacaccgtggcgattttgacgaacgcgagcatagggtgctgccagtgtatggtggccccaagggactccacgaggaacgcggacggttccgaagcgggaattacaggttcgaccctcgcagtggtccctggaaccgtggctttggccaggaggtgcacagagacttcgacgacaggcgaagaccatgggagcggcaacgcgacagagatgatcgggacttcgatttctgtcgcgagatgaacggaaatcggttaggcagggaccggattcagaacacctgggtacctcctccacacgcgcgcgtcttcgattactttgaaggggcgacgtcacagagaaagggagacaacgttccccaggtcaacggagaaaacaccgaacgccacgcacagcctccccccatccccgtccagaatgacccagaactctatgaaaaattgacttcctctaatgagattaacaaagaaaagtccgacactgtagcggacattgagtccgaaccagtagttgaatccacagaaaccgagggcacatag

SEQ ID NO: 182961 - DNA, 4014 bp, Artificial Sequence
  derived and/or modified sequence
atgcctcaaccattattacccgcgttgccccccctgagtagcccttcgggggccgggtcctgcgggccttccggaggggaatgcagcgggagaagattgttccgcaggagggcccgcggactgaggtccgataacatggaagctgttaagacctttaattcagaggattgtgcttcaacaccagcctgcaccgactgcttctcaagctcaatggacacaagaagcattctgtactcactaaatgattataagccccctatatctaaggcgaagatgacccagattaccaaggccgctataaaagccatcaagttttataaacacgtcgtccagtccgtggagaagttcatccagaaatgcaaaccggagtacaaagtgcccggattgtacgtgatcgactctattgtaagacaatcaaggcatcagttcggccaggagaaagatgtgttcgcccctcgctttagcaataacatcataagtaccttccaaaacctgtatcggtgcccaggcgacgataagtctaagatcgtgagagtcctcaatctgtggcaaaagaataatgtgttcaaaagcgagataatacagcccttgctggatatggcagcagggattcccccacccgttgtaactcctgtgctcgctagtaccacaaccgctatgagcaacacacctggaacacccgtgactcccgtcactcccgccaatgtggtccagggcctgcctgatccttgggtttctcagataacaaataccgataccctggcagccgtggcacagattcttcagagcccccagggacagcagcttcagcagctgatccagaccttacaaatccagcagcagaagcctcagccatctatattgcaggctctggatgcaggccttgttgttcaactccaggcactgaccgctcagctgaccgctgctgccgcagccgctaacaccctgaccccattggagcagggcgtgagcttcaacaaaaagctgatggacagatttgatttcggcgaggattccgagcattccgaagagccaaagaaagaaattcccgcctctcagctctcacatgtttccgagagcgtgaataacagtatctttcatcagatcgcagaacagctgcaacaacagaatctagaacatttgcggcagcaattgctcgagcagcaacagccacagaaagccacccctcaggatagccaggagggaaccttcggcagtgaacattcagcctcacccagtcagggatcatcacagcaacactttctcgaacctgaggttaacctggatgatagtatagatattcagcagcaagatatggatattgacgaaggacaggacggcgttgaggaggaagtgttcgagcaggaggctaaaaaagttgccgtgcgttcccggagccgaacccactctagaagcagaagccgatccccacgcaagcgaagaagccgcagcagatccggcagtcggaagaggaagcacagaaagcggagcagatccagatcacgtgagcggaagaggaagagctctaggtcctattcttctgagcgacgcgctcgcgagcgtgagaaggaacgccagaaaaaaggcctgcctccgataaggtctaaaaccttatccgtctgctccacaacactttgggtgggtcaggtagataagaaagcaacccaacaggacctgacaaacttgttcgaggagtttgggcagattgaatcaatcaacatgattcctccccgaggctgcgcttacgtctgcatggtccatcggcaggatgctttcagagccctgcagaaattgtcctcaggcagttataagatagggtctaaggttattaaaattgcctgggccctgaacaagggcgtaaagactgagtacaagcagttttgggatgttgacttgggcgtcacatacatcccttgggagaaagttaaggtcgacgaccttgagggctttgcggaaggcggcatgattgatcaagaaactgtgaacacggagtgggagacagttaagtcatctgagccggtcaaagagacagtccagaccacccagtcccctacacctgtcgaaaaggagaccgtggtcaccactcaggccgaagtctttccgccccctgttgccatgctgcagatccccgtagcccccgccgtacccaccgttagtttggttcccccggccttccctgtatctatgcccgtaccccctccaggcttctctccgattcccccacctccctttctgagagcttctttcaatcccagtcaaccaccccctggattcatgcctcctccagtgccaccacccgtggtgccccccccaacgatcccacccgtggtccctacgagtctagtgcagcccagcctgagcatgacacctgaaaccgtcaaggacgtcggcttcggctctttggtgataccaggcggctccgttgcatccaatctggccacctccgctctcccagcaggtaacgtatttaacgccccgactaaacaggcagaaccagaggagaaagtgccccatctgatcgatcaccagatttctagcggggaaaacactcgctcggtcatccccaacgatatcagctcaaatgctgccatcctgggcggccagccccctaatgtgacctcaaattctgggatcctgggcgttcagcgccctaatgtgagtagcaattcagagatcctgggagtccggccaagtaatgtgtcctcttcgtctggcattattgctgcacaacctcccaacatcctgaataactcaggaatcctaggcattcaacccccttctgtgagcaattcttccggattgcttggcgtactccctcctaatatacctaataattctggactggtgggcgttcagcccccaaacgtgcccaatacgcctggacttctggggacacagcctcccgcggggccccagaacctaccacctctttcaattcccaatcagcgcatgccaactatgccaatgctggacataagacccggcctgattccccaggcgcctgggccacgtttccccctgatacaaccaggaattccaccgcagcgcggcataccccccccctccgtcctggacagtgcactccacccaccccctagaggtcctttccctcctggtgatatattctctcaacctgaacgaccttttctggccccggggcgtcagagtgtcgacaacgtcacgaacccagagaagcgcattcccctcggcaacgataacatacagcaggagggagatagagattaccgattccccccgatagaaactagggagagcatctcacggcccccccccgtggatgtacgagatgttgtgggaagaccaatcgacccacgtgaaggcccggggcggcccccccttgatgggagagaccacttcggccggccaccagtagacatcagagagaacctcgtacgccctgggatagatcatcttggtcgcagggaccatttcggatttaaccctgaaaaaccctggggtcataggggcgattttgatgaaagggagcatcgggtccttccggtttacggggggccaaaagggctgcatgaagagcgcgggcgattccggagcgggaactaccgcttcgaccctcgttcaggcccgtggaacaggggctttgggcaagaggtgcatagagacttcgatgacagaaggaggccatgggaaagacaaagagacagggatgatagagacttcgacttttgtcgcgagatgaacggcaacagattggggagagaccgaatccagaatacctgggtgccacccccgcacgccagagtgttcgattacttcgagggcgccacttctcagcgcaaaggtgacaacgttccacaggtcaatggggagaacaccgagcgacacgcccagccaccaccgatccccgtccagaacgaccccgaactctacgagaaacttacctccagtaatgagattaacaaggaaaaaagtgatacggtggccgatatagagagcgagcctgtggttgagtcaaccgagactgagggtacctag

SEQ ID NO: 182962 - DNA, 3816 bp, Artificial Sequence
  derived and/or modified sequence
atggaggctgttaaaaccttcaatagtgaactgtattccctcaatgattataagccacctatctcaaaagctaagatgacacagattacaaaggcagcaataaaagcaatcaaattctacaagcatgtggtacaaagcgtggaaaaattcatccagaaatgcaagcccgaatataaagtgcctggcctgtatgtgatcgatagcatcgtgcggcagagcaggcaccaattcggacaggaaaaggacgttttcgcacctcgatttagtaataatatcatctcgacattccagaatctctaccgatgtcctggtgacgataaatctaaaatcgtccgcgtgctcaacctatggcagaaaaataatgtgttcaagtctgaaattatccagcctctcttggacatggccgcaggcattcctccccctgtggtgacccctgttctggccagcaccacaacagcaatgagcaacactcctggaactcccgtgacacccgtgacgcccgctaatgtcgtgcagggactcccagacccgtgggtctcccagatcacgaacactgacaccctggccgccgtggcccagatcctccagtcgcctcaggggcagcagctgcagcaactgatccaaaccctccaaattcaacaacagaaaccccagcccagcatcctccaagccctggacgccgggctcgttgtgcagcttcaggctctgacagcccagctgaccgccgctgccgccgcagctaacactttgaccccccttgagcagggagtgtcattcaataagaaattaatggaccggttcgattttggagaagattctgagcactcggaagaaccgaagaaggaaattcctgctagccaactctcccacgtctccgagtcagtgaataattccattttccatcaaatagccgagcagctccagcagcaaaacttggaacacttgcggcaacagctccttgaacaacagcaacctcaaaaggccactccccaggacagccaggaaggaaccttcggcagcgagcacagcgccagtccctcccaggggtcctcacaacaacactttctagagcccgaggtgaaccttgacgactccattgacatccagcaacaggatatggacatcgatgagggtcaggatggagtcgaggaggaagtgttcgagcaggaagctaagaaggtggccgtacgaagccgttcaagaactcactccaggtcacggtcgagaagcccacggaagcgaaggtcacgctcacgatcaggcagtagaaagcgcaaacatcgcaagcggtctaggtccaggagcagggagagaaaacgaaagagcagcaggtcatacagtagtgaacggcgggctcgggaaagggagaaggaaagacaaaaaaaggggcttcccccgataagaagcaagacactcagcgtgtgctcaactactctgtgggtgggtcaagtggataagaaggccactcagcaggacctgactaatctctttgaagagtttgggcagatagaatctatcaacatgatccccccacgaggctgtgcttatgtgtgcatggtccaccggcaggacgccttcagagctctgcagaaactgagttctggatcttataaaattggaagtaaagtaattaagatcgcatgggcattgaataaaggcgtcaaaacggagtacaaacagttctgggacgtggacctgggcgtgacatacatcccatgggaaaaggtgaaggttgatgatctcgagggtttcgccgaagggggaatgatcgaccaggaaacggtgaatacggagtgggaaacagtcaaatcttctgagcccgtcaaggagacagtccagaccacgcagagccctacccccgtcgagaaggagaccgtcgtgaccactcaggctgaagtctttccccctcctgtagctatgttgcagattccggtggcccccgccgttccgactgtcagccttgttcctcccgcgttccccgtttcaatgcccgtgccacctcccggattctcccctataccgcctcctccctttctgagagcaagcttcaatcccagccagcccccccccggtttcatgcctcctcccgtgcccccgcccgtggtaccacctcccacaataccccctgtggtgcccacatcgctcgtgcagccgtctctgtctatgacaccagagactgttaaagatgtcggctttgggtccctagtgataccggggggatctgttgcaagtaacctcgccacatccgctctgcctgcaggaaatgtgttcaatgcacccaccaaacaggccgagcccgaagaaaaagtgccacatctgatcgaccatcagattagctccggcgaaaacacaagatccgttatacccaacgacatatcttccaacgctgcgatcctcggcggtcagccacctaatgtcacatctaacagcgggattcttggcgttcagaggcctaacgtatcgagcaattctgagatcctcggcgtccgcccctctaacgtgtcctcttcaagtggcataattgccgcgcagccacccaatattctgaataacagtgggatcctgggtatccaacctccgtccgtctcgaatagctctgggttgctgggcgtgctgcctcccaacatccccaacaatagtggactggtcggagtgcagcccccgaacgtcccaaataccccaggcctgctggggacacaaccaccagccggcccccaaaacctgccccccttatccattccgaatcagagaatgccgactatgccaatgctggatattagacccggacttataccccaggcacccggacctcggtttcccttaattcagcctggcatcccaccccaaagaggtataccccccccaagcgtcctcgattccgcattacaccctcctcctcgaggtccctttcccccaggggatatcttcagccagccagagaggccgttcctggcccctggacgtcagagtgtcgataacgtgaccaaccctgagaaacgtatacccctggggaatgataacatccagcaagaaggggacagagactaccgttttccacctattgagacacgggaaagcatttcgcgtccaccaccagttgatgtgagagacgtcgtgggcagaccgattgatcccagggaggggccgggtcgccctcccttggacggaagagatcatttcggacggcccccggtggatattagagagaacctcgtcagacctggaattgaccacctggggagacgcgaccacttcggttttaaccccgagaagccctggggacatagaggcgacttcgacgaaagagaacacagagttctcccagtgtacggagggccgaaaggcctacacgaagagcgcggaagattccgctcaggcaattatcgctttgaccctcgttctggaccctggaatagaggcttcggccaggaagtccatagggacttcgatgatcggaggcgtccctgggagcgacagagagatcgagacgacagggatttcgatttctgccgggagatgaatggaaatcgccttggacgggatagaatccagaacacctgggtccctcctccccatgcacgtgtttttgactattttgaaggggccacatctcagcgaaagggtgataacgtgccacaggtgaacggggaaaacactgaaagacatgcacagccgccacccattccggtgcagaacgatccagaactgtacgaaaagctaaccagcagtaatgagattaataaggaaaagagtgatacagtcgcagacattgaaagtgagccagttgtcgagtctacggagaccgaggggacctag

SEQ ID NO: 182963 - DNA, 3816 bp, Artificial Sequence
  derived and/or modified sequence
atggaggccgtgaagaccttcaacagcgagctgtacagcctgaatgactacaagccacccatcagcaaggccaagatgacccagatcaccaaggccgccatcaaggccatcaagttctacaagcacgtggtgcagagcgtggagaagttcatccagaagtgcaagccagagtacaaggtgcccggcctgtatgtgattgacagcatcgtgcggcagagccgccaccagtttggccaggagaaggatgtgtttgccccccgcttcagcaacaacatcatcagcaccttccagaacctgtaccgctgccctggagatgacaagagcaagatcgtgcgggtgctgaacctgtggcagaagaacaacgtgttcaagtctgagatcatccagcccctgctggacatggccgccggcatccccccacctgtggtgacccctgtgctggccagcaccaccacagccatgagcaacaccccaggcacccctgtgacccctgtgaccccagccaacgtggtgcagggcctgcctgacccctgggtgtcccagatcaccaacacagacaccctggccgctgtggcccagatcctgcagagcccccagggccagcagctgcagcagctgatccagaccctgcagatccagcagcagaagccccagcccagcatcctgcaggccctggatgctggcctggtggtgcagctgcaggccctgacagcccagctgacagctgctgctgctgctgccaacaccctgacccccctggagcagggcgtgtccttcaacaagaagctgatggacagatttgattttggagaagattctgagcacagcgaggagcccaagaaggagatcccagccagccagctgagccacgtgtctgagagcgtgaacaacagcatcttccaccagattgctgagcagctgcagcagcagaacctggagcacctgcggcagcagctgctggagcagcagcagccccagaaggccaccccccaggacagccaggagggcaccttcggcagcgagcacagcgccagccccagccagggcagcagccagcagcacttcctggagcctgaggtgaacctggatgacagcattgacatccagcagcaggacatggacattgatgagggccaggatggagtggaggaggaggtgtttgagcaggaggccaagaaggtggccgtgcgcagccgcagcaggacccacagccgcagccgcagccgcagccccaggaagaggaggagccgcagccgcagcggcagcaggaagaggaagcacaggaagaggagccgcagccgcagccgggagaggaagaggaagagcagccgcagctacagcagcgagcggcgggcccgggagcgggagaaggagcggcagaagaagggcctgccccccatccgcagcaagaccctgtctgtgtgcagcaccaccctgtgggtgggccaggtggacaagaaggccacccagcaggacctgaccaacctgtttgaggagtttggccagatcgagagcatcaacatgatccccccccggggctgtgcctacgtgtgcatggtgcaccggcaggatgccttccgggccctgcagaagctgagcagcggcagctacaagattggcagcaaggtgatcaagatcgcctgggccctgaacaagggcgtgaagacagagtacaagcagttctgggatgtggacctgggcgtgacctacatcccctgggagaaggtgaaggtggatgacctggagggctttgctgagggcggcatgattgaccaggagaccgtgaacacagagtgggagaccgtgaagagcagcgagcctgtgaaggagaccgtgcagaccacccagagccccacccctgtggagaaggagaccgtggtgaccacccaggccgaggtgtttcctcctcctgtggccatgctgcagatccctgtggccccagctgtgcccaccgtgtccctggtgcccccagccttccctgtgtccatgcctgtgcccccacctggcttcagccccatccccccaccacccttcctgcgggccagcttcaaccccagccagcccccacctggcttcatgcctcctcctgtgcccccacctgtggtgcccccacccaccatcccccctgtggtgcccaccagcctggtgcagcccagcctgtccatgaccccagagaccgtgaaggatgtgggcttcggcagcctggtgattcctgggggctctgtggccagcaacctggccaccagcgccctgcctgctggaaatgtgttcaatgcccccaccaagcaggccgagcctgaggagaaggtgccccacctgattgaccaccagatcagcagcggggagaacaccaggagcgtcatccccaatgacatcagcagcaatgctgccatcctgggcggccagcccccaaatgtgaccagcaacagcggcatcctgggcgtgcagaggcccaacgtgagcagcaacagcgagatcctgggcgtgcggcccagcaatgtgagcagcagcagcggcatcatcgccgcccagccccccaacatcctgaacaacagcggcatcctgggcatccagcccccatctgtgagcaacagcagcggcctgctgggcgtgctgccccccaacatccccaacaacagcggcctggtgggcgtgcagcccccaaatgtgcccaacaccccaggcctgctgggcacccagcccccagctggcccccagaacctgccccccctgagcatccccaaccagaggatgcccaccatgcccatgctggacatccggcccggcctcatcccccaggcccctggcccccgcttccccctcatccagcccggcatccccccccagaggggcatccccccacccagcgtgctggacagcgccctgcaccccccaccccggggccccttccccccaggggacatcttcagccagcctgagcggcccttcctggcccctggccggcagagcgtggacaacgtgaccaaccctgagaagaggatccccctgggcaatgacaacatccagcaggagggggaccgggactaccgcttcccccccatcgagacccgggagagcatcagccggcccccacctgtggatgtgagagatgtggtgggccggcccatcgacccccgggagggccctggccggccccccctggatggccgggaccacttcggccggccccctgtggacatccgggagaacctggtgcggcccggcatcgaccacctgggcagaagagaccacttcggcttcaaccctgagaagccctggggccacagaggagactttgatgagcgggagcaccgggtgctgcctgtgtatggaggccccaagggcctgcacgaggagcggggccgcttccgcagcggcaactacagatttgaccccaggagcggcccctggaacagaggatttggccaggaggtgcaccgggactttgatgacagaagaagaccctgggagcggcagagggacagagatgaccgggactttgacttctgccgggagatgaatggaaaccggctgggccgggaccgcatccagaacacctgggtgcccccaccccacgcccgggtgtttgactactttgaaggagccaccagccagaggaaaggagacaacgtgccccaggtgaatggagaaaatacagaaagacatgcccagcccccacccatccctgtgcagaatgaccctgagctgtatgagaagctgaccagcagcaatgagatcaacaaggagaagagtgacacagtggccgacattgaaagtgagcctgtggtggagagcacagaaacagagggcacctag

SEQ ID NO: 182964 - DNA, 4014 bp, Artificial Sequence
  derived and/or modified sequence
atgccccagcccctgctgcctgccctgccccccctgagcagccccagcggggccggcagctgtggccccagcggaggagaatgttctggaagaagactcttcagaagaagagcccggggcctgcggagtgacaacatggaggccgtgaagaccttcaacagcgaggactgtgccagcaccccagcctgcacagactgcttcagcagctccatggacaccaggagcatcctgtacagcctgaatgactacaagccacccatcagcaaggccaagatgacccagatcaccaaggccgccatcaaggccatcaagttctacaagcacgtggtgcagagcgtggagaagttcatccagaagtgcaagccagagtacaaggtgcccggcctgtatgtgattgacagcatcgtgcggcagagccgccaccagtttggccaggagaaggatgtgtttgccccccgcttcagcaacaacatcatcagcaccttccagaacctgtaccgctgccctggagatgacaagagcaagatcgtgcgggtgctgaacctgtggcagaagaacaacgtgttcaagtctgagatcatccagcccctgctggacatggccgccggcatccccccacctgtggtgacccctgtgctggccagcaccaccacagccatgagcaacaccccaggcacccctgtgacccctgtgaccccagccaacgtggtgcagggcctgcctgacccctgggtgtcccagatcaccaacacagacaccctggccgctgtggcccagatcctgcagagcccccagggccagcagctgcagcagctgatccagaccctgcagatccagcagcagaagccccagcccagcatcctgcaggccctggatgctggcctggtggtgcagctgcaggccctgacagcccagctgacagctgctgctgctgctgccaacaccctgacccccctggagcagggcgtgtccttcaacaagaagctgatggacagatttgattttggagaagattctgagcacagcgaggagcccaagaaggagatcccagccagccagctgagccacgtgtctgagagcgtgaacaacagcatcttccaccagattgctgagcagctgcagcagcagaacctggagcacctgcggcagcagctgctggagcagcagcagccccagaaggccaccccccaggacagccaggagggcaccttcggcagcgagcacagcgccagccccagccagggcagcagccagcagcacttcctggagcctgaggtgaacctggatgacagcattgacatccagcagcaggacatggacattgatgagggccaggatggagtggaggaggaggtgtttgagcaggaggccaagaaggtggccgtgcgcagccgcagcaggacccacagccgcagccgcagccgcagccccaggaagaggaggagccgcagccgcagcggcagcaggaagaggaagcacaggaagaggagccgcagccgcagccgggagaggaagaggaagagcagccgcagctacagcagcgagcggcgggcccgggagcgggagaaggagcggcagaagaagggcctgccccccatccgcagcaagaccctgtctgtgtgcagcaccaccctgtgggtgggccaggtggacaagaaggccacccagcaggacctgaccaacctgtttgaggagtttggccagatcgagagcatcaacatgatccccccccggggctgtgcctacgtgtgcatggtgcaccggcaggatgccttccgggccctgcagaagctgagcagcggcagctacaagattggcagcaaggtgatcaagatcgcctgggccctgaacaagggcgtgaagacagagtacaagcagttctgggatgtggacctgggcgtgacctacatcccctgggagaaggtgaaggtggatgacctggagggctttgctgagggcggcatgattgaccaggagaccgtgaacacagagtgggagaccgtgaagagcagcgagcctgtgaaggagaccgtgcagaccacccagagccccacccctgtggagaaggagaccgtggtgaccacccaggccgaggtgtttcctcctcctgtggccatgctgcagatccctgtggccccagctgtgcccaccgtgtccctggtgcccccagccttccctgtgtccatgcctgtgcccccacctggcttcagccccatccccccaccacccttcctgcgggccagcttcaaccccagccagcccccacctggcttcatgcctcctcctgtgcccccacctgtggtgcccccacccaccatcccccctgtggtgcccaccagcctggtgcagcccagcctgtccatgaccccagagaccgtgaaggatgtgggcttcggcagcctggtgattcctgggggctctgtggccagcaacctggccaccagcgccctgcctgctggaaatgtgttcaatgcccccaccaagcaggccgagcctgaggagaaggtgccccacctgattgaccaccagatcagcagcggggagaacaccaggagcgtcatccccaatgacatcagcagcaatgctgccatcctgggcggccagcccccaaatgtgaccagcaacagcggcatcctgggcgtgcagaggcccaacgtgagcagcaacagcgagatcctgggcgtgcggcccagcaatgtgagcagcagcagcggcatcatcgccgcccagccccccaacatcctgaacaacagcggcatcctgggcatccagcccccatctgtgagcaacagcagcggcctgctgggcgtgctgccccccaacatccccaacaacagcggcctggtgggcgtgcagcccccaaatgtgcccaacaccccaggcctgctgggcacccagcccccagctggcccccagaacctgccccccctgagcatccccaaccagaggatgcccaccatgcccatgctggacatccggcccggcctcatcccccaggcccctggcccccgcttccccctcatccagcccggcatccccccccagaggggcatccccccacccagcgtgctggacagcgccctgcaccccccaccccggggccccttccccccaggggacatcttcagccagcctgagcggcccttcctggcccctggccggcagagcgtggacaacgtgaccaaccctgagaagaggatccccctgggcaatgacaacatccagcaggagggggaccgggactaccgcttcccccccatcgagacccgggagagcatcagccggcccccacctgtggatgtgagagatgtggtgggccggcccatcgacccccgggagggccctggccggccccccctggatggccgggaccacttcggccggccccctgtggacatccgggagaacctggtgcggcccggcatcgaccacctgggcagaagagaccacttcggcttcaaccctgagaagccctggggccacagaggagactttgatgagcgggagcaccgggtgctgcctgtgtatggaggccccaagggcctgcacgaggagcggggccgcttccgcagcggcaactacagatttgaccccaggagcggcccctggaacagaggatttggccaggaggtgcaccgggactttgatgacagaagaagaccctgggagcggcagagggacagagatgaccgggactttgacttctgccgggagatgaatggaaaccggctgggccgggaccgcatccagaacacctgggtgcccccaccccacgcccgggtgtttgactactttgaaggagccaccagccagaggaaaggagacaacgtgccccaggtgaatggagaaaatacagaaagacatgcccagcccccacccatccctgtgcagaatgaccctgagctgtatgagaagctgaccagcagcaatgagatcaacaaggagaagagtgacacagtggccgacattgaaagtgagcctgtggtggagagcacagaaacagagggcacctag

SEQ ID NO: 182965 - DNA, 3816 bp, Artificial Sequence
  derived and/or modified sequence
atggaggccgtgaagaccttcaacagcgagctgtacagcctgaacgattacaaaccccctatctcaaaggctaagatgacacagattacaaaggccgcaatcaaagcaatcaaattctataagcacgtggtgcaaagcgtggagaagttcattcagaagtgcaagcctgagtataaggtccccggcctctacgtcattgactccattgtgaggcagagcaggcaccaatttgggcaggagaaggatgtcttcgcccctaggtttagtaacaacatcatctccacttttcagaacctgtatcgttgtcccggtgacgacaaatccaaaattgtgcgcgtcctaaacctctggcagaagaataatgtgtttaaatctgagatcatccagccgttactagatatggcagcaggtattcctcccccagtggtgacacccgtcctcgccagcacaactaccgccatgtcaaacacgcctggaactcctgtaactcctgtcacccccgctaatgtggtacaagggcttcccgacccatgggtttcacagatcacaaatacagacacattggccgcagtggctcagattctgcagagccctcaaggccaacaacttcagcagcttattcagaccttgcagatccagcagcagaaaccccaacccagtatcctgcaggcactggacgccggactggtggtacagttgcaagccttaactgcccagctcaccgccgccgcagccgcagctaatacccttacacccttggaacagggggttagttttaacaaaaagttaatggaccggtttgacttcggcgaagactccgagcactccgaggagccaaagaaagaaattccagcttcacagctttctcacgtgtctgaatcagtcaacaattccatttttcatcagatagccgagcagctccaacagcaaaatctggaacacctcagacaacagctgctcgagcagcagcagcctcagaaagcgacacctcaggattcgcaagagggaaccttcggcagcgaacacagcgcttctcccagtcagggcagctctcagcaacatttcttagagccagaagtgaacttggacgactccattgacatccagcagcaggacatggatattgacgaaggccaggatggggtggaggaggaggtgttcgaacaggaggccaagaaagttgccgttcgctctagatctcgcacccatagtaggtcacggagccgatcccctaggaagagacgaagcaggtcaaggagcgggtcaaggaagcgaaagcacaggaaacgaagtcgctcccgcagcagagaacgaaagcgaaaaagctcaaggagctacagcagcgagcgccgtgcgcgagaaagagaaaaggaacggcaaaaaaaaggactgccccctatcagaagcaagacgctgtctgtttgctcaaccacgttgtgggtgggccaggtcgataaaaaggctacccaacaagatctgaccaatctcttcgaggagtttggccagatcgagtctataaatatgattccgccccgggggtgcgcttatgtgtgtatggtgcaccgtcaggacgctttcagggctttgcagaagctcagcagtggcagctacaaaatcgggagtaaggttatcaaaatcgcatgggctctgaacaaaggtgtgaagaccgagtataagcaattctgggacgtggacctcggcgtgacctacatcccttgggagaaagtcaaagtggacgacttggagggcttcgctgaaggcggaatgattgatcaggagactgtgaatactgagtgggaaaccgtcaagtcttcagagccagtgaaggagacagtgcagacaacccaatctcctaccccagtcgagaaggagaccgtggtaaccactcaggcagaagtgttccctcctcccgtggccatgttacagataccggtcgcccctgctgtgcccactgtatcactggtccctcccgcttttccggtgtctatgccagtgcctccacctggttttagcccaattcctcctcctccgtttctcagggcctctttcaacccgagccagccaccgcctggatttatgccccccccagtgccaccccctgtggtgcctccacctacaatcccacccgtggttccaacttccttggtgcaaccgagtctctctatgacacctgagacggttaaagatgtcgggtttggcagtcttgtcatcccaggcggcagcgtcgcttcgaaccttgccacatctgctctcccagccggcaatgtgttcaacgcacccacaaaacaggcagagccggaggagaaagtgcctcatttaatcgaccaccagatcagctcaggcgaaaacacccgtagtgtgattcccaacgacatcagctccaatgcagcgattctaggggggcaaccacctaatgttacttcaaacagcggcattctgggagtgcaacgcccaaacgttagctccaacagcgagatcttaggagtgagaccatcaaatgttagttccagctctgggattatcgccgcccagccaccgaacatacttaataactctggaatactaggtatacagcctccatccgtatctaactcatccggcctcctgggagtgctacctcctaatatccccaacaactctgggttggtaggggtccagcctccaaatgttccaaatactccaggactgctgggaacccaaccccccgccggaccacaaaacctgccccccctgtcgattcctaatcagcgtatgccaaccatgcctatgctggacatcaggcctggactgattccccaagccccgggaccccggtttcccctgatccagcctggcattccgccccagcggggtatacctccaccatctgtcctggactctgcccttcacccacccccgagaggacccttccccccgggagacatattttcccagccagagagacctttcttggcgccaggcagacaaagcgtcgataacgtaaccaatcccgagaagagaatcccccttggcaacgataatattcaacaggaaggggaccgggactacaggttcccaccaatcgagacccgggaaagtatctcccggccgccacccgtagatgtgagggacgtggtaggccgcccgattgacccacgcgagggaccaggccggccccccttagatggtcgagaccacttcggccgtccacccgttgacatacgcgagaatctggtgagacccggcattgaccatctcggcagacgagatcattttggatttaacccggaaaagccgtggggtcaccgaggtgacttcgatgaaagggaacaccgcgtcttaccggtgtatgggggaccaaagggactacatgaagaacggggtaggttcagatcgggaaactataggttcgaccccaggtccgggccatggaatcggggtttcgggcaggaggtgcacagagattttgatgaccgccgtcggccctgggaaagacagcgggaccgggacgaccgggacttcgatttctgcagggaaatgaacggaaatcgactggggcgagaccgaattcaaaacacatgggtacccccgcctcacgctcgtgttttcgactatttcgaaggggccactagtcaacgcaagggcgacaatgttccccaggtcaacggcgagaatactgaaaggcacgctcagcctcctcccatcccagttcaaaacgatccagagttatatgagaagctcacatcgagcaatgagatcaataaagaaaagtctgacacggtggctgacatcgagtctgagcctgttgttgagtctaccgaaacagagggaacctag

SEQ ID NO: 182966 - DNA, 4014 bp, Artificial Sequence
  derived and/or modified sequence
atgccccagcccctgctgcccgccctgccccccctgagcagccccagcggtgcgggttcttgcggtccatccggaggggagtgctccggaagaaggctgttcagacggagggcaagaggtctacggagtgacaacatggaggcagtgaaaacgtttaattccgaggactgcgcatcaacacccgcatgtacagactgctttagctcatcaatggacacacgaagcattctctacagcctcaacgactacaagcctccaatcagcaaagccaagatgacacagatcaccaaggcagccattaaggccatcaagttctacaagcatgtggtccagtccgtggagaaattcattcagaaatgcaaacctgaatacaaggtccccgggttatatgtgatcgattcaatcgtgcgccagtctaggcatcagttcggtcaggagaaggacgtctttgccccccgcttcagcaacaatatcatcagcacatttcagaacctgtacaggtgccccggagacgataaatcaaagatcgttcgggttctcaacctctggcaaaagaacaatgtgttcaaatccgagatcatccaaccactgctggatatggctgcaggcatccctcctcctgtcgtcactcccgtcttggcatccactaccaccgcaatgtccaacacacccggcacacctgtgactcctgtgacccctgccaacgtggtccagggcctgccagatccttgggtgtcacagataaccaacactgacaccttggctgcagtggcgcaaatcctgcaatcacctcagggacagcagctccagcagctgatccaaaccctccaaattcagcaacagaaaccacagccctcaatactacaggctctcgatgctggtctagtggtccagctccaggcactcacagcccagttaacagccgccgcggctgcggctaatacactgacaccactcgaacagggggtgtccttcaacaagaagctgatggatcggtttgattttggggaggactccgagcactcagaagaacctaagaaagaaattcccgcctcccaattaagtcatgtttctgaatccgtcaacaatagcatctttcaccagatcgccgagcagctgcagcaacaaaatctcgagcatctccgtcaacagctactggagcagcagcagcctcagaaggcaacaccccaagatagccaggaggggacgttcgggagcgaacactctgcgagccccagccagggcagttctcagcagcattttctcgagcctgaggtgaacctggatgacagcatcgatatccagcagcaggacatggatatcgatgaaggacaggacggagtggaagaggaggtgtttgaacaggaagctaaaaaggtcgcagtccgatctcggtccagaacacatagtaggtctcggtcacgatctccccgcaaacgaaggtcaaggtcacggagtgggtcgcgcaagcggaagcatcgcaaaaggagcaggtcaagaagccgcgagagaaagcgtaaatctagcagatcttacagcagcgaacggagagctcgggaacgggaaaaggaacggcagaagaagggtctgccccccattcggagtaaaacgttatctgtgtgttctactactctctgggtgggtcaggtggataaaaaggcaactcaacaggaccttactaacctcttcgaagagttcgggcaaatcgagtctatcaacatgattcctccgaggggctgtgcttatgtttgcatggtccatcgccaggatgctttccgcgcactgcaaaaactctccagcgggagttacaagattgggtctaaagtgattaagatagcgtgggcactgaacaagggtgtcaagacggagtataagcagttttgggacgtggacttgggggtgacttacattccatgggagaaggtcaaggtggacgatctcgaaggcttcgccgaagggggaatgattgatcaggagaccgtgaataccgaatgggagacggtgaagtcaagcgaaccggttaaggagacagtgcagaccacccagtcccccaccccagtggagaaagaaactgtcgtgaccacccaggcagaggtttttccccctccagttgcaatgctgcagatccctgtcgcaccagccgtgcccaccgtctctcttgtgccccctgccttcccagtctctatgcccgtgccacccccaggattcagtcccatcccccccccccctttcctgagggcctcatttaatccctcccagcccccgccagggtttatgccacccccagtcccgcctccagttgttccacctcccacaataccgcccgtggtgcctactagtctggtacagcccagtctgtcaatgacacccgagacagtgaaagatgtgggcttcggatcattagttattcccgggggcagcgtggcctctaatctggccacgtcagccctgcccgcagggaatgtcttcaatgcgcctactaaacaggccgagccagaggagaaggtgccccacctaatcgaccatcagatctccagcggggagaacacacgctctgttatcccaaatgacatatcctcaaatgcagctattctcggcggacaaccaccaaacgtgacctcaaacagcggaattctcggggttcaaaggcccaatgtaagttccaactctgaaatactcggcgtccgcccatccaacgtttcctctagctcgggaataatcgcagcccagccacccaacatcctaaataactctggtattctgggcattcagccccctagtgtgtccaatagttccggactcctcggcgtactgccccctaatatccccaacaattccgggctggtcggtgtgcagccccccaacgttcctaacacccctgggctcctgggcacccaaccccccgccggaccccagaaccttcccccattgagtattcccaaccaacggatgccaacgatgcctatgcttgacataagacccggcctgatcccgcaggcaccgggcccaagatttcctcttattcaacccggaattcccccccagcgcggcatccctcccccatcggtcctcgattccgctctgcaccctccacccagaggacctttcccacccggtgacattttttcccagccagaaaggccttttcttgcaccgggcaggcagtccgtggataatgtgaccaatcccgagaaacgcatcccactggggaacgataacattcaacaggagggcgaccgggattacagattcccaccaattgaaacccgcgaatcaatttctcgtcctcccccggtcgacgtccgtgatgttgtaggcaggccgatcgaccctcgcgagggccccggccgccctccgcttgatgggcgcgatcattttgggcgcccccccgttgacattcgtgagaacctcgtgcggcctgggattgatcacctcggccgaagggatcactttggatttaatcccgaaaaaccatgggggcatagaggtgactttgacgagcgtgagcacagggtgctcccagtttatggaggaccaaaggggctgcacgaggagcgaggccggttccgaagcggtaactatcggttcgaccctaggtccgggccttggaatcgtggctttggacaggaagtccacagggacttcgacgaccggagaagaccgtgggagagacagagggacagagacgatcgtgattttgacttttgccgggagatgaacgggaaccgcctgggtagagacagaattcaaaacacttgggtcccccctcctcacgctcgggtgttcgattacttcgaaggcgcaacaagccagaggaagggggacaatgtgccacaggtgaacggggaaaatacggagagacacgctcagccccctcccatacctgtgcagaacgacccagagctctacgagaagcttacttcatctaatgagataaacaaagagaagtccgacacggttgctgacatcgagtccgagccagttgtggaatctacggaaaccgagggcacctag

SEQ ID NO: 182967 - DNA, 3816 bp, Artificial Sequence
  derived and/or modified sequence
atggaggccgtgaagaccttcaacagcgagctgtacagcctgaacgattataagcccccaataagtaaggcaaagatgacccagattaccaaagctgccatcaaggccattaagttctataagcacgtcgtgcagagcgtagaaaagttcattcaaaaatgcaaacctgaatataaagtccccgggctgtatgtgattgatagtattgttaggcagtctcgccaccagtttggacaggagaaggacgtgttcgccccccgttttagtaataatatcatcagtactttccaaaacctttaccgctgtcctggagatgacaagtccaagatagtacgcgttttgaacttgtggcagaaaaacaacgtgtttaagagtgagataattcagcctttattggacatggctgcgggaattccacccccagttgttacgccagtgctcgctagcacaaccaccgccatgtccaatacccccggcaccccagtcaccccagttacaccggcgaacgtcgtgcagggcctgcctgacccttgggtgtcccagatcacaaataccgataccctcgcagctgtagcacaaatccttcagtcaccacagggccaacagctgcagcaacttattcagactctacaaatacagcagcagaagccacagcctagtattctgcaggcacttgatgccggcctggtggtccagctccaggccctgacagcgcagcttactgcggctgcagctgccgccaacaccctaactccacttgagcagggggtaagtttcaacaaaaagctcatggataggttcgattttggtgaggactcagagcactcagaggagcccaagaaggaaatccctgcctcacagttaagccacgtgagtgagtccgtgaacaacagcatattccatcagattgccgagcagctgcagcagcagaacctggagcatctgcggcagcagctgctggaacagcagcaacctcagaaggctaccccacaggacagccaagaaggaacctttgggagtgagcattccgcatccccatcccagggctctagtcaacagcactttctggagcccgaggtgaatttagatgactcaatcgacattcagcagcaggatatggacatcgacgaaggacaggatggtgttgaggaggaagtgtttgaacaggaagcaaagaaggtagcagtgcgctcacggagccgtactcatagccgctccaggagcagaagcccacggaaaagacgtagtaggagtagaagcggttctaggaagcggaaacatcgcaaacggagtaggagtaggagccgtgaacgaaagcgtaagtcgtctagatcgtattctagcgaaaggagggcccgtgaacgcgaaaaggaaaggcagaagaaaggtcttcctcccatcaggtccaagactctgagcgtgtgtagcacgaccctctgggtcggacaggttgataaaaaagcgacacaacaggacctcacaaacttgttcgaggagttcgggcaaattgaatctatcaatatgatccccccgcgcggctgtgcatatgtatgcatggttcatcgccaggacgctttccgcgccctacagaagctgtcgagcgggtcttacaagatcggtagcaaggtaattaaaatagcatgggctctcaataaaggtgtgaagacagagtataaacaattctgggatgttgatttgggcgtgacatacattccatgggagaaagtaaaagtggacgacctcgaaggctttgctgaaggcggcatgatcgatcaggagaccgtgaacacagagtgggagaccgtaaagtctagcgagcctgttaaagaaaccgtacagactacgcagagcccgacaccggtcgagaaggaaacagtggtgactacccaggcagaagtattcccacctcctgttgccatgttacaaatccctgtagctcctgccgtgcctaccgtatcccttgtcccccctgccttccctgtctccatgcccgtcccaccaccaggcttttctccaatcccacctccaccattcttgagagcaagttttaatccatcacagccccccccaggttttatgccaccaccggtcccacctccagttgttccccctccaacaatcccgccagtcgtccctaccagtctagtgcaaccttctctgtctatgactccggaaactgtaaaagatgtcggctttggctcactcgtcatccccggcggatcagtcgcttctaacctggcgacatccgctctacccgctgggaacgttttcaatgccccaactaagcaggccgaaccggaggagaaggtgcctcatctgattgatcatcagatttccagcggagagaacactaggtcagtgatcccaaacgatattagttccaatgcagctatactggggggtcagcctcctaacgtaacctcaaactctgggatcctgggcgtacagcgccccaatgtgagcagcaacagtgaaatactaggtgtgaggccctcaaatgtaagttcgtcctccggaatcattgcagcacagccccctaatattctgaataactcaggcatcctaggcatccaaccgcccagcgtgagcaacagctccggactcctgggagtccttcccccaaatatcccaaataattcaggtctggtcggcgtccagccgccaaacgtcccgaacactcctggcctcctgggaacacagcccccggccgggcctcagaatttgcctcccttatcgatccccaaccagagaatgcctacgatgccgatgctggacatcaggcctggcctgattcctcaggctccagggcccaggttcccactcattcagcctgggatccccccacagagaggcattccaccgccctccgtgctggatagcgccctccaccctcctcctcgagggccattccccccgggagacatattctctcagcctgagcgtccatttttggcgccaggaagacagagtgttgacaacgtgacaaatccggaaaagcgcatacctctcggcaacgataatattcagcaggaaggagacagggattatcgattcccacccatcgagacgagggaatcaatctccagaccaccccccgtcgatgtgcgggatgtggtgggaaggcctattgatccacgggagggtccgggacgtccccctctggatgggcgagaccattttgggcgacctcctgtcgatatccgcgagaacttagtgcgaccgggtatcgatcatctgggaagacgggatcacttcggatttaaccctgagaagccttggggccatcggggggattttgatgagcgcgagcatagagtgctgcctgtgtatggcggtccaaaaggtttgcacgaggagcgcggacgctttaggtctggcaattatagattcgatcctagatcagggccttggaacagggggtttgggcaagaggtgcatcgagattttgatgatcgccgtagaccgtgggagcggcaaagagacagagacgacagagatttcgacttttgccgggagatgaatggtaatcgactgggccgggaccgcattcaaaatacgtgggtaccaccccctcacgcacgggtgttcgactattttgagggcgccacaagccagaggaagggagacaatgtccctcaagtgaatggggaaaacaccgagcggcacgcccaacccccacccatccccgtgcagaatgatccggagttgtatgagaagctgacgtcatccaatgagatcaacaaggaaaaatcagacactgtggctgatatcgagagcgaaccagtggtagagagtacagaaacagagggaacctag

SEQ ID NO: 182968 - DNA, 5055 bp, Artificial Sequence
  derived and/or modified sequence
cggccgccggggctcgcacggtccagtcgccagggggcgcgctagccggcgccgcggatccccgaactgcgcggcccgactcgagtccgccatattggatgccgcagccgctgctgccagcgcttcctcctctgtcttcgccgagcggggctggttcctgcggcccgagcggcggggaggtgaaacaggagcccgtcggaggaaggggcagaagggagtggagagtgtaggggaaggggctagagggagggggaccgaaacggagcggggcagagaagagaaggcgccgcggcccagcccctcccccgcccgccgccgacccgccccggcagcgcctctgttccctagaacggcgctccccccgccctagcggccatgccggtgccgctctgccgctgagggagcccttccccgccagcgcgtgcccttccactccgccccgaggtcgcagcggcccgctctcccgccagcgccccctcctcgcggccacgcagcagcccgcgtctcgctctccccacccagtgcagtggccgccgcctcttccgccgccgggctcggggcctccgcagcgacaacatggaggccgtgaagaccttcaatagcgagttgtattccctgaatgactataaaccacccatttcgaaagcgaaaatgacccaaattactaaggcagccatcaaagctattaagttctataaacatgtggtacagagtgttgagaagtttattcagaaatgtaaaccagaatacaaagtacctggactttatgttattgactccattgtgcgacaatcccgacatcagtttggtcaagaaaaggatgtgtttgcacccagatttagtaataacatcattagcactttccagaatttatatcgttgccctggggatgacaagagtaaaatagtgagagtactaaacttatggcagaagaataatgtatttaagagtgagattattcagccccttttggatatggcagccgggattccgcctccagttgtcacacctgttttggccagcactaccactgctatgagcaatactccaggaactcctgtgacacctgttactccggccaatgtggtccaaggcttacctgatccgtgggtatctcagataacaaatacagatacacttgcggctgtagctcagatcttgcaaagtcctcaaggccagcagcttcaacaattaatacaaaccttacagatacaacaacagaagccccagccttccattctgcaggccctagatgctggtcttgttgttcagttgcaagctcttacggcacaacttacagctgcagctgcagctgccaacactcttactcccttagaacagggagtctcctttaacaagaagttgatggataggtttgattttggggaagactctgagcatagtgaagaacccaaaaaggaaattccagcttcacaactttctcacgtttcagaatctgtgaacaattccatttttcatcagatagcagaacaactacaacagcaaaacctagaacatctcagacagcagctcttggagcagcaacagcctcaaaaggccactcctcaggatagtcaggaaggaacctttgggtcagagcattcagcgtcaccatcacaagggagtagtcagcagcattttcttgaacctgaagtcaatttggatgattccatagatattcagcaacaggatatggatatagatgaagggcaagatggagtggaagaggaggtctttgaacaagaagctaagaaagtggcggttcgctcaagatcaagaacacattcacgatctcgttcaagatcaccaagaaaacgaaggtctaggtcacggtctggctctagaaagcgtaaacacagaaagcgatcacgctcccgctcaagagaaagaaagaggaaatcatcacggtcgtattcaagtgaaaggagagccagagaaagggagaaagaacgacagaaaaagggattacctccaattagatctaaaacactaagtgtatgtagtactactctctgggttgggcaagtggacaagaaggcaacacagcaagacttaaccaacctgtttgaagagtttggacagattgaatccattaatatgattcctccccggggctgtgcttatgtctgcatggttcatcgacaagatgcatttcgagctcttcagaaactcagttctggatcatataaaattgggtccaaggtcattaagatcgcttgggctttaaacaaaggtgtaaaaacagaatacaaacaattctgggatgtggatcttggagttacatatataccatgggaaaaagttaaagtggatgacttggaaggttttgcagaaggaggcatgattgatcaggagactgtaaatactgagtgggaaactgtgaaaagctcagaacctgttaaagagacggtccagacaactcagagcccaactccagttgaaaaggagacagtggtcacaacccaggcagaggttttccctcctcctgttgctatgttgcagattccagtggcgccagccgtgcctacagttagtttagtcccaccagcatttcctgtgtcgatgccggttcctcctcctggattcagtccaatccctccacctccttttttaagagcaagttttaacccttcacaaccaccacctggtttcatgccgcctccagttcccccacctgttgtgccaccccctacgattccaccagtagtaccaacatctttagtgcagccgtcattatccatgacaccggaaactgtgaaagatgttggatttggtagccttgttataccaggcggttctgttgccagcaatcttgctacttccgctctgccagctggaaatgtttttaatgctccaactaaacaggcagagcctgaagaaaaagtacctcatcttatagaccaccagatttcttctggtgaaaacaccagatcagtgattccaaatgatatttcaagtaatgctgcaattttaggaggacagccgccaaatgtgacaagcaattctggaattctgggagtccaaagaccaaatgtatcaagtaattctgaaattcttggggtccggccatctaatgtttccagtagttctgggattattgcagcccaaccaccaaatattctaaataactctggaatattgggaatacagccacccagtgtgtcaaatagttctggacttttgggagtgctacccccaaatatacctaacaattctggacttgtaggagtacagccaccaaatgttccaaatactcctggacttctgggaacacagccaccagctggacctcaaaacttaccccctttaagtatccctaatcaaaggatgcccacaatgccaatgttagacattcgtccgggactaataccacaggcacctgggccaagattccctttaatacagcctggaattccaccccaacggggaatcccacccccatcggtacttgattcagctcttcatccaccaccccgtggaccttttcctccaggagatatttttagtcaaccagaaagaccttttttagctcctggaagacaaagcgtagacaatgttactaacccagaaaaaaggataccacttgggaatgataacattcaacaggaaggagatagagattaccggtttcctcctatagaaaccagggaaagcattagtagacctccccctgtggatgttagagatgtggttgggcggcctatagatccaagagaaggtcctggacggcctccactagatggtagggatcattttggaagacctcctgtagatataagagagaatcttgtgaggccaggtatagatcatcttggtcgaagagaccactttggctttaatccagagaagccctgggggcatagaggagattttgatgagagagagcatcgggttctaccggtctatggtggtccaaaaggcttacatgaagaaagaggtagatttcggtctggaaactatcgatttgatcctagaagtggtccttggaaccgaggatttggacaagaagttcacagagattttgatgaccgcagaagaccctgggagaggcaaagggatagggatgacagagattttgatttctgcagagaaatgaatggaaatcgtcttggacgagacagaattcaaaacacttgggttccccctcctcatgctcgggtttttgattattttgaaggggccacttctcaacgaaaaggtgataatgtgcctcaggttaatggtgaaaatacagagagacatgctcagccaccacctataccagtacagaatgatcctgaactttatgaaaaactgacatcttcaaatgaaataaacaaggagaagagtgacacagttgctgatatagaaagtgaaccagtggtagaaagcacagaaactgaggggacataatcatcactcagtaggtaaaagataccttttgtaaagttgtcatctctctgtaatagataatggctgactggaccatagttgttcacttttgtctgccagaattaagttaatctgatgttcatgttcacctttctcttaaaataattgtacaactgacttgtatagacattgttcttaatatgaacatggtaggtaaactttttttttatttttttctgataaaatacaaatgttggccccagattcttttaacgtcaaggaaatgaataacagcttgtcagagacttcctatggaagaaagaattttttagatactatcattaggttggatatggtaatagatatatttcagaatagcaagtggtggtatatcttatccatatctttaggctgctgcagaattttaaggttatagataaagctgtgatattttatgcaaagactggctctaggtatttgaggagcacaatacagagattttaaaaagtgattttgtaaaatctacactacggtctctgtttctccaaagtaagtgtttgtgatttgttcctcatactgcagtgagtaaaaaagaaacaagaaaacaacaacataaatattaaagtacgtttcaatgttgggtgaattttgtttttagatgccaataaaacttatttgtttgat

SEQ ID NO: 182969 - DNA, 4684 bp, Artificial Sequence
  derived and/or modified sequence
atattggatgccgcagccgctgctgccagcgcttcctcctctgtcttcgccgagcggggctggttcctgcggcccgagcggcggggagtgcagtggccgccgcctcttccgccgccgggctcggggcctccgcagcgacaacatggaggccgtgaagaccttcaatagcgaggattgtgcctctactcctgcttgtacagactgcttttccagcagcatggacacaagaagcatattgtattccctgaatgactataaaccacccatttcgaaagcgaaaatgacccaaattactaaggcagccatcaaagctattaagttctataaacatgtggtacagagtgttgagaagtttattcagaaatgtaaaccagaatacaaagtacctggactttatgttattgactccattgtgcgacaatcccgacatcagtttggtcaagaaaaggatgtgtttgcacccagatttagtaataacatcattagcactttccagaatttatatcgttgccctggggatgacaagagtaaaatagtgagagtactaaacttatggcagaagaataatgtatttaagagtgagattattcagccccttttggatatggcagccgggattccgcctccagttgtcacacctgttttggccagcactaccactgctatgagcaatactccaggaactcctgtgacacctgttactccggccaatgtggtccaaggcttacctgatccgtgggtatctcagataacaaatacagatacacttgcggctgtagctcagatcttgcaaagtcctcaaggccagcagcttcaacaattaatacaaaccttacagatacaacaacagaagccccagccttccattctgcaggccctagatgctggtcttgttgttcagttgcaagctcttacggcacaacttacagctgcagctgcagctgccaacactcttactcccttagaacagggagtctcctttaacaagaagttgatggataggtttgattttggggaagactctgagcatagtgaagaacccaaaaaggaaattccagcttcacaactttctcacgtttcagaatctgtgaacaattccatttttcatcagatagcagaacaactacaacagcaaaacctagaacatctcagacagcagctcttggagcagcaacagcctcaaaaggccactcctcaggatagtcaggaaggaacctttgggtcagagcattcagcgtcaccatcacaagggagtagtcagcagcattttcttgaacctgaagtcaatttggatgattccatagatattcagcaacaggatatggatatagatgaagggcaagatggagtggaagaggaggtctttgaacaagaagctaagaaagtggcggttcgctcaagatcaagaacacattcacgatctcgttcaagatcaccaagaaaacgaaggtctaggtcacggtctggctctagaaagcgtaaacacagaaagcgatcacgctcccgctcaagagaaagaaagaggaaatcatcacggtcgtattcaagtgaaaggagagccagagaaagggagaaagaacgacagaaaaagggattacctccaattagatctaaaacactaagtgtatgtagtactactctctgggttgggcaagtggacaagaaggcaacacagcaagacttaaccaacctgtttgaagagtttggacagattgaatccattaatatgattcctccccggggctgtgcttatgtctgcatggttcatcgacaagatgcatttcgagctcttcagaaactcagttctggatcatataaaattgggtccaaggtcattaagatcgcttgggctttaaacaaaggtgtaaaaacagaatacaaacaattctgggatgtggatcttggagttacatatataccatgggaaaaagttaaagtggatgacttggaaggttttgcagaaggaggcatgattgatcaggagactgtaaatactgagtgggaaactgtgaaaagctcagaacctgttaaagagacggtccagacaactcagagcccaactccagttgaaaaggagacagtggtcacaacccaggcagaggttttccctcctcctgttgctatgttgcagattccagtggcgccagccgtgcctacagttagtttagtcccaccagcatttcctgtgtcgatgccggttcctcctcctggattcagtccaatccctccacctccttttttaagagcaagttttaacccttcacaaccaccacctggtttcatgccgcctccagttcccccacctgttgtgccaccccctacgattccaccagtagtaccaacatctttagtgcagccgtcattatccatgacaccggaaactgtgaaagatgttggatttggtagccttgttataccaggcggttctgttgccagcaatcttgctacttccgctctgccagctggaaatgtttttaatgctccaactaaacaggcagagcctgaagaaaaagtacctcatcttatagaccaccagatttcttctggtgaaaacaccagatcagtgattccaaatgatatttcaagtaatgctgcaattttaggaggacagccgccaaatgtgacaagcaattctggaattctgggagtccaaagaccaaatgtatcaagtaattctgaaattcttggggtccggccatctaatgtttccagtagttctgggattattgcagcccaaccaccaaatattctaaataactctggaatattgggaatacagccacccagtgtgtcaaatagttctggacttttgggagtgctacccccaaatatacctaacaattctggacttgtaggagtacagccaccaaatgttccaaatactcctggacttctgggaacacagccaccagctggacctcaaaacttaccccctttaagtatccctaatcaaaggatgcccacaatgccaatgttagacattcgtccgggactaataccacaggcacctgggccaagattccctttaatacagcctggaattccaccccaacggggaatcccacccccatcggtacttgattcagctcttcatccaccaccccgtggaccttttcctccaggagatatttttagtcaaccagaaagaccttttttagctcctggaagacaaagcgtagacaatgttactaacccagaaaaaaggataccacttgggaatgataacattcaacaggaaggagatagagattaccggtttcctcctatagaaaccagggaaagcattagtagacctccccctgtggatgttagagatgtggttgggcggcctatagatccaagagaaggtcctggacggcctccactagatggtagggatcattttggaagacctcctgtagatataagagagaatcttgtgaggccaggtatagatcatcttggtcgaagagaccactttggctttaatccagagaagccctgggggcatagaggagattttgatgagagagagcatcgggttctaccggtctatggtggtccaaaaggcttacatgaagaaagaggtagatttcggtctggaaactatcgatttgatcctagaagtggtccttggaaccgaggatttggacaagaagttcacagagattttgatgaccgcagaagaccctgggagaggcaaagggatagggatgacagagattttgatttctgcagagaaatgaatggaaatcgtcttggacgagacagaattcaaaacacttgggttccccctcctcatgctcgggtttttgattattttgaaggggccacttctcaacgaaaaggtgataatgtgcctcaggttaatggtgaaaatacagagagacatgctcagccaccacctataccagtacagaatgatcctgaactttatgaaaaactgacatcttcaaatgaaataaacaaggagaagagtgacacagttgctgatatagaaagtgaaccagtggtagaaagcacagaaactgaggggacataatcatcactcagtaggtaaaagataccttttgtaaagttgtcatctctctgtaatagataatggctgactggaccatagttgttcacttttgtctgccagaattaagttaatctgatgttcatgttcacctttctcttaaaataattgtacaactgacttgtatagacattgttcttaatatgaacatggtaggtaaactttttttttatttttttctgataaaatacaaatgttggccccagattcttttaacgtcaaggaaatgaataacagcttgtcagagacttcctatggaagaaagaattttttagatactatcattaggttggatatggtaatagatatatttcagaatagcaagtggtggtatatcttatccatatctttaggctgctgcagaattttaaggttatagataaagctgtgatattttatgcaaagactggctctaggtatttgaggagcacaatacagagattttaaaaagtgattttgtaaaatctacactacggtctctgtttctccaaagtaagtgtttgtgatttgttcctcatactgcagtgagtaaaaaagaaacaagaaaacaacaacataaatattaaagtacgtttcaatgttgggtgaattttgtttttagatgccaataaaacttatttgtttgat

SEQ ID NO: 182970 - DNA, 4709 bp, Artificial Sequence
  derived and/or modified sequence
gcggatccccgaactgcgcggcccgactcgagtccgccatattggatgccgcagccgctgctgccagcgcttcctcctctgtcttcgccgagcggggctggttcctgcggcccgagcggcggggagcgccccctcctcgcggccacgcagcagcccgcgtctcgctctccccacccagtgcagtggccgccgcctcttccgccgccgggctcggggcctccgcagcgacaacatggaggccgtgaagaccttcaatagcgagttgtattccctgaatgactataaaccacccatttcgaaagcgaaaatgacccaaattactaaggcagccatcaaagctattaagttctataaacatgtggtacagagtgttgagaagtttattcagaaatgtaaaccagaatacaaagtacctggactttatgttattgactccattgtgcgacaatcccgacatcagtttggtcaagaaaaggatgtgtttgcacccagatttagtaataacatcattagcactttccagaatttatatcgttgccctggggatgacaagagtaaaatagtgagagtactaaacttatggcagaagaataatgtatttaagagtgagattattcagccccttttggatatggcagccgggattccgcctccagttgtcacacctgttttggccagcactaccactgctatgagcaatactccaggaactcctgtgacacctgttactccggccaatgtggtccaaggcttacctgatccgtgggtatctcagataacaaatacagatacacttgcggctgtagctcagatcttgcaaagtcctcaaggccagcagcttcaacaattaatacaaaccttacagatacaacaacagaagccccagccttccattctgcaggccctagatgctggtcttgttgttcagttgcaagctcttacggcacaacttacagctgcagctgcagctgccaacactcttactcccttagaacagggagtctcctttaacaagaagttgatggataggtttgattttggggaagactctgagcatagtgaagaacccaaaaaggaaattccagcttcacaactttctcacgtttcagaatctgtgaacaattccatttttcatcagatagcagaacaactacaacagcaaaacctagaacatctcagacagcagctcttggagcagcaacagcctcaaaaggccactcctcaggatagtcaggaaggaacctttgggtcagagcattcagcgtcaccatcacaagggagtagtcagcagcattttcttgaacctgaagtcaatttggatgattccatagatattcagcaacaggatatggatatagatgaagggcaagatggagtggaagaggaggtctttgaacaagaagctaagaaagtggcggttcgctcaagatcaagaacacattcacgatctcgttcaagatcaccaagaaaacgaaggtctaggtcacggtctggctctagaaagcgtaaacacagaaagcgatcacgctcccgctcaagagaaagaaagaggaaatcatcacggtcgtattcaagtgaaaggagagccagagaaagggagaaagaacgacagaaaaagggattacctccaattagatctaaaacactaagtgtatgtagtactactctctgggttgggcaagtggacaagaaggcaacacagcaagacttaaccaacctgtttgaagagtttggacagattgaatccattaatatgattcctccccggggctgtgcttatgtctgcatggttcatcgacaagatgcatttcgagctcttcagaaactcagttctggatcatataaaattgggtccaaggtcattaagatcgcttgggctttaaacaaaggtgtaaaaacagaatacaaacaattctgggatgtggatcttggagttacatatataccatgggaaaaagttaaagtggatgacttggaaggttttgcagaaggaggcatgattgatcaggagactgtaaatactgagtgggaaactgtgaaaagctcagaacctgttaaagagacggtccagacaactcagagcccaactccagttgaaaaggagacagtggtcacaacccaggcagaggttttccctcctcctgttgctatgttgcagattccagtggcgccagccgtgcctacagttagtttagtcccaccagcatttcctgtgtcgatgccggttcctcctcctggattcagtccaatccctccacctccttttttaagagcaagttttaacccttcacaaccaccacctggtttcatgccgcctccagttcccccacctgttgtgccaccccctacgattccaccagtagtaccaacatctttagtgcagccgtcattatccatgacaccggaaactgtgaaagatgttggatttggtagccttgttataccaggcggttctgttgccagcaatcttgctacttccgctctgccagctggaaatgtttttaatgctccaactaaacaggcagagcctgaagaaaaagtacctcatcttatagaccaccagatttcttctggtgaaaacaccagatcagtgattccaaatgatatttcaagtaatgctgcaattttaggaggacagccgccaaatgtgacaagcaattctggaattctgggagtccaaagaccaaatgtatcaagtaattctgaaattcttggggtccggccatctaatgtttccagtagttctgggattattgcagcccaaccaccaaatattctaaataactctggaatattgggaatacagccacccagtgtgtcaaatagttctggacttttgggagtgctacccccaaatatacctaacaattctggacttgtaggagtacagccaccaaatgttccaaatactcctggacttctgggaacacagccaccagctggacctcaaaacttaccccctttaagtatccctaatcaaaggatgcccacaatgccaatgttagacattcgtccgggactaataccacaggcacctgggccaagattccctttaatacagcctggaattccaccccaacggggaatcccacccccatcggtacttgattcagctcttcatccaccaccccgtggaccttttcctccaggagatatttttagtcaaccagaaagaccttttttagctcctggaagacaaagcgtagacaatgttactaacccagaaaaaaggataccacttgggaatgataacattcaacaggaaggagatagagattaccggtttcctcctatagaaaccagggaaagcattagtagacctccccctgtggatgttagagatgtggttgggcggcctatagatccaagagaaggtcctggacggcctccactagatggtagggatcattttggaagacctcctgtagatataagagagaatcttgtgaggccaggtatagatcatcttggtcgaagagaccactttggctttaatccagagaagccctgggggcatagaggagattttgatgagagagagcatcgggttctaccggtctatggtggtccaaaaggcttacatgaagaaagaggtagatttcggtctggaaactatcgatttgatcctagaagtggtccttggaaccgaggatttggacaagaagttcacagagattttgatgaccgcagaagaccctgggagaggcaaagggatagggatgacagagattttgatttctgcagagaaatgaatggaaatcgtcttggacgagacagaattcaaaacacttgggttccccctcctcatgctcgggtttttgattattttgaaggggccacttctcaacgaaaaggtgataatgtgcctcaggttaatggtgaaaatacagagagacatgctcagccaccacctataccagtacagaatgatcctgaactttatgaaaaactgacatcttcaaatgaaataaacaaggagaagagtgacacagttgctgatatagaaagtgaaccagtggtagaaagcacagaaactgaggggacataatcatcactcagtaggtaaaagataccttttgtaaagttgtcatctctctgtaatagataatggctgactggaccatagttgttcacttttgtctgccagaattaagttaatctgatgttcatgttcacctttctcttaaaataattgtacaactgacttgtatagacattgttcttaatatgaacatggtaggtaaactttttttttatttttttctgataaaatacaaatgttggccccagattcttttaacgtcaaggaaatgaataacagcttgtcagagacttcctatggaagaaagaattttttagatactatcattaggttggatatggtaatagatatatttcagaatagcaagtggtggtatatcttatccatatctttaggctgctgcagaattttaaggttatagataaagctgtgatattttatgcaaagactggctctaggtatttgaggagcacaatacagagattttaaaaagtgattttgtaaaatctacactacggtctctgtttctccaaagtaagtgtttgtgatttgttcctcatactgcagtgagtaaaaaagaaacaagaaaacaacaacataaatattaaagtacgtttcaatgttgggtgaattttgtttttagatgccaataaaacttatttgtttg

SEQ ID NO: 182971 - DNA, 3816 bp, Artificial Sequence
  derived and/or modified sequence
atggaggcggttaagacatttaatagtgagctttactctcttaatgattataaaccacccatctcaaaagcaaagatgacccagatcaccaaggccgcaattaaggcaattaaattctataagcatgtcgtccagtccgtggagaagttcattcagaagtgtaagccagaatataaagtccccggtctgtatgtgatcgattcaatcgtccgtcagtctcgacatcagttcggtcaggaaaaggacgtgtttgccccacgattctccaacaatatcatttctacttttcagaatctgtatcgctgtcccggagacgataaatctaaaattgtccgggttctaaacctgtggcaaaagaataatgtcttcaaaagtgaaattatccagcctctcctcgacatggccgcaggcattccgccaccagtggtgactcccgtgctcgcctctacaaccacggccatgtctaacactccaggcacacccgtcaccccggtgacccccgcaaacgtggtacaaggattacctgatccttgggtttcccagataaccaacaccgataccctggctgcagtcgcacagatactccagagcccccaaggccagcaactacaacagttgattcaaaccttgcaaatccagcagcaaaagccacagccttccattttgcaggccctggatgccggtctggtggtgcagctccaggctctgacagcccagctgacagctgccgctgcggcagccaacactctcacacccctggagcagggggtgtcattcaataagaagctgatggaccggttcgacttcggggaggatagcgagcactccgaggaacctaagaaagaaatccctgccagccagctgagccacgtcagcgaatccgtgaacaactccatcttccatcaaatcgcggaacaactacagcagcagaacctggagcatctgcggcaacaactcctggagcaacaacagcctcagaaagcgacaccccaggactcgcaagagggaacttttggctctgagcactctgcatccccctctcagggaagctcccaacagcactttttggagcctgaagtgaatttagatgactctatcgatattcagcaacaggacatggatatcgatgagggacaagacggcgtggaggaggaggtattcgagcaggaggctaaaaaggtggccgtaaggagcaggagtaggacccactcgaggtccaggtcgagaagtccaagaaagcggagatccaggtcaaggagcggttcccggaagaggaaacacagaaagcgtagtaggagccgtagcagggagaggaagagaaagtcctctagatcctatagctccgagcgcagagcacgagaacgcgagaaggaacggcagaaaaaggggcttcccccaataaggtctaaaactctaagcgtctgctctactaccctatgggtggggcaagtcgacaagaaggctacgcagcaagatcttacaaacctgtttgaggagtttgggcagattgaaagtatcaatatgataccgcctcgtggctgcgcttatgtgtgcatggtccaccggcaggacgcattccgggctttacagaagctgagctccgggtcatacaagatcggatctaaagtgatcaagattgcgtgggccctaaataagggggtgaagaccgagtacaagcagttttgggacgttgacctcggcgtgacctacattccctgggaaaaggtgaaggtggatgatctggaagggtttgccgagggcggaatgattgaccaggaaaccgttaataccgaatgggagacagtcaagtcttccgaaccggttaaggagactgtgcagacaacccaaagtcctacccccgtggaaaaagaaacagttgtaacgacgcaggcagaggttttcccccctcccgtcgcgatgttgcagatcccagtcgctcccgctgtgcccaccgtgtctctagtgcccccagcatttcctgtgagtatgccagtgcctcctcccggttttagcccgattcctccgccaccattcctgcgggctagtttcaacccctcccagcccccaccaggctttatgccgccacccgtccctcctccagtggttccgcctcctaccattccgccagtggtccccacaagtctggtgcagcccagcctgtctatgacccccgaaacggtcaaagacgtgggcttcggcagccttgtaattccagggggatcagtcgcaagcaatctggccacctccgccctaccagcaggaaacgtattcaacgccccaaccaaacaggcagaacccgaggaaaaagtgccccaccttattgatcatcagatcagttctggagaaaataccaggtccgtcatcccaaatgacatctcttcaaacgcagctatactggggggacagcccccaaatgtcacgagcaattccggaattctcggcgtgcagaggcccaacgtgagcagcaactcagagatcctgggcgtgagaccgtccaacgtgtctagttctagcggcataattgcagctcagccaccaaatatccttaataatagtggtattttgggcatccagccgccttcggtcagcaatagtagcggccttttaggcgtcctgcccccaaatattcctaacaactcaggcttggtaggagttcaaccacctaacgtgcctaacaccccaggtctgctcggtactcagcctccggctgggcctcaaaatctgccaccgctgtctataccaaaccagcggatgccaacaatgcctatgctggacatcagaccgggactcattccgcaggcccctgggccaagattccctctcattcagcccggaattccaccccagcgagggatccctcccccaagcgtactggacagtgctctgcaccctccaccccgaggcccatttcccccaggggacattttctctcagcccgaacgaccttttctcgccccaggccgtcagagcgtggataatgtgaccaatcccgagaaacgcatccctctcggcaatgataatatccagcaggaaggggatagggactaccggtttcccccaattgaaacccgagaaagcattagccggccacctcccgtcgatgtgcgcgacgtcgtggggaggccaatcgatccaagggagggacccggtcgacctcctctggacggccgagaccacttcggcagacctcctgtggacatcagagagaatcttgtccggcctggaattgatcacctgggacgcagagaccatttcggcttcaatccggagaaaccctggggccacaggggagactttgatgaacgcgaacacagggtgttacctgtctacggaggtcctaagggtctgcacgaggagcgcggtagatttagatctggtaactacaggtttgatccgagaagtggaccttggaatcggggtttcggccaggaagttcaccgagatttcgatgacaggaggcgcccttgggaacggcagcgggacagggatgacagggatttcgacttctgccgcgagatgaatggaaataggcttggtcgggatcgcatacaaaatacctgggtgccccctccccacgcgcgagttttcgattacttcgagggggctacttcccaacgcaaaggggacaacgtaccccaggtaaatggggagaacaccgaaagacacgcacagccaccgcctatccctgtgcagaacgaccctgaactgtacgaaaagctaacttcatccaatgaaatcaacaaagagaaaagtgatacagtcgcggatatcgagtctgaacccgtggtcgagtctacagaaacagagggcacctag

SEQ ID NO: 182972 - DNA, 4014 bp, Artificial Sequence
  derived and/or modified sequence
atgccgcaacctctactgcctgccctcccccctctcagctcccctagcggtgcagggagctgcggaccatccgggggagagtgctctgggcgtcgtctgtttcgtagacgggctcgtggactgcggagtgataacatggaggctgtgaaaacctttaatagcgaagattgcgcctccacgccagcatgcactgattgtttctccagcagtatggacacaagaagcattctgtatagcttaaatgattacaagccccctatctctaaggccaagatgacacagataaccaaggcagctatcaaagctattaagttctataagcacgtggtgcagagcgtagagaaatttatccaaaaatgtaagcctgagtataaagtcccaggcctgtatgttatcgacagcattgtcagacaatctcgtcatcagttcggccaagagaaagatgtctttgcccctcgcttcagtaacaacattataagtaccttccagaacttgtacaggtgtccgggtgacgataagagtaagatcgtccgggtgctgaatctatggcagaaaaataacgtgttcaaatctgaaattatacagccactgctagacatggccgctgggattcctccaccagtggtgacgccagtgctcgcaagcacaaccactgcaatgagtaacacccccggaacacccgtcaccccagtgacaccggctaatgtggtgcaaggactaccggatccatgggtctctcagattactaacacagacacgctggccgcagtcgcccagattctgcagtccccccagggccagcaattacagcagctcatacagacactgcagattcagcagcagaagccgcagccttccattctccaagccctcgatgccggacttgtggtgcagctgcaggcacttaccgcccagctgaccgccgctgcagccgctgccaacacccttactccactcgagcagggggtcagctttaacaagaaattaatggataggtttgacttcggcgaagacagcgagcactccgaagagccaaagaaggagataccggctagccagcttagccatgtctccgaaagcgtaaataattccatttttcatcagatcgctgagcagcttcaacagcagaaccttgagcatctcagacagcaactgttggagcagcagcaaccccagaaggcaacgccgcaggacagccaagaggggactttcggttccgagcactcagcgtctccctcacagggcagtagtcagcaacactttttggagccagaggtgaaccttgatgactccattgacattcaacagcaagatatggatatagatgagggccaggatggggtggaggaagaggtctttgagcaggaagctaaaaaagtggcagtaaggagtcgctcaagaacccactccaggagccgctccaggagccccaggaagaggaggtcgagatctaggagcggctccaggaagaggaagcataggaagagaagtcgtagtagatcacgagagaggaagcggaagtcttctaggtcctactcttctgaacgacgcgctagagaaagggaaaaagagagacagaaaaagggccttccgccaatcaggagtaagaccctctccgtgtgctccacgaccctctgggtcgggcaagttgataagaaagctacccagcaagacctgaccaacctctttgaagagtttggccaaatcgaaagtataaatatgattccccctaggggttgcgcctacgtgtgtatggttcaccgccaggatgcatttagagcactgcagaagctgtcctctggcagctacaaaattgggagcaaagtcattaagatagcttgggcattgaataagggcgttaaaaccgagtacaagcagttctgggacgtggatctcggggtcacatatatcccatgggagaaggttaaggttgacgacttggaaggctttgcggaggggggtatgattgatcaggagaccgtgaatacagagtgggaaaccgtgaagtcatcagagcctgtgaaggagaccgtgcagaccacgcagagccctactccggttgagaaagagactgtggtaacgacccaggctgaagtgtttccccctcccgtagccatgctgcagataccagtcgctccagctgtgcccactgtatcattggtcccgcctgcctttcctgtcagcatgcccgttccaccacctggtttctcccccatccctccaccaccgtttctgcgcgcttccttcaacccatcacagccccctccaggctttatgccacccccagtccccccacctgtggtcccgccaccgacaattccaccagttgtccctacgtcgctggttcagccctctctttctatgacaccagaaactgtgaaggatgtggggttcggatccctggtgatccccggaggctctgtggcaagtaatctagcaacatctgccttacccgcagggaatgtgtttaacgccccaaccaagcaggcggagccggaggaaaaagtgccgcacttaattgaccaccagatctccagcggcgagaatacaaggtcagttattcccaacgacatcagctctaatgccgctatactcggtggccagccacctaatgtcacctcaaacagcgggatcctgggagtgcagagaccaaacgtttcctcaaactctgaaatcctgggagtgcgcccatctaacgtgtcatcctcttcaggtatcatcgccgcacagcctcctaacatcctgaataacagtggcattcttggaatccagccgccttccgtgtccaactcatcgggcctcctgggcgtgctgccgcctaacatccctaacaatagcggtttggtcggggtgcagccccctaatgttccaaacactcccggacttctcgggacccagcccccagctggccctcagaacttgcctcccctgagcatcccgaatcaaagaatgcctactatgcctatgttggacattcgcccaggtttaatcccccaggctcccggaccacgctttccgctgatccaacctggtatccctcctcagcggggtattccccctcccagtgtcctggatagtgctttgcatccaccccctagggggccttttcccccaggcgatatcttctctcagcccgagcgcccattcctggcgccaggccgacagtctgtcgacaacgtcacgaatcccgagaaacgcattccactcggaaatgataatatacagcaggagggcgatcgggactaccgcttccccccaatcgaaacacgcgaatcaatttccagacctcctcctgtggacgtgcgggatgtggtggggcgacccatcgacccccgtgaaggacctgggcgacctccgctcgacggcagagatcacttcggaaggccacccgtagacattcgcgaaaacctggtccgtcctggtattgaccacctgggcaggcgtgaccatttcggcttcaatcctgagaagccttggggacaccgaggagatttcgacgagcgcgagcaccgggttctgcccgtatatggcggtcctaaggggctgcatgaggagcgagggaggttcagatccggaaactaccgattcgacccgagaagcgggccatggaatcgcggattcggacaggaagttcatcgcgatttcgacgacagacgccgaccttgggaacgacaacgggatcgggatgatcgcgattttgatttctgtcgggagatgaatggcaataggctaggcagagacagaattcagaacacctgggtaccgccaccccacgccagggtttttgactatttcgaaggtgcaacttctcagcgcaagggagacaatgttccacaggtaaacggtgagaacacggaacggcacgcgcagcccccaccaattcctgtgcagaacgatccagagctgtacgagaagctgacctcctccaacgagattaacaaggagaagagcgatactgttgccgatatcgagtccgagcccgtggtggagtccaccgaaacggaaggcacatag

SEQ ID NO: 182973 - DNA, 3816 bp, Artificial Sequence
  derived and/or modified sequence
atggaggccgtgaagacattcaactccgaactctattccttgaacgactacaaacctcctatctcgaaggctaagatgacacaaatcactaaggcggctatcaaggcaattaagttttacaaacatgtggtgcagagcgttgagaagtttattcagaaatgcaagcctgaatataaggtgcccggtctgtacgtaattgatagtatcgtgcgacagtcccgtcaccagttcggtcaagagaaggacgtgtttgcgccacggtttagtaataatattatttccactttccagaacctgtaccgatgccccggagatgacaagagcaaaatcgttagagtcctaaacctgtggcagaagaacaacgtctttaaaagcgaaatcatccaacccttgctggatatggccgcaggcatccctccccctgtcgtgactccagtgctggcttccactacaaccgctatgagcaacactccgggaactccagtcacaccagtgactccagccaacgtggtgcaaggcctccctgatccctgggtctctcagatcactaatacagacacgctcgccgcagttgctcagatcctgcagtccccacagggacagcaattgcaacagctcatccaaactctgcagattcagcagcagaagccgcagccttcaatcctgcaagcgctggatgccggactggtggtgcagcttcaggcactcacagcccagctgacggccgctgccgcagccgctaacactctaacaccgcttgagcagggggtgagcttcaacaagaaacttatggatagatttgattttggcgaagactccgagcattccgaggagcccaagaaggaaatcccggcatcacagctctcacatgtatcagagagcgtcaacaactcaatttttcaccaaatcgcggaacaactgcagcagcaaaacttggaacatctgagacagcagttactggaacagcagcagccccaaaaggccacgccccaggatagccaggagggcacttttgggtcagagcatagcgcatccccaagccagggcagcagtcagcagcatttccttgagcctgaagtaaacctggacgacagcattgatatccaacagcaggacatggacattgatgagggacaagacggtgtcgaagaagaggtctttgagcaggaggcaaagaaggtggctgtgcgctcccgcagtagaacacactcccgatctcggagccggtcccccaggaaaagacgctcaaggagccggagcggcagccgcaagcgaaaacatcgcaaaagaagccgttccaggagcagagagcggaagcggaagtcatccaggagttattcctctgagcggcgagcacgagaaagggagaaagaacggcaaaagaaaggcttgcctcctatccgttctaagaccctgtccgtgtgttccacgaccctttgggtcgggcaggtcgataagaaggccacacagcaggacctgactaaccttttcgaggagttcggacagattgagtctattaacatgatcccacccagagggtgcgcctacgtttgtatggtgcatcgccaggacgctttcagagcgctccagaagctttcctcaggaagctataagatagggagcaaggtcatcaagatcgcttgggcattgaacaagggagtgaaaaccgaatacaaacagttctgggacgttgatctgggcgtcacatatatcccctgggagaaagtcaaggttgatgacctcgaggggtttgcagagggcggtatgatcgaccaagaaactgtgaacacagagtgggagactgttaagagttccgaacccgtgaaagagacggtgcagaccacccagagcccgacgcctgtcgagaaggagactgtggttaccacacaggccgaagttttcccgcctcccgtcgctatgctgcaaattcctgtcgccccagcagttcccactgttagcttggttccaccggcttttcctgtttccatgcctgtgccgcctccaggcttctcccccataccaccaccccctttccttcgggcttcattcaatccttcacagcccccaccgggttttatgccaccccctgtcccccctcccgtagtgccacctcccacgatcccccctgttgtgcctaccagccttgtacagccaagcctgtcaatgacacctgaaaccgtgaaggatgtgggattcgggagcctggtgatcccgggtggctctgtagcgagtaacctcgcaacctctgctctccctgccggaaatgtgtttaatgctccaacgaaacaagccgaacctgaggagaaagtgccccacctgattgaccaccaaatcagcagcggtgagaatacaaggagtgtgattccaaatgacattagcagtaatgctgccatattggggggtcaacctcccaatgttacttcaaactctgggatcctcggtgttcaaaggcccaacgtttcaagtaacagtgagatcctaggcgtccgacccagtaatgtctccagctcgagcggaataatcgctgcccaacctccaaacatactcaataatagtggaatattggggatacaacctcctagtgttagcaatagtagcggcctccttggggttctcccgcctaatatccccaacaatagcggactggtaggtgttcagcctcctaatgtgcccaatactcccggtcttttggggacgcagccccctgctggtccgcagaatctgccgccactttccattcctaaccagaggatgcccaccatgcccatgcttgacattaggccaggtcttattccccaggcaccaggaccgagattccctttaatccagcctggaatcccaccccagcgaggcattccccctccaagcgtcctcgattccgccctgcacccaccgcctcggggaccctttcctcccggagacatatttagccagccagagaggccttttctcgcccctggcagacagagcgttgacaacgttaccaatcccgagaagcggatacctctcgggaacgataacatccagcaggagggcgatcgcgattaccgatttcccccaatagagacaagagagtctatctcacgaccacctcctgtcgacgtgcgcgatgtcgtgggtcgcccaattgatcctcgcgaaggcccaggacgccctcctcttgacgggcgagatcatttcggcagaccacccgtcgatatcagagagaacttggtgagacctgggattgatcatcttggacgcagagatcacttcggctttaatcctgaaaagccctgggggcaccggggagactttgacgaaagagagcatcgggtgctgccagtgtacggtgggcctaagggactgcatgaggagcgtggtcgatttcggagtgggaactatcggtttgatcccaggtccggtccatggaatagagggttcggccaggaggtgcaccgagatttcgatgataggagacggccttgggagcggcaaagagatcgagatgatcgcgattttgacttctgtagagagatgaatggcaatagactgggcagagaccgcattcagaatacctgggtcccccctccccatgcacgcgtatttgactactttgagggagctacaagtcagaggaaaggtgataacgtgccacaggttaatggcgaaaataccgaaaggcatgcacagcctccgccaatccccgtgcagaatgatcccgaattgtacgaaaaactgacttcctcaaacgagatcaataaggaaaagagcgacacagtcgccgacatcgagtccgagccagtggtggagtccactgagacggagggcacctag

SEQ ID NO: 182974 - DNA, 3816 bp, Artificial Sequence
  derived and/or modified sequence
atggaggccgtgaagaccttcaacagcgagctgtacagcctgaacgactacaagccccccatcagcaaggccaagatgacccagatcaccaaggccgccatcaaggccatcaagttctacaagcacgtggtgcagagcgtggagaagttcatccagaagtgcaagcccgagtacaaggtgcccggcctgtacgtgatcgacagcatcgtgagacagagcagacaccagttcggccaggagaaggacgtgttcgcccccagattcagcaacaacatcatcagcaccttccagaacctgtacagatgccccggcgacgacaagagcaagatcgtgagagtgctgaacctgtggcagaagaacaacgtgttcaagagcgagatcatccagcccctgctggacatggccgccggcatccccccccccgtggtgacccccgtgctggccagcaccaccaccgccatgagcaacacccccggcacccccgtgacccccgtgacccccgccaacgtggtgcagggcctgcccgacccctgggtgagccagatcaccaacaccgacaccctggccgccgtggcccagatcctgcagagcccccagggccagcagctgcagcagctgatccagaccctgcagatccagcagcagaagccccagcccagcatcctgcaggccctggacgccggcctggtggtgcagctgcaggccctgaccgcccagctgaccgccgccgccgccgccgccaacaccctgacccccctggagcagggcgtgagcttcaacaagaagctgatggacagattcgacttcggcgaggacagcgagcacagcgaggagcccaagaaggagatccccgccagccagctgagccacgtgagcgagagcgtgaacaacagcatcttccaccagatcgccgagcagctgcagcagcagaacctggagcacctgagacagcagctgctggagcagcagcagccccagaaggccaccccccaggacagccaggagggcaccttcggcagcgagcacagcgccagccccagccagggcagcagccagcagcacttcctggagcccgaggtgaacctggacgacagcatcgacatccagcagcaggacatggacatcgacgagggccaggacggcgtggaggaggaggtgttcgagcaggaggccaagaaggtggccgtgagaagcagaagcagaacccacagcagaagcagaagcagaagccccagaaagagaagaagcagaagcagaagcggcagcagaaagagaaagcacagaaagagaagcagaagcagaagcagagagagaaagagaaagagcagcagaagctacagcagcgagagaagagccagagagagagagaaggagagacagaagaagggcctgccccccatcagaagcaagaccctgagcgtgtgcagcaccaccctgtgggtgggccaggtggacaagaaggccacccagcaggacctgaccaacctgttcgaggagttcggccagatcgagagcatcaacatgatcccccccagaggctgcgcctacgtgtgcatggtgcacagacaggacgccttcagagccctgcagaagctgagcagcggcagctacaagatcggcagcaaggtgatcaagatcgcctgggccctgaacaagggcgtgaagaccgagtacaagcagttctgggacgtggacctgggcgtgacctacatcccctgggagaaggtgaaggtggacgacctggagggcttcgccgagggcggcatgatcgaccaggagaccgtgaacaccgagtgggagaccgtgaagagcagcgagcccgtgaaggagaccgtgcagaccacccagagccccacccccgtggagaaggagaccgtggtgaccacccaggccgaggtgttccccccccccgtggccatgctgcagatccccgtggcccccgccgtgcccaccgtgagcctggtgccccccgccttccccgtgagcatgcccgtgcccccccccggcttcagccccatcccccccccccccttcctgagagccagcttcaaccccagccagcccccccccggcttcatgcccccccccgtgcccccccccgtggtgcccccccccaccatcccccccgtggtgcccaccagcctggtgcagcccagcctgagcatgacccccgagaccgtgaaggacgtgggcttcggcagcctggtgatccccggcggcagcgtggccagcaacctggccaccagcgccctgcccgccggcaacgtgttcaacgcccccaccaagcaggccgagcccgaggagaaggtgccccacctgatcgaccaccagatcagcagcggcgagaacaccagaagcgtgatccccaacgacatcagcagcaacgccgccatcctgggcggccagccccccaacgtgaccagcaacagcggcatcctgggcgtgcagagacccaacgtgagcagcaacagcgagatcctgggcgtgagacccagcaacgtgagcagcagcagcggcatcatcgccgcccagccccccaacatcctgaacaacagcggcatcctgggcatccagccccccagcgtgagcaacagcagcggcctgctgggcgtgctgccccccaacatccccaacaacagcggcctggtgggcgtgcagccccccaacgtgcccaacacccccggcctgctgggcacccagccccccgccggcccccagaacctgccccccctgagcatccccaaccagagaatgcccaccatgcccatgctggacatcagacccggcctgatcccccaggcccccggccccagattccccctgatccagcccggcatccccccccagagaggcatccccccccccagcgtgctggacagcgccctgcaccccccccccagaggccccttcccccccggcgacatcttcagccagcccgagagacccttcctggcccccggcagacagagcgtggacaacgtgaccaaccccgagaagagaatccccctgggcaacgacaacatccagcaggagggcgacagagactacagattcccccccatcgagaccagagagagcatcagcagacccccccccgtggacgtgagagacgtggtgggcagacccatcgaccccagagagggccccggcagaccccccctggacggcagagaccacttcggcagaccccccgtggacatcagagagaacctggtgagacccggcatcgaccacctgggcagaagagaccacttcggcttcaaccccgagaagccctggggccacagaggcgacttcgacgagagagagcacagagtgctgcccgtgtacggcggccccaagggcctgcacgaggagagaggcagattcagaagcggcaactacagattcgaccccagaagcggcccctggaacagaggcttcggccaggaggtgcacagagacttcgacgacagaagaagaccctgggagagacagagagacagagacgacagagacttcgacttctgcagagagatgaacggcaacagactgggcagagacagaatccagaacacctgggtgccccccccccacgccagagtgttcgactacttcgagggcgccaccagccagagaaagggcgacaacgtgccccaggtgaacggcgagaacaccgagagacacgcccagcccccccccatccccgtgcagaacgaccccgagctgtacgagaagctgaccagcagcaacgagatcaacaaggagaagagcgacaccgtggccgacatcgagagcgagcccgtggtggagagcaccgagaccgagggcacctag

SEQ ID NO: 182975 - DNA, 4014 bp, Artificial Sequence
  derived and/or modified sequence
atgccccagcccctgctgcccgccctgccccccctgagcagccccagcggcgccggcagctgcggccccagcggcggcgagtgcagcggcagaagactgttcagaagaagagccagaggcctgagaagcgacaacatggaggccgtgaagaccttcaacagcgaggactgcgccagcacccccgcctgcaccgactgcttcagcagcagcatggacaccagaagcatcctgtacagcctgaacgactacaagccccccatcagcaaggccaagatgacccagatcaccaaggccgccatcaaggccatcaagttctacaagcacgtggtgcagagcgtggagaagttcatccagaagtgcaagcccgagtacaaggtgcccggcctgtacgtgatcgacagcatcgtgagacagagcagacaccagttcggccaggagaaggacgtgttcgcccccagattcagcaacaacatcatcagcaccttccagaacctgtacagatgccccggcgacgacaagagcaagatcgtgagagtgctgaacctgtggcagaagaacaacgtgttcaagagcgagatcatccagcccctgctggacatggccgccggcatccccccccccgtggtgacccccgtgctggccagcaccaccaccgccatgagcaacacccccggcacccccgtgacccccgtgacccccgccaacgtggtgcagggcctgcccgacccctgggtgagccagatcaccaacaccgacaccctggccgccgtggcccagatcctgcagagcccccagggccagcagctgcagcagctgatccagaccctgcagatccagcagcagaagccccagcccagcatcctgcaggccctggacgccggcctggtggtgcagctgcaggccctgaccgcccagctgaccgccgccgccgccgccgccaacaccctgacccccctggagcagggcgtgagcttcaacaagaagctgatggacagattcgacttcggcgaggacagcgagcacagcgaggagcccaagaaggagatccccgccagccagctgagccacgtgagcgagagcgtgaacaacagcatcttccaccagatcgccgagcagctgcagcagcagaacctggagcacctgagacagcagctgctggagcagcagcagccccagaaggccaccccccaggacagccaggagggcaccttcggcagcgagcacagcgccagccccagccagggcagcagccagcagcacttcctggagcccgaggtgaacctggacgacagcatcgacatccagcagcaggacatggacatcgacgagggccaggacggcgtggaggaggaggtgttcgagcaggaggccaagaaggtggccgtgagaagcagaagcagaacccacagcagaagcagaagcagaagccccagaaagagaagaagcagaagcagaagcggcagcagaaagagaaagcacagaaagagaagcagaagcagaagcagagagagaaagagaaagagcagcagaagctacagcagcgagagaagagccagagagagagagaaggagagacagaagaagggcctgccccccatcagaagcaagaccctgagcgtgtgcagcaccaccctgtgggtgggccaggtggacaagaaggccacccagcaggacctgaccaacctgttcgaggagttcggccagatcgagagcatcaacatgatcccccccagaggctgcgcctacgtgtgcatggtgcacagacaggacgccttcagagccctgcagaagctgagcagcggcagctacaagatcggcagcaaggtgatcaagatcgcctgggccctgaacaagggcgtgaagaccgagtacaagcagttctgggacgtggacctgggcgtgacctacatcccctgggagaaggtgaaggtggacgacctggagggcttcgccgagggcggcatgatcgaccaggagaccgtgaacaccgagtgggagaccgtgaagagcagcgagcccgtgaaggagaccgtgcagaccacccagagccccacccccgtggagaaggagaccgtggtgaccacccaggccgaggtgttccccccccccgtggccatgctgcagatccccgtggcccccgccgtgcccaccgtgagcctggtgccccccgccttccccgtgagcatgcccgtgcccccccccggcttcagccccatcccccccccccccttcctgagagccagcttcaaccccagccagcccccccccggcttcatgcccccccccgtgcccccccccgtggtgcccccccccaccatcccccccgtggtgcccaccagcctggtgcagcccagcctgagcatgacccccgagaccgtgaaggacgtgggcttcggcagcctggtgatccccggcggcagcgtggccagcaacctggccaccagcgccctgcccgccggcaacgtgttcaacgcccccaccaagcaggccgagcccgaggagaaggtgccccacctgatcgaccaccagatcagcagcggcgagaacaccagaagcgtgatccccaacgacatcagcagcaacgccgccatcctgggcggccagccccccaacgtgaccagcaacagcggcatcctgggcgtgcagagacccaacgtgagcagcaacagcgagatcctgggcgtgagacccagcaacgtgagcagcagcagcggcatcatcgccgcccagccccccaacatcctgaacaacagcggcatcctgggcatccagccccccagcgtgagcaacagcagcggcctgctgggcgtgctgccccccaacatccccaacaacagcggcctggtgggcgtgcagccccccaacgtgcccaacacccccggcctgctgggcacccagccccccgccggcccccagaacctgccccccctgagcatccccaaccagagaatgcccaccatgcccatgctggacatcagacccggcctgatcccccaggcccccggccccagattccccctgatccagcccggcatccccccccagagaggcatccccccccccagcgtgctggacagcgccctgcaccccccccccagaggccccttcccccccggcgacatcttcagccagcccgagagacccttcctggcccccggcagacagagcgtggacaacgtgaccaaccccgagaagagaatccccctgggcaacgacaacatccagcaggagggcgacagagactacagattcccccccatcgagaccagagagagcatcagcagacccccccccgtggacgtgagagacgtggtgggcagacccatcgaccccagagagggccccggcagaccccccctggacggcagagaccacttcggcagaccccccgtggacatcagagagaacctggtgagacccggcatcgaccacctgggcagaagagaccacttcggcttcaaccccgagaagccctggggccacagaggcgacttcgacgagagagagcacagagtgctgcccgtgtacggcggccccaagggcctgcacgaggagagaggcagattcagaagcggcaactacagattcgaccccagaagcggcccctggaacagaggcttcggccaggaggtgcacagagacttcgacgacagaagaagaccctgggagagacagagagacagagacgacagagacttcgacttctgcagagagatgaacggcaacagactgggcagagacagaatccagaacacctgggtgccccccccccacgccagagtgttcgactacttcgagggcgccaccagccagagaaagggcgacaacgtgccccaggtgaacggcgagaacaccgagagacacgcccagcccccccccatccccgtgcagaacgaccccgagctgtacgagaagctgaccagcagcaacgagatcaacaaggagaagagcgacaccgtggccgacatcgagagcgagcccgtggtggagagcaccgagaccgagggcacctag

SEQ ID NO: 182976 - protein, 816 aa, Artificial Sequence
  derived and/or modified sequence
MLRPQGLLWLPLLFTSVCVMLNSNVLLWITALAIKFTLIDSQAQYPVVNTNYGKIQGLRTPLPSEILGPVEQYLGVPYASPPTGERRFQPPESPSSWTGIRNATQFSAVCPQHLDERFLLHDMLPIWFTTSLDTLMTYVQDQNEDCLYLNIYVPMEDDIHEQNSKKPVMVYIHGGSYMEGTGNMIDGSILASYGNVIVITINYRLGILGFLSTGDQAAKGNYGLLDQIQALRWIEENVGAFGGDPKRVTIFGSGAGASCVSLLTLSHYSEGLFQKAIIQSGTALSSWAVNYQPAKYTRILADKVGCNMLDTTDMVECLKNKNYKELIQQTITPATYHIAFGPVIDGDVIPDDPQILMEQGEFLNYDIMLGVNQGEGLKFVDGIVDNEDGVTPNDFDFSVSNFVDNLYGYPEGKDTLRETIKFMYTDWADKENPETRRKTLVALFTDHQWVAPAVATADLHAQYGSPTYFYAFYHHCQSEMKPSWADSAHGDEVPYVFGIPMIGPTELFSCNFSKNDVMLSAVVMTYWTNFAKTGDPNQPVPQDTKFIHTKPNRFEEVAWSKYNPKDQLYLHIGLKPRVRDHYRATKVAFWLELVPHLHNLNEIFQYVSTTTKVPPPDMTSFPYGTRRSPAKIWPTTKRPAITPANNPKHSKDPHKTGPEDTTVLIETKRDYSTELSVTIAVGASLLFLNILAFAALYYKKDKRRHETHRHPSPQRNTTNDITHIQNEEIMSLQMKQLEHDHECESLQAHDTLRLTCPPDYTLTLRRSPDDIPFMTPNTITMIPNTLMGMQPLHTFKTFSGGQNSTNLPHGHSTTRV

SEQ ID NO: 182977 - DNA, 2451 bp, Artificial Sequence
  derived and/or modified sequence
atgctgagaccccagggcttactgtggttacccctcttatttaccagtgtctgcgtgatgctcaacagtaatgttctcctatggatcaccgctttggccattaaatttacgctgatcgacagccaagctcaatatcccgtggtaaacacaaactatggcaagattcagggactgcggaccccacttccctctgagatcctcgggccggtggagcaatacctcggcgttccatatgcatctcctcctactggtgagcggcggttccagcctcctgaaagccccagttcttggaccgggatacgaaatgccacacagttcagcgccgtatgtcctcaacacttagatgagcgtttcctgctgcatgatatgctgcccatatggttcacgaccagcctggatactctgatgacctacgtgcaagaccagaatgaagattgcctttatctcaacatatacgtgcccatggaggatgacattcacgaacagaattccaaaaaacccgtgatggtttacatccatgggggctcatatatggaggggaccggtaacatgatcgacggcagcatccttgcttcatacgggaacgtcatcgtgataaccatcaactatcgtcttggtatcttgggcttcctgagcaccggcgatcaggccgcaaaggggaactacggactgctcgatcagatacaggccctgagatggatagaggaaaacgtgggtgcgttcggaggcgaccccaaacgggtaaccatcttcggaagtggggcgggcgcctcctgcgtgtcattactgacgttgtcacactactcagaaggcctgttccagaaagcaatcattcaatctgggactgcactttctagctgggccgttaactaccagccagccaagtatacacgaatactggccgacaaggtggggtgtaatatgcttgataccacagacatggtggagtgcctcaaaaataagaattataaggagctgatccagcagacaattacccctgctacctatcacattgctttcgggcctgtgattgacggcgacgtcattcctgatgaccctcagatacttatggagcagggcgagttcttaaattatgatattatgctgggggtgaatcagggggaaggcctgaagttcgtcgatggaattgtggacaatgaggacggtgtcacacctaatgactttgattttagcgtgtctaacttcgttgacaatctgtacgggtatcccgagggaaaagatacactgagagagacaatcaagtttatgtataccgactgggccgacaaggaaaatcctgaaacaagaagaaagaccctcgtcgctctgtttaccgatcaccagtgggtggccccagcggtggccacggccgacttacacgcccagtatggctcccccacatacttttacgccttctaccaccactgtcagtctgagatgaagccttcctgggccgattctgcacacggggatgaggttccctacgtcttcggcatcccaatgatcggacctacggaactgttcagctgcaacttttccaaaaatgacgtgatgctttctgctgtcgtgatgacttattggactaactttgctaaaacgggagatccaaatcagcccgtgccccaggatactaagttcattcacactaaaccaaatcgcttcgaagaagtggcttggagcaaatataacccaaaggatcagctgtacttgcacataggactgaaacctcgcgtgcgcgatcattaccgcgcaactaaggtggcattctggctcgaactggtgccccatcttcataacctaaacgagatcttccagtacgtctctactaccaccaaggtaccaccccctgatatgaccagctttccgtacgggacccgaagaagcccagcaaagatatggccgaccaccaagcggcccgcaattactcccgctaataatccaaagcactccaaagatcctcacaaaaccgggcctgaagacaccaccgtcctgatagaaacaaagcgggattattccacagaactgtctgtaacgattgcagtgggggctagccttctgttcctgaacattctagcttttgccgctctatactacaaaaaggacaagaggcggcatgagacccacagacatcccagcccgcaaaggaacacgactaacgatatcacccatattcagaacgaggagataatgagtctgcaaatgaaacaactggagcacgaccatgagtgcgagtccttgcaggctcacgacaccctccgactaacgtgtccccctgattataccctcactctgagacggtccccggacgatatcccattcatgacacccaacacaattactatgattcccaacacgcttatgggcatgcaacccctccatactttcaagaccttttctggtggtcaaaactcaacaaacttgcctcatggacattctacaacaagggtgtag

SEQ ID NO: 182978 - DNA, 2451 bp, Artificial Sequence
  derived and/or modified sequence
atgctgcgacctcagggactgctgtggctgcctctgctgttcacaagcgtctgcgtaatgcttaacagtaacgttctgctgtggattaccgcactggccatcaaatttaccctgattgatagccaggcacagtaccccgtggttaatactaattatggtaaaattcagggccttcgcacccccctgccatctgagatcctcgggcctgtcgaacagtatttgggcgtaccttatgcatccccccccacgggagagagaagattccaaccgcccgagtcccccagtagctggacagggattcgcaacgctacccagtttagtgcagtctgtccccaacatctggacgagagattccttctgcacgatatgctaccgatatggtttacaaccagtctggacacgttgatgacgtacgttcaggatcagaatgaggattgcctttacctgaatatctacgtccccatggaagacgatatccatgaacagaatagcaaaaagcccgtgatggtttacattcatggtggatcctacatggaaggaaccggaaacatgatcgatgggtctatcctggcttcctatggtaacgttatcgttattacaattaattaccgcctgggtatcctcggattcctgtccactggcgatcaggctgcaaaagggaattacggactgcttgatcagatacaggccctcaggtggattgaggagaacgtgggggcctttggaggagaccccaagagagttacaatttttggctctggagcgggagcctcatgtgtttccctgttaaccctttctcactactctgagggattgttccagaaggccatcatccagtcaggcactgctttgagtagctgggccgtgaattatcagcctgctaagtataccaggatcttagccgacaaagtagggtgtaatatgcttgatactacagacatggtggaatgcctgaaaaacaaaaactataaggagttaatccagcaaactattaccccagctacataccacattgcctttggacccgtgatcgacggtgacgtcatccctgatgacccacagatcctgatggaacagggagagttcctcaactacgacatcatgctgggagtgaaccagggggaggggctgaagttcgtggatggcattgtggataacgaagacggtgtgactcccaacgacttcgacttttccgtctctaactttgtggacaatctctacggctatcccgagggcaaggataccctccgcgaaactatcaagttcatgtatactgattgggctgataaagaaaatccagagacaaggaggaagactctggttgcgctgtttacggaccaccagtgggttgcaccagccgtggctacagccgatctccatgcccaatatgggagccccacttatttttatgcattttaccaccattgccaatctgaaatgaaaccaagctgggcggactctgcacatggggacgaggtaccgtacgtattcgggatcccaatgatagggcccaccgagctgtttagctgcaattttagcaaaaatgatgtgatgctatctgccgtggtaatgacatactggacaaacttcgccaaaacgggagacccaaatcagccagtgccgcaggatacaaagtttattcacaccaaacccaacaggttcgaagaggtcgcctggtctaagtacaatcccaaggatcagttatacctgcatataggcctgaaaccacgcgtcagggatcactatcgtgccacgaaagttgcattttggctggagctggtgccacacctgcacaacctgaacgaaatcttccaatacgtttctaccactacaaaggtgcctccgcccgatatgaccagcttcccatatgggacaaggaggagtcccgctaagatctggcctacaaccaaacgccccgccataacacccgcaaataaccctaagcactctaaagacccccataaaacaggacccgaggacactactgtgctcatcgaaacaaagcgtgactacagcactgagctgagtgtgactattgcagtaggagctagccttttatttctaaacattctcgcctttgcggcgctttactacaagaaagacaagcggcgccacgagactcatcggcatcccagtcctcagaggaatactaccaatgacatcacccacatacagaacgaagaaattatgtctctgcagatgaagcagctggagcacgatcacgaatgtgaaagcctgcaggcacacgatactctccgcctgacctgccctccagattatactctcacactcaggcggagtccagacgacatcccctttatgaccccaaatactataaccatgatcccaaacaccctgatgggaatgcagccgttacacaccttcaaaactttcagcggcgggcagaattcaactaatcttccgcacggacattctacaaccagagtgtag

SEQ ID NO: 182979 - DNA, 2451 bp, Artificial Sequence
  derived and/or modified sequence
atgctgcggccccagggcctgctgtggctgcccctgctcttcacctctgtgtgtgtgatgctgaacagcaatgtgctgctgtggatcacagccctggccatcaagttcaccctgattgacagccaggcccagtaccctgtggtgaacaccaactacggcaagatccagggcctgcggacccccctgcccagcgagatcctgggccctgtggagcagtacctgggcgtgccctatgccagccccccaactggagagcggcgcttccagcccccagagagccccagctcctggacaggcatcagaaatgccacccagttctctgctgtgtgcccccagcacctggatgagcgcttcctgctgcatgacatgctgcccatctggttcaccaccagcctggacaccctgatgacctacgtgcaggaccagaatgaagactgcctgtacctgaacatctacgtgcccatggaggatgacatccacgagcagaacagcaagaagcctgtgatggtgtacatccatggaggcagctacatggagggcactggaaacatgattgatggcagcatcctggccagctatggaaatgtgattgtcatcaccatcaactaccgcctgggcatcctgggcttcctgagcactggagaccaggccgccaagggcaactacggcctgctggaccagatccaggccctgcgctggattgaggagaatgtgggcgcctttggaggagaccccaagagggtgaccatctttggaagtggagctggggccagctgtgtgtccctgctgaccctgagccactacagcgagggcctcttccagaaggccatcatccagagcggcacagccctgagctcctgggccgtgaactaccagcctgccaagtacacccgcatcctggccgacaaggtgggctgcaacatgctggacaccacagacatggtggagtgcctgaagaacaagaactacaaggagctgatccagcagaccatcaccccagccacctaccacatcgccttcggccctgtgattgatggagatgtgatcccagatgacccccagatcctgatggagcagggcgagttcctgaactatgacatcatgctgggcgtgaaccagggcgagggcctgaagtttgtggatggcatcgtggacaatgaagatggagtgaccccaaatgactttgacttctctgtgagcaactttgtggacaacctgtatggctacccagagggcaaggacaccctgcgggagaccatcaagttcatgtacacagactgggccgacaaggaaaatcctgagaccaggaggaagaccctggtggccctcttcacagaccaccagtgggtggccccagctgtggccacagctgacctgcacgcccagtatggcagccccacctacttctacgccttctaccaccactgccagagcgagatgaagcccagctgggccgacagcgcccatggagatgaggtgccctacgtgtttggcatccccatgattggccccacagagctgttcagctgcaacttcagcaagaatgatgtgatgctgtctgctgtggtgatgacctactggaccaactttgccaagacaggagaccccaaccagcctgtgccccaggacaccaagttcatccacaccaagcccaacagatttgaggaggtggcctggagcaagtacaaccccaaggaccagctgtacctgcacatcggcctgaagccccgggtgcgggaccactaccgggccaccaaggtggccttctggctggagctggtgccccacctgcacaacctgaatgagatcttccagtatgtgtccaccaccaccaaggtgcccccaccagacatgaccagcttcccctacggcacccggcgcagccctgccaagatctggcccaccaccaagaggcctgccatcaccccagccaacaaccccaagcacagcaaggacccccacaagacaggccctgaggacaccaccgtgctgattgagaccaagagggactacagcacagagctgtctgtgaccatcgctgtgggcgccagcctgctcttcctgaacatcctggcctttgctgccctgtactacaagaaggacaagagaagacatgagacccaccgccaccccagcccccagaggaacaccaccaatgacatcacccacatccagaatgaggagatcatgagcctgcagatgaagcagctggagcatgaccatgaatgtgagagcctgcaggcccatgacaccctgcggctgacctgccccccagactacaccctgaccctgcggcgcagcccagatgacatccccttcatgacccccaacaccatcaccatgatccccaacaccctgatgggcatgcagcccctgcacaccttcaagaccttcagcggcggccagaacagcaccaacctgccccacggccacagcaccaccagggtgtag

SEQ ID NO: 182980 - DNA, 2451 bp, Artificial Sequence
  derived and/or modified sequence
atgctgcggccccagggcctgctgtggctgcccctgctgttcaccagcgtgtgtgttatgcttaactctaatgttctgttatggatcactgcactcgccatcaagtttactttaatcgacagtcaagcccagtacccggtggttaacacgaactacggcaagatccaaggcctccgaacaccactcccgtctgaaatcctggggccggtggaacagtaccttggagtgccttacgcttccccaccaaccggagaaaggaggtttcagcctcccgaatcgccatctagctggactggcattagaaacgcaacccaattttcagctgtgtgtccacaacacctggacgaacggttcctgctgcacgatatgctgcctatctggtttaccacatcactcgacacattaatgacatacgtccaagatcagaacgaagactgcctgtatctgaatatctacgtcccgatggaggacgatatacatgagcagaacagcaaaaaacccgtgatggtgtatattcacggtgggagttacatggaaggtacaggcaacatgattgatggctcaatcttggccagttatgggaatgtcattgttataaccattaattatcgactgggaatattgggttttctttctaccggcgaccaagctgcaaaaggaaactacgggctgctcgaccagatccaggcattgcgctggattgaagaaaatgtaggggccttcggcggcgaccctaaacgcgttacaatcttcggaagtggcgccggcgccagttgtgtcagcctcctgactttgtcgcattatagcgaaggactcttccagaaggccattatccagagtggaactgcactctccagctgggccgtgaattaccaacccgccaagtataccagaatcctagctgacaaagtagggtgcaatatgctcgatacaacagacatggtggagtgcctcaaaaacaagaactataaggaacttattcagcaaacaatcacgccagcaacgtaccacattgcctttggacccgtgatcgatggtgatgttatcccagatgaccctcagattctcatggaacagggcgaattccttaactatgacattatgttgggagtcaaccaaggagagggtcttaagttcgttgatgggatcgtcgataatgaggacggggtgacccctaatgatttcgacttcagcgtgagcaattttgtggataatctgtacgggtatccagaaggcaaggacactctgcgggagaccattaagtttatgtacactgattgggccgacaaggagaaccctgagacacgtcggaagactctggttgccttgtttaccgaccatcaatgggtcgcacctgcggtggccaccgctgatttgcacgcccagtatggtagccctacctacttctatgctttctaccaccactgtcagtcagagatgaagccaagttgggctgattcagcgcatggcgatgaggtaccttatgtcttcggaattccaatgatcggccccaccgagttgtttagctgcaacttttccaaaaacgacgtgatgctgagcgccgtggtgatgacatattggaccaacttcgcgaaaaccggggatccaaatcagccggtacctcaggacaccaagtttatccacacgaagcctaacagatttgaagaggtcgcctggtcaaaatacaatcccaaagatcagctgtacctgcatattggcctgaaacctcgcgtacgcgatcactatagagctactaaggtagccttctggctggagctggtccctcatttacacaatcttaatgagattttccagtatgtgagcacaaccaccaaggtgcctcctccggatatgaccagtttcccttatggcactcgccggtctccagccaagatttggcccaccacaaagcggccagccataactccggctaataatccaaagcactccaaggacccacacaaaacaggccccgaagacaccacagttctcatcgaaaccaagagagactattcaaccgaactcagtgtgacaatcgccgtgggcgccagtctactgtttctgaacattttggcttttgctgccctttattataaaaaagataagcgacggcatgagactcacagacaccccagtccgcaacggaacacgactaatgacataacccacatccaaaacgaagagatcatgtcattacagatgaagcagctcgagcatgatcacgagtgtgagtctctgcaggctcatgacacgctccgcctcacctgtcctccggactacactctgactttacggaggagtccagacgatatccctttcatgaccccgaatactatcaccatgatccccaatacgctcatgggaatgcagcccctacacaccttcaaaaccttcagcggcggccagaattcaacaaacttgccacacgggcattcgactacccgcgtgtag

SEQ ID NO: 182981 - DNA, 2451 bp, Artificial Sequence
  derived and/or modified sequence
atgctgcggccccagggcctgctgtggctgcccctgctgttcacctccgtttgcgtcatgctgaatagtaatgtgctgctttggattaccgcgcttgcaataaaattcaccctgatcgattcgcaagcccaatatcctgtggtgaatacaaattacgggaagatacaggggcttagaactcctctaccctccgaaattctgggccctgttgaacagtaccttggggttccatatgcaagcccccctactggagaaagaagatttcaacccccagaaagtcctagtagctggactggcataagaaatgcaacccagtttagcgcagtgtgccctcaacacctggatgaacggtttctgcttcacgatatgttgccaatatggttcaccacttctcttgataccctaatgacctacgtgcaggaccagaatgaggattgcctttacctgaatatatacgtacccatggaagacgatatccacgaacagaatagtaagaaaccggtgatggtatacattcatggcggctcctacatggagggcacaggtaatatgattgatggcagcatcctggctagctatggcaatgtcatcgtgattactatcaattatcgcctgggtatcctggggttcctttctacgggagatcaagcagccaaagggaattatggactgcttgaccaaatccaggccctgagatggatcgaagagaacgtgggtgcatttgggggggatcctaaaagagtgactattttcggatccggagctggggcctcatgtgtttcgctgttgacgctgagtcactatagcgagggcctctttcagaaggcaataattcagtcgggtaccgccttgtcttcctgggctgtaaactatcaaccagccaaatatacaagaatcttagccgataaggttggttgtaatatgctcgacacaaccgatatggtggaatgcttaaagaataaaaactacaaggagctcatacagcaaacgatcacaccagctacctaccacattgcatttgggcccgtcatcgacggggatgttattccagacgacccgcagattctgatggaacagggggagtttctaaactatgacatcatgttgggagtgaaccagggtgaaggcctgaaattcgttgacggtatcgtggataatgaagacggagttactccaaatgacttcgatttttccgtctctaacttcgttgacaacctatatggctatccagagggcaaggacactctgagggagaccatcaagttcatgtatactgactgggccgacaaggaaaatcccgaaacccgaaggaagaccctcgttgctctgttcactgatcaccaatgggtcgcccctgctgtggccaccgctgacttgcacgcacagtacggcagtcctacctatttctatgcattctatcaccattgtcagtctgagatgaagccgtcttgggcagattcagcacacggagatgaggtgccatatgtcttcgggatccctatgataggaccaaccgaattattctcatgtaatttcagcaagaatgatgttatgctgtcagccgtggtcatgacgtactggacaaactttgccaagacaggagatcctaaccagcccgtgccacaagatacaaaattcatccatactaagcctaatcgctttgaggaggtggcctggagcaaatacaatcctaaggatcaactttatcttcacatcggactgaagcctcgggtgagggatcactatcgagctactaaggtggccttttggttggagctggtgccccatctccacaacttaaacgagattttccaatacgtctccactaccacaaaggtgcctccacctgacatgacctcgtttccatacgggacccgcaggtctcctgcgaaaatctggccaacaaccaaaagacctgctatcacgcctgcaaataaccctaagcactctaaggaccctcacaagaccggtccagaggacacgaccgtcttaatcgaaacgaagagagattattccacagagctgagtgttactattgcagtcggtgctagccttctcttcctgaatatactggcctttgccgcactgtactacaagaaagataaaaggcgtcacgaaactcatagacaccccagcccccaaaggaacaccactaacgatataactcatatccaaaatgaggagattatgagccttcagatgaaacagctagagcacgaccatgagtgtgaaagcttgcaggcgcacgatactcttagattaacctgccctcccgactatacccttacactgcggagatccccggatgatataccctttatgacaccgaacacaatcacaatgatccccaacaccctgatgggtatgcagcccctccacacatttaaaacgttttctgggggacaaaactctaccaacctcccacacggacattccacaacacgagtgtag

SEQ ID NO: 182982 - DNA, 5310 bp, Artificial Sequence
  derived and/or modified sequence
gagacgaagcagggagagagtgaacttcagccccgtcccctccccactgccacggctggggcaacccaacccgcgcctgaagcggcttggcttgacctgcggaagcgcgggccgggatggcgtggggagagggaggtaggtgccactgggctgcagatgacgagtgggttgggggcttgctgtgggacaagaggttcaggttccggcctgcgccttccactccgcggtggcgctctctgcctgcggttttccaggaggccgatctaccccagggacactctcatccttcaggcggtctcctggacgccctttcctccccttgcctcccagcctgacctggctctttcgcccctcggagaaccggttgcattggagttttcgaaagacttatctttctgcaggctcgcctctgagctttgtctccttggagccacctcacttagacagcttcggatgtggatgcagatttgaaccatgttgcgtccccagggactgctatggctccctttgttgttcacctctgtctgtgtcatgttaaactccaatgttcttctgtggataactgctcttgccatcaagttcaccctcattgacagccaagcacagtatccagttgtcaacacaaattatggtaaaatccagggcctaagaacaccattacccagtgagatcttgggtccagtggagcagtacttaggggtcccctatgcctcacccccaactggagagaggcggtttcagccaccagaatccccatcctcctggactggcatccgaaatgctactcagttttctgctgtgtgcccccagcacctggatgaaagattcttattgcatgacatgctgcccatctggtttaccaccagtttggatactttgatgacctatgttcaagatcaaaatgaagactgcctttacttaaacatctatgtgcccatggaagatgatattcatgaacagaacagtaagaagcctgttatggtctatatccatgggggatcttacatggagggaaccggtaacatgattgatggcagcattttggccagctatgggaacgtcatcgttatcaccattaactaccgtctgggaatactagggtttttaagtaccggtgaccaggcagcaaaaggcaactatgggctcctggatcagattcaagcactgaggtggattgaggagaatgtcggagcctttggcggggaccccaagagagtgactatctttggctcgggggctggggcctcctgtgtcagcctgttgaccctgtcccactactcagaaggtctcttccagaaggccatcattcagagcggcactgccctgtccagctgggcagtgaactaccagccggccaagtacactcggatattggcagacaaggtcggctgcaacatgctggacaccacggacatggtagaatgtctgaagaacaagaactacaaggagctcatccagcagaccatcaccccggccacctaccacatagcctttgggccggtgatcgacggcgacgtcatcccagacgacccccagatcctgatggagcaaggcgagttcctcaactacgacatcatgctgggcgtcaaccaaggggaaggcctgaagttcgtggacggcatcgtggataacgaggacggtgtgacgcccaacgactttgacttctccgtgtccaacttcgtggacaacctttacggctaccctgaagggaaagacactttgcgggagactatcaagttcatgtacacagactgggccgataaggaaaacccggagacgcggcggaaaaccctggtggctctctttactgaccatcagtgggtggcccccgccgtggccaccgccgacctgcacgcgcagtacggctcccccacctacttctatgccttctatcatcactgccaaagcgaaatgaagcccagctgggcagattcggcccatggcgatgaagtcccctatgtcttcggcatccccatgatcggtcccacagagctcttcagttgtaatttctccaagaacgacgtcatgctcagtgccgtggtgatgacctactggacgaacttcgccaaaactggtgatccaaaccaaccagttcctcaggataccaagttcattcatacaaaacccaatcgctttgaagaagtggcctggtccaagtataatcccaaagaccagctctatctgcatattggcttgaaacccagagtgagagatcactaccgggcaacgaaagtggctttctggttggaattggttcctcatttgcacaacttgaacgagatattccagtatgtttcaacaaccacaaaggttcctccaccagacatgacatcatttccctatggcacccggcgatctcccgccaagatatggccaaccaccaaacgcccagcaatcactcctgccaacaatcccaaacactctaaggaccctcacaaaacagggcccgaggacacaactgtcctcattgaaaccaaacgagattattccaccgaattaagtgtcaccattgccgtcggggcgtcgctcctcttcctcaacatcttagcctttgcggcgctgtactacaaaaaggacaagaggcgccatgagactcacaggcaccccagtccccagagaaacaccacaaatgatatcactcacatccagaacgaagagatcatgtctctgcagatgaagcagctggaacacgatcacgagtgtgagtcgctgcaggcacacgacacgctgaggctcacctgccctccagactacaccctcacgctgcgccggtcgccggatgacatcccatttatgacgccaaacaccatcaccatgattccaaacacattgatggggatgcagcctttacacacttttaaaaccttcagtggaggacaaaacagtacaaatttaccccacggacattccaccactagagtatagcttttccctatttcccctcctatccctctgcccctactgctcagcaatgtaaaagagacaaataaggagaaagaaaatctccaaaccaggaatgtttttgtgccactgactttagataaaaatgcaaaagggcagtcatcctgtcccagcagacccttctcattggcattttccagtattgtgagatcaatttctgaccatatgaaatgtgaaaagtatatgtttctgttacaatactgctttaagatctaaaccatgccaacagatgtttcgtgtgactaggacatcaccatttcaaggaactgtgtgtttccaacatcatggtagcagcacacacttccaaagctcagccagggacacttaatattttttaattacaatggaaatttaaacatttttatgtgggctacacaatggatggctcttcttaagtgaagaaagactctataggcttttacacagcacatgaagcagtaatccagaaagaaggaaatgcagaattttattatcaaagtaagcgaattgactgtgcagaaaaattgtagggttctgtggaaggaggtattctgccagcctgaactatatttaagaaactttgtaaaaaataaaaatgtatatagctgtgagctcaaacaaaaactgcagacaaacaaaaaagagaaaagcttttatttgtgttttcagtttgaaagaacttttagcaaggttgtgctttcaaacacatattagtcctaccaccttagttcctctacagcaaaagaggcttttcttcttaattacatgtaaacaaagacatgggattttctgacgtaagattttcatttgtaggaatatgtgatgtcaaatggaagactcagaagttttgtgtggcctatttctccctgtcaggttgcacagatgcatgtagagcattcttaggagaccattgttttagaaaactttgatttgtacatgttagttttcatgaaattgcaacacagagataggtcctaaaagtggaatgtatttaaaacttgttgaattagacacacacacacagacacacacaaagaatcagcagagaaaacaaaatacaagtcctgttctgtagttcttgccctttgaatatatttgggaagagttgcttcctatttcaggaccctgccaaaaaagaagaaagcttgcctttggtggggctatgccccttggagtaaatacagctctgtgttccctagcagctgccggaggatttggctgatgaagtacctgctcagcttagctaatcagattaaaggaagacatgtatgtcttttgtttaagcacctagtcccttatgtatcagtaaacaggtttttaaaaatcttttatgtcatttataggataaaacatatgcttgtctgaaaatatcaccttttgtggatttatctgatcaccaaataataaatattaagaagaatgggggaaaaaggatagaatattaaaactgctttgcataggtttttggggaaattaggatatcttcactgacaagacactgaatggaatttattcacccattttaaattggttacttggggatcagagatttgtctctccaacagcttgtggttttcttattactcattttcaggaaagtttgtagtattacaaggcagaaggaaacacagtagcaatggttgctctatattttgtctttcaaagattactgcattaccaagaaacagtagccaaagatgtttgaagatcatgtcccttagctgcattgtgggttattctagaaatccaatgttaaatgcctctactaaagtggggattccccataaaaattgtccagctacctgactcttttgcaataacaactttgattactgaatccatacactcaaactatagtgatatatcagtgtttgggagtgacctctagaaaaaagaaaactgtttttagaaatacataaaatcacttccaaatcctgttgcttatgttgggttaaatttgaaagcaattctctatatataaatatgtgaaatattatgatctgaacttagcacacatgaagcaacatttctttgctacacagaggtgtcttggaaagatttcattcccaattcatttttcatagatctataatcaggcaatttctgcaagcaatgtatgaccccacctgagcaaccacaaataggctctccatgaaactgcaaaggaactgatgtgtggcatccatgctggttttgtctgtctataatatgaattcaagtatctgttcatatttccaattgtctcctgctagcaatatgtgccacaacatgacagtcttgtgacatcttaaggaaaagaagagttcctgttaaatgaatagctttagcttttacaggggattatgattaaaagtgatttagtacatctta

SEQ ID NO: 182983 - DNA, 5167 bp, Artificial Sequence
  derived and/or modified sequence
tttttttcccttccttcatctcctggcctcggataagataaggcttgggggatgcacgaaataatccaagtgattgattagacctggcatggcttggttgggctggagaaagatcggggcgcgctggaaaccccgcgtgaagatgaaatgactttttcgaaagacttatctttctgcaggctcgcctctgagctttgtctccttggagccacctcacttagacagcttcggatgtggatgcagatttgaaccatgttgcgtccccagggactgctatggctccctttgttgttcacctctgtctgtgtcatgttaaactccaatgttcttctgtggataactgctcttgccatcaagttcaccctcattgacagccaagcacagtatccagttgtcaacacaaattatggtaaaatccagggcctaagaacaccattacccagtgagatcttgggtccagtggagcagtacttaggggtcccctatgcctcacccccaactggagagaggcggtttcagccaccagaatccccatcctcctggactggcatccgaaatgctactcagttttctgctgtgtgcccccagcacctggatgaaagattcttattgcatgacatgctgcccatctggtttaccaccagtttggatactttgatgacctatgttcaagatcaaaatgaagactgcctttacttaaacatctatgtgcccatggaagatgatattcatgaacagaacagtaagaagcctgttatggtctatatccatgggggatcttacatggagggaaccggtaacatgattgatggcagcattttggccagctatgggaacgtcatcgttatcaccattaactaccgtctgggaatactagggtttttaagtaccggtgaccaggcagcaaaaggcaactatgggctcctggatcagattcaagcactgaggtggattgaggagaatgtcggagcctttggcggggaccccaagagagtgactatctttggctcgggggctggggcctcctgtgtcagcctgttgaccctgtcccactactcagaaggtctcttccagaaggccatcattcagagcggcactgccctgtccagctgggcagtgaactaccagccggccaagtacactcggatattggcagacaaggtcggctgcaacatgctggacaccacggacatggtagaatgtctgaagaacaagaactacaaggagctcatccagcagaccatcaccccggccacctaccacatagcctttgggccggtgatcgacggcgacgtcatcccagacgacccccagatcctgatggagcaaggcgagttcctcaactacgacatcatgctgggcgtcaaccaaggggaaggcctgaagttcgtggacggcatcgtggataacgaggacggtgtgacgcccaacgactttgacttctccgtgtccaacttcgtggacaacctttacggctaccctgaagggaaagacactttgcgggagactatcaagttcatgtacacagactgggccgataaggaaaacccggagacgcggcggaaaaccctggtggctctctttactgaccatcagtgggtggcccccgccgtggccaccgccgacctgcacgcgcagtacggctcccccacctacttctatgccttctatcatcactgccaaagcgaaatgaagcccagctgggcagattcggcccatggcgatgaagtcccctatgtcttcggcatccccatgatcggtcccacagagctcttcagttgtaatttctccaagaacgacgtcatgctcagtgccgtggtgatgacctactggacgaacttcgccaaaactggtgatccaaaccaaccagttcctcaggataccaagttcattcatacaaaacccaatcgctttgaagaagtggcctggtccaagtataatcccaaagaccagctctatctgcatattggcttgaaacccagagtgagagatcactaccgggcaacgaaagtggctttctggttggaattggttcctcatttgcacaacttgaacgagatattccagtatgtttcaacaaccacaaaggttcctccaccagacatgacatcatttccctatggcacccggcgatctcccgccaagatatggccaaccaccaaacgcccagcaatcactcctgccaacaatcccaaacactctaaggaccctcacaaaacagggcccgaggacacaactgtcctcattgaaaccaaacgagattattccaccgaattaagtgtcaccattgccgtcggggcgtcgctcctcttcctcaacatcttagcctttgcggcgctgtactacaaaaaggacaagaggcgccatgagactcacaggcaccccagtccccagagaaacaccacaaatgatatcactcacatccagaacgaagagatcatgtctctgcagatgaagcagctggaacacgatcacgagtgtgagtcgctgcaggcacacgacacgctgaggctcacctgccctccagactacaccctcacgctgcgccggtcgccggatgacatcccatttatgacgccaaacaccatcaccatgattccaaacacattgatggggatgcagcctttacacacttttaaaaccttcagtggaggacaaaacagtacaaatttaccccacggacattccaccactagagtatagcttttccctatttcccctcctatccctctgcccctactgctcagcaatgtaaaagagacaaataaggagaaagaaaatctccaaaccaggaatgtttttgtgccactgactttagataaaaatgcaaaagggcagtcatcctgtcccagcagacccttctcattggcattttccagtattgtgagatcaatttctgaccatatgaaatgtgaaaagtatatgtttctgttacaatactgctttaagatctaaaccatgccaacagatgtttcgtgtgactaggacatcaccatttcaaggaactgtgtgtttccaacatcatggtagcagcacacacttccaaagctcagccagggacacttaatattttttaattacaatggaaatttaaacatttttatgtgggctacacaatggatggctcttcttaagtgaagaaagactctataggcttttacacagcacatgaagcagtaatccagaaagaaggaaatgcagaattttattatcaaagtaagcgaattgactgtgcagaaaaattgtagggttctgtggaaggaggtattctgccagcctgaactatatttaagaaactttgtaaaaaataaaaatgtatatagctgtgagctcaaacaaaaactgcagacaaacaaaaaagagaaaagcttttatttgtgttttcagtttgaaagaacttttagcaaggttgtgctttcaaacacatattagtcctaccaccttagttcctctacagcaaaagaggcttttcttcttaattacatgtaaacaaagacatgggattttctgacgtaagattttcatttgtaggaatatgtgatgtcaaatggaagactcagaagttttgtgtggcctatttctccctgtcaggttgcacagatgcatgtagagcattcttaggagaccattgttttagaaaactttgatttgtacatgttagttttcatgaaattgcaacacagagataggtcctaaaagtggaatgtatttaaaacttgttgaattagacacacacacacagacacacacaaagaatcagcagagaaaacaaaatacaagtcctgttctgtagttcttgccctttgaatatatttgggaagagttgcttcctatttcaggaccctgccaaaaaagaagaaagcttgcctttggtggggctatgccccttggagtaaatacagctctgtgttccctagcagctgccggaggatttggctgatgaagtacctgctcagcttagctaatcagattaaaggaagacatgtatgtcttttgtttaagcacctagtcccttatgtatcagtaaacaggtttttaaaaatcttttatgtcatttataggataaaacatatgcttgtctgaaaatatcaccttttgtggatttatctgatcaccaaataataaatattaagaagaatgggggaaaaaggatagaatattaaaactgctttgcataggtttttggggaaattaggatatcttcactgacaagacactgaatggaatttattcacccattttaaattggttacttggggatcagagatttgtctctccaacagcttgtggttttcttattactcattttcaggaaagtttgtagtattacaaggcagaaggaaacacagtagcaatggttgctctatattttgtctttcaaagattactgcattaccaagaaacagtagccaaagatgtttgaagatcatgtcccttagctgcattgtgggttattctagaaatccaatgttaaatgcctctactaaagtggggattccccataaaaattgtccagctacctgactcttttgcaataacaactttgattactgaatccatacactcaaactatagtgatatatcagtgtttgggagtgacctctagaaaaaagaaaactgtttttagaaatacataaaatcacttccaaatcctgttgcttatgttgggttaaatttgaaagcaattctctatatataaatatgtgaaatattatgatctgaacttagcacacatgaagcaacatttctttgctacacagaggtgtcttggaaagatttcattcccaattcatttttcatagatctataatcaggcaatttctgcaagcaatgtatgaccccacctgagcaaccacaaataggctctccatgaaactgcaaaggaactgatgtgtggcatccatgctggttttgtctgtctataatatgaattcaagtatctgttcatatttccaattgtctcctgctagcaatatgtgccacaacatgacagtcttgtgacatcttaaggaaaagaagagttcctgttaaatgaatagctttagcttttacaggggattatgattaaaagtgatttagtacatcttacatgatatctcatttctacgtgaaaagaagttatagaatcttcatagagttccatgagaaaaatatacttgctatttat

SEQ ID NO: 182984 - DNA, 2451 bp, Artificial Sequence
  derived and/or modified sequence
atgctgagaccccagggtttgctttggctacctctcttgttcaccagtgtttgtgtgatgctgaacagcaacgtgttactctggatcacagctctggcaataaagttcactcttatcgacagccaggcacagtaccccgtggttaatactaattacggtaagattcagggattgagaacacctctgccctcagagattctggggcctgtggagcagtacctgggtgttccctatgcgtccccgccaacaggggaaaggagattccagccacctgagtcaccctcctcgtggacagggattcggaacgccacccaattctctgccgtgtgcccgcaacacctcgacgagagattcttgctccatgatatgctgcctatctggttcaccacctctctcgatacactaatgacgtatgtgcaagatcagaacgaagactgtctgtacctcaatatttacgtcccaatggaggatgatatccacgagcaaaacagcaaaaagccggtgatggtttacattcacggagggtcttacatggaaggcactggaaacatgatcgatggttcgatcctggcctcttatggcaacgtcatcgtcatcacaatcaattataggctgggaatcctaggatttctgtcaacaggcgatcaggccgcaaaggggaactatggactactggatcagattcaggcactgaggtggattgaggaaaacgtcggagcttttggaggcgatccaaaacgggtgacgattttcgggagtggggctggcgcaagctgtgtaagcctgttgacgctatctcattacagcgagggcctctttcagaaggcaattattcagtcaggcaccgctctaagtagttgggccgtcaactaccaacccgctaagtacaccaggattctcgcagataaagtgggatgtaatatgttggacaccaccgatatggttgaatgtctgaaaaataaaaattataaagagcttatccagcaaacaataacccccgcaacttaccacatcgcgtttggcccagtcatcgacggggacgtaataccagacgatcctcagatcctgatggaacaaggggaattcctgaattatgacattatgctcggtgtgaatcaaggagaaggtctgaaattcgtcgacggtatcgttgataatgaagatggcgttacacccaacgacttcgacttctctgtgtccaatttcgtcgataacttgtatggctatccagagggcaaggacacccttcgggagacgatcaaattcatgtatactgactgggcagacaaagagaaccctgagacgcgtcgcaagactctggtggccctgttcaccgatcaccagtgggttgccccagctgtggcaacagctgacttacacgcccagtatggctcccccacctatttttacgctttttatcaccactgtcagtccgagatgaaacctagctgggcagacagcgctcacggagacgaggtgccatatgtttttggcattcccatgatcggtccaaccgagttatttagctgcaatttctcaaagaatgatgttatgttgtcggcagtggtcatgacctattggacaaacttcgccaagacaggcgacccaaatcagcctgtgccacaagacaccaagttcatccacaccaagcctaataggttcgaagaagtcgcctggtctaaatacaatccaaaggaccagctgtacctgcatattgggctcaagcccagagtccgtgatcattatagggcaaccaaggtggctttttggttagaactcgtccctcacctccacaatctcaacgagattttccagtatgtgtccacaaccactaaagtgcctccgccagacatgaccagtttcccctacgggacccgacgaagccctgccaagatttggcctacaacgaagagacccgctatcacaccagcaaacaaccccaaacattcaaaagacccacacaagaccgggccagaggatactacagtgctcatagaaacaaagcgagactatagcaccgaactctccgttaccatagccgtcggcgcaagtttactgtttctgaatatactggccttcgcagcactttattacaaaaaagataaaagaaggcatgagacccaccgacaccccagccctcagcgtaataccaccaatgacataacacatattcaaaatgaagagataatgagtctgcaaatgaagcagttggaacatgaccacgaatgcgaatccctgcaagctcacgatacactaagactgacctgccctcccgactacaccctaaccctcagacgcagccctgatgacatccccttcatgacaccaaacacaatcactatgatccctaataccttgatggggatgcagccactgcatactttcaaaacattctccggcggacaaaactctacaaaccttccacacgggcactccaccacccgtgtgtag

SEQ ID NO: 182985 - DNA, 2451 bp, Artificial Sequence
  derived and/or modified sequence
atgctgaggccacaggggctgctctggctccctctcctctttacaagcgtctgtgtgatgttaaattccaatgtgttgttatggatcaccgccctggcaatcaagttcactctcatcgacagccaggcgcagtatcctgtggtgaacacaaattacggaaaaatccagggtttgagaaccccgctccccagtgaaattttgggcccagtggagcagtatcttggggttccctacgctagcccccctactggggagcgcagattccagcctccagaatcgccctcctcctggacagggattcgaaacgccacgcagttttccgcagtgtgcccacagcacttggatgaaaggtttttgctccacgacatgttgcctatctggttcaccacctcgttagataccttgatgacctatgtgcaggatcagaatgaggattgcctttatctgaacatctacgtgccaatggaggatgatatccacgaacagaattctaagaaacctgttatggtgtatatccatggaggatcctacatggagggaaccggcaacatgattgatgggtctatcctggcgtcttatggaaacgtaatcgtcattactattaattaccgcctaggcattctaggcttcctttctactggtgaccaggctgcgaagggtaactatggccttttggatcagatccaggcgctgcgctggatcgaagagaacgtcggagcattcggcggtgatccgaagagggtaaccatcttcggctccggggctggggcatcctgcgtgagcctgctgacgctgtcccattattctgaggggctgtttcagaaggccattatccaaagcgggacggccctctctagctgggctgtcaattaccagccagctaagtatactagaatcctggccgataaagtcggctgcaatatgttggatacaaccgacatggtggagtgcctgaaaaataaaaactacaaagagctgattcaacagaccattacacccgcaacttatcatatcgccttcggacccgtgatagacggagatgttatcccagacgacccgcagatattaatggagcagggagaatttctcaattacgacattatgctcggggttaaccagggtgaagggctgaaattcgtggacgggatcgtcgataacgaagatggagtcacaccaaatgacttcgacttctcagtgtccaattttgtcgataatctgtatggatacccagagggcaaggatacccttcgagaaacaattaagttcatgtacacagactgggcggacaaggaaaaccccgagactaggcgtaaaacactcgtcgctctgtttacagatcaccagtgggtcgcccctgccgtagccaccgcagatctccacgcccagtatgggagccccacatacttctatgcattctaccaccattgccaatccgagatgaagccctcttgggcggattccgctcacggcgacgaggtaccctatgtttttggcattcccatgattggcccaacagaattattcagctgtaatttcagtaagaacgatgttatgctgagcgccgtcgtaatgacatattggaccaactttgccaaaacaggcgacccaaatcagcctgttccacaggacaccaaattcattcacaccaagccaaaccgcttcgaggaagtggcctggagcaaatacaaccccaaagatcagctgtacctgcacatcggcctcaaacctagagtgcgcgaccattacagagccactaaagtagccttctggctcgagcttgttccacacctgcacaacctgaacgagatctttcagtatgtcagtactacaaccaaagtacctccgccagatatgacctcattcccgtacgggacacgacgatcacccgctaaaatctggcctacaacaaagcggcctgccattactcccgcaaacaaccccaaacactcaaaagatccacataaaacaggccctgaggacactacagtcttgatcgaaaccaaacgcgactattcaacggaactctcagtcaccatagccgtcggagcctctttgctgtttttgaatatcctggctttcgcggctctgtactacaagaaggataagaggcggcatgaaacccaccgccatcccagccctcagaggaataccacaaatgacatcacccacattcagaatgaggagatcatgtcacttcagatgaagcaactcgaacacgatcatgagtgtgagtctcttcaggcccacgacacactgagattgacgtgtccgccagattatacgctgacattaagaagaagccctgatgacattccattcatgacccccaacactattactatgattcccaatacgctcatgggaatgcagcccctccatactttcaagactttcagcggaggccaaaatagcacgaatttgccccacggtcactcgacaactcgcgtgtag

SEQ ID NO: 182986 - DNA, 2451 bp, Artificial Sequence
  derived and/or modified sequence
atgctgagaccccagggcctgctgtggctgcccctgctgttcaccagcgtgtgcgtgatgctgaacagcaacgtgctgctgtggatcaccgccctggccatcaagttcaccctgatcgacagccaggcccagtaccccgtggtgaacaccaactacggcaagatccagggcctgagaacccccctgcccagcgagatcctgggccccgtggagcagtacctgggcgtgccctacgccagcccccccaccggcgagagaagattccagccccccgagagccccagcagctggaccggcatcagaaacgccacccagttcagcgccgtgtgcccccagcacctggacgagagattcctgctgcacgacatgctgcccatctggttcaccaccagcctggacaccctgatgacctacgtgcaggaccagaacgaggactgcctgtacctgaacatctacgtgcccatggaggacgacatccacgagcagaacagcaagaagcccgtgatggtgtacatccacggcggcagctacatggagggcaccggcaacatgatcgacggcagcatcctggccagctacggcaacgtgatcgtgatcaccatcaactacagactgggcatcctgggcttcctgagcaccggcgaccaggccgccaagggcaactacggcctgctggaccagatccaggccctgagatggatcgaggagaacgtgggcgccttcggcggcgaccccaagagagtgaccatcttcggcagcggcgccggcgccagctgcgtgagcctgctgaccctgagccactacagcgagggcctgttccagaaggccatcatccagagcggcaccgccctgagcagctgggccgtgaactaccagcccgccaagtacaccagaatcctggccgacaaggtgggctgcaacatgctggacaccaccgacatggtggagtgcctgaagaacaagaactacaaggagctgatccagcagaccatcacccccgccacctaccacatcgccttcggccccgtgatcgacggcgacgtgatccccgacgacccccagatcctgatggagcagggcgagttcctgaactacgacatcatgctgggcgtgaaccagggcgagggcctgaagttcgtggacggcatcgtggacaacgaggacggcgtgacccccaacgacttcgacttcagcgtgagcaacttcgtggacaacctgtacggctaccccgagggcaaggacaccctgagagagaccatcaagttcatgtacaccgactgggccgacaaggagaaccccgagaccagaagaaagaccctggtggccctgttcaccgaccaccagtgggtggcccccgccgtggccaccgccgacctgcacgcccagtacggcagccccacctacttctacgccttctaccaccactgccagagcgagatgaagcccagctgggccgacagcgcccacggcgacgaggtgccctacgtgttcggcatccccatgatcggccccaccgagctgttcagctgcaacttcagcaagaacgacgtgatgctgagcgccgtggtgatgacctactggaccaacttcgccaagaccggcgaccccaaccagcccgtgccccaggacaccaagttcatccacaccaagcccaacagattcgaggaggtggcctggagcaagtacaaccccaaggaccagctgtacctgcacatcggcctgaagcccagagtgagagaccactacagagccaccaaggtggccttctggctggagctggtgccccacctgcacaacctgaacgagatcttccagtacgtgagcaccaccaccaaggtgcccccccccgacatgaccagcttcccctacggcaccagaagaagccccgccaagatctggcccaccaccaagagacccgccatcacccccgccaacaaccccaagcacagcaaggacccccacaagaccggccccgaggacaccaccgtgctgatcgagaccaagagagactacagcaccgagctgagcgtgaccatcgccgtgggcgccagcctgctgttcctgaacatcctggccttcgccgccctgtactacaagaaggacaagagaagacacgagacccacagacaccccagcccccagagaaacaccaccaacgacatcacccacatccagaacgaggagatcatgagcctgcagatgaagcagctggagcacgaccacgagtgcgagagcctgcaggcccacgacaccctgagactgacctgcccccccgactacaccctgaccctgagaagaagccccgacgacatccccttcatgacccccaacaccatcaccatgatccccaacaccctgatgggcatgcagcccctgcacaccttcaagaccttcagcggcggccagaacagcaccaacctgccccacggccacagcaccaccagagtgtag

SEQ ID NO: 182987 - protein, 1403 aa, Artificial Sequence
  derived and/or modified sequence
MANCSQEELDEEFEQFMKELSDDSFENSDKTARQSKKEMKKKDTVPWWITEDDFKDDGLLGTNVSYLKTKKTSQPVMEIEEESAEKIQFLKSSGTSLLSTDSLETNELVVSELNHSSLGVGLDTLEEQEEKEQFFARLEKGLTSSIDYSRLNKELDSNDSTHFKALHSNQANAELTDDEHENESKHEELAENYSDDFEDEYVGAPLTTKDEEMPSKENSKSEKISVPKQEEEKTGMLANVVLLDSLDSVAEVNLDEQDKITPKPRCLPEMTENEMTGTGVSYGQSSSDVEALHQAYCHIAHSLGDEDKQKIESNTVEDIKSSVKGHPQENEENSKNISTMESDLPTVEELMKPIRIDSFGISGFDLQPVSSEKVAERKETEFFSSLPLKMNPNILSQDSQHVNLFFDKNDENVILQKTTNESMENSCPQVTEVTATEEHVDKMYLNILRKKITVNSSSLSQDDKINKTYRSQLSSEEEGAVMGKQVPYKKARSAPPLLKRKPQSGLYASVRSSGYGKPSSPLKMFSTLEKKTSEDIIKSKNLRSISTSNQPRKKEILSGTKLIKPAALDKPAHKTESCLSTRKKSENPTETDSCIQFQTDSLGYCGENKEKKLLMFKRVQEAEDKWRGAQALIEQIKATFSEKEKELENKLEELKKQQEKELFKLNQDNYILQAKLSSFEETNKKQRWLHFGEAADPVTGEKLKQIQKEIQEQETLLQGYQQENERLYNQVKDLQEQNKKNEERMFKENQSLFSEVASLKEQMHKSRFLSQVVEDSEPTRNQNFTDLLAELRMAQKEKDSLLEDIKRLKQDKQALEVDFEKMKKERDQAKDQIAYVTGEKLYEIKILEETHKQEISRLQKRLQWYAENQELLDKDALRLREANEEIEKLKLEIEKLKAESGNPSIRQKIRLKDKAADAKKIQDLERQVKEMEGILKRRYPNSLPALILAASAAGDTVDKNTVEFMEKRIKKLEADLEGKDEDAKKSLRTMEQQFQKMKIQYEQRLEQQEQLLACKLNQHDSPRIKALEKELDDIKEAHQITVRNLEAEIDVLKHQNAELDVKKNDKDDEDFQSIEFQVEQAHAKAKLVRLNEELAAKKREIQDLSKTVERLQKDRRMMLSNQNSKGREEMSAKRAKKDVLHSSKGNANSFPGTLDSKLYQPHTFTDSHVSEVLQENYRLKNELEGLISEKNELKMKSEAVMNQFENSMRRVKEDTAAHIASLKASHQREIEKLLCQNAVENSSSKVAELNRKIATQEVLIRHFQSQVNELQSKQESLVVSEVREEILQKEITKLLEELREAKENHTPEMKHFVGLEKKIKQMEMRHAQREQELQQIIQQTHQVVETEQNKEVEKWKRLAQLKNRELEKFRTELDSILDVLRELHRQGVVVPVAFADEMNAPEY

SEQ ID NO: 182988 - DNA, 4212 bp, Artificial Sequence
  derived and/or modified sequence
atggccaactgcagccaggaggagctggacgaggagttcgagcagttcatgaaggagctgagcgacgacagcttcgagaacagcgacaagaccgccagacagagcaagaaggagatgaagaagaaggacaccgtgccctggtggatcaccgaggacgacttcaaggacgacggcctgctgggcaccaacgtgagctacctgaagaccaagaagaccagccagcccgtgatggagatcgaggaggagagcgccgagaagatccagttcctgaagagcagcggcaccagcctgctgagcaccgacagcctggagaccaacgagctggtggtgagcgagctgaaccacagcagcctgggcgtgggcctggacaccctggaggagcaggaggagaaggagcagttcttcgccagactggagaagggcctgaccagcagcatcgactacagcagactgaacaaggagctggacagcaacgacagcacccacttcaaggccctgcacagcaaccaggccaacgccgagctgaccgacgacgagcacgagaacgagagcaagcacgaggagctggccgagaactacagcgacgacttcgaggacgagtacgtgggcgcccccctgaccaccaaggacgaggagatgcccagcaaggagaacagcaagagcgagaagatcagcgtgcccaagcaggaggaggagaagaccggcatgctggccaacgtggtgctgctggacagcctggacagcgtggccgaggtgaacctggacgagcaggacaagatcacccccaagcccagatgcctgcccgagatgaccgagaacgagatgaccggcaccggcgtgagctacggccagagcagcagcgacgtggaggccctgcaccaggcctactgccacatcgcccacagcctgggcgacgaggacaagcagaagatcgagagcaacaccgtggaggacatcaagagcagcgtgaagggccacccccaggagaacgaggagaacagcaagaacatcagcaccatggagagcgacctgcccaccgtggaggagctgatgaagcccatcagaatcgacagcttcggcatcagcggcttcgacctgcagcccgtgagcagcgagaaggtggccgagagaaaggagaccgagttcttcagcagcctgcccctgaagatgaaccccaacatcctgagccaggacagccagcacgtgaacctgttcttcgacaagaacgacgagaacgtgatcctgcagaagaccaccaacgagagcatggagaacagctgcccccaggtgaccgaggtgaccgccaccgaggagcacgtggacaagatgtacctgaacatcctgagaaagaagatcaccgtgaacagcagcagcctgagccaggacgacaagatcaacaagacctacagaagccagctgagcagcgaggaggagggcgccgtgatgggcaagcaggtgccctacaagaaggccagaagcgccccccccctgctgaagagaaagccccagagcggcctgtacgccagcgtgagaagcagcggctacggcaagcccagcagccccctgaagatgttcagcaccctggagaagaagaccagcgaggacatcatcaagagcaagaacctgagaagcatcagcaccagcaaccagcccagaaagaaggagatcctgagcggcaccaagctgatcaagcccgccgccctggacaagcccgcccacaagaccgagagctgcctgagcaccagaaagaagagcgagaaccccaccgagaccgacagctgcatccagttccagaccgacagcctgggctactgcggcgagaacaaggagaagaagctgctgatgttcaagagagtgcaggaggccgaggacaagtggagaggcgcccaggccctgatcgagcagatcaaggccaccttcagcgagaaggagaaggagctggagaacaagctggaggagctgaagaagcagcaggagaaggagctgttcaagctgaaccaggacaactacatcctgcaggccaagctgagcagcttcgaggagaccaacaagaagcagagatggctgcacttcggcgaggccgccgaccccgtgaccggcgagaagctgaagcagatccagaaggagatccaggagcaggagaccctgctgcagggctaccagcaggagaacgagagactgtacaaccaggtgaaggacctgcaggagcagaacaagaagaacgaggagagaatgttcaaggagaaccagagcctgttcagcgaggtggccagcctgaaggagcagatgcacaagagcagattcctgagccaggtggtggaggacagcgagcccaccagaaaccagaacttcaccgacctgctggccgagctgagaatggcccagaaggagaaggacagcctgctggaggacatcaagagactgaagcaggacaagcaggccctggaggtggacttcgagaagatgaagaaggagagagaccaggccaaggaccagatcgcctacgtgaccggcgagaagctgtacgagatcaagatcctggaggagacccacaagcaggagatcagcagactgcagaagagactgcagtggtacgccgagaaccaggagctgctggacaaggacgccctgagactgagagaggccaacgaggagatcgagaagctgaagctggagatcgagaagctgaaggccgagagcggcaaccccagcatcagacagaagatcagactgaaggacaaggccgccgacgccaagaagatccaggacctggagagacaggtgaaggagatggagggcatcctgaagagaagataccccaacagcctgcccgccctgatcctggccgccagcgccgccggcgacaccgtggacaagaacaccgtggagttcatggagaagagaatcaagaagctggaggccgacctggagggcaaggacgaggacgccaagaagagcctgagaaccatggagcagcagttccagaagatgaagatccagtacgagcagagactggagcagcaggagcagctgctggcctgcaagctgaaccagcacgacagccccagaatcaaggccctggagaaggagctggacgacatcaaggaggcccaccagatcaccgtgagaaacctggaggccgagatcgacgtgctgaagcaccagaacgccgagctggacgtgaagaagaacgacaaggacgacgaggacttccagagcatcgagttccaggtggagcaggcccacgccaaggccaagctggtgagactgaacgaggagctggccgccaagaagagagagatccaggacctgagcaagaccgtggagagactgcagaaggacagaagaatgatgctgagcaaccagaacagcaagggcagagaggagatgagcgccaagagagccaagaaggacgtgctgcacagcagcaagggcaacgccaacagcttccccggcaccctggacagcaagctgtaccagccccacaccttcaccgacagccacgtgagcgaggtgctgcaggagaactacagactgaagaacgagctggagggcctgatcagcgagaagaacgagctgaagatgaagagcgaggccgtgatgaaccagttcgagaacagcatgagaagagtgaaggaggacaccgccgcccacatcgccagcctgaaggccagccaccagagagagatcgagaagctgctgtgccagaacgccgtggagaacagcagcagcaaggtggccgagctgaacagaaagatcgccacccaggaggtgctgatcagacacttccagagccaggtgaacgagctgcagagcaagcaggagagcctggtggtgagcgaggtgagagaggagatcctgcagaaggagatcaccaagctgctggaggagctgagagaggccaaggagaaccacacccccgagatgaagcacttcgtgggcctggagaagaagatcaagcagatggagatgagacacgcccagagagagcaggagctgcagcagatcatccagcagacccaccaggtggtggagaccgagcagaacaaggaggtggagaagtggaagagactggcccagctgaagaacagagagctggagaagttcagaaccgagctggacagcatcctggacgtgctgagagagctgcacagacagggcgtggtggtgcccgtggccttcgccgacgagatgaacgcccccgagtactag

SEQ ID NO: 182989 - DNA, 4212 bp, Artificial Sequence
  derived and/or modified sequence
atggcaaactgttctcaggaagaattggatgaggaattcgaacagttcatgaaagaattatctgacgatagctttgagaacagtgataagacagcccgtcaatccaagaaggagatgaaaaaaaaggacactgtgccctggtggatcacagaggacgacttcaaagatgacggtctattgggcacaaatgtaagctatctgaagacaaaaaaaacctcccaaccagtcatggagatcgaggaagaaagtgcggagaagattcagtttttaaagagtagtgggacttccttgctcagcaccgatagtctagagaccaacgaactggtcgtcagtgagctgaatcactccagtttgggcgtagggctggacactctggaggagcaagaagaaaaagagcagttcttcgcacgtcttgaaaagggcttaacatcttcaatcgattacagtaggctgaataaggagcttgacagtaatgattctacccacttcaaggccctccattcaaatcaggctaacgcagaactgactgacgacgaacatgagaatgaatcgaagcatgaggagttggccgaaaattacagcgacgatttcgaggacgaatatgtgggagccccgctaaccaccaaagatgaggaaatgcctagtaaagaaaattcgaaaagtgaaaagatttcggtgcctaaacaggaggaggagaaaaccggcatgctggcaaacgtagtgctgctggactccttagactctgtcgcagaggtgaatctggatgagcaggacaagatcacccccaaaccgcgttgtctccctgagatgaccgagaacgaaatgacgggcacaggtgtgagctacggccaatcttcatctgatgtcgaagccctgcaccaggcatattgccatatcgctcatagcctgggtgacgaggacaagcagaagatagaaagcaataccgtggaggatatcaagagcagcgtgaaggggcacccacaggaaaacgaggaaaattcaaagaacatttcaaccatggagtcagatctgcccactgttgaagagttgatgaagccaattagaatcgattccttcggaatctcagggtttgacttgcagcctgtgagctccgagaaagttgccgaaagaaaggagactgaattcttcagttctctgcccctgaagatgaacccaaatatcctcagtcaggattcccagcatgttaacctgttcttcgacaaaaacgatgaaaatgttatcctgcagaagacgaccaatgaatcaatggagaattcctgtccacaggtcactgaggtcaccgccactgaggagcatgtagataagatgtacttaaatatcctccgtaagaagataacggtgaactcctctagcctttcacaggacgataaaattaacaagacttatcggagccaactttcaagtgaggaggaaggtgcagtcatgggcaaacaagtgccgtataaaaaagcacgctccgctcctcccctgctcaagcgaaagccccagtctggcctgtatgcatctgtgagatccagcgggtatggaaaaccaagctctcctctcaagatgtttagtactctggaaaaaaaaacctccgaagatattattaagagcaagaacctgcggagcatcagcacgagtaaccagccccgaaagaaagagatcctgtctggtactaagctgattaaacccgccgctctggacaagcccgcacacaagactgagagctgtctgagtacacggaagaagagcgagaatccaacagaaaccgactcgtgcatacagtttcaaactgactctctgggatactgcggcgaaaataaggagaagaaactgctgatgttcaaaagggttcaggaggcggaagacaagtggcgcggcgcccaagctttgatagaacagattaaagcaacattcagcgaaaaggagaaggaattggagaacaaattggaagaactcaagaagcagcaagagaaagagctgtttaagctgaatcaagataattacatcctgcaggctaaacttagcagttttgaggagactaataaaaagcaacggtggcttcatttcggggaggctgccgatccagtgaccggcgagaaactgaagcaaattcagaaagaaattcaggagcaggagactctgctgcagggatatcaacaagaaaatgaaagactttacaatcaggtcaaagatctgcaggaacagaataaaaaaaatgaagaacgcatgttcaaggagaatcaatctctattttccgaggtggcctccctgaaggaacaaatgcataaatctagatttcttagccaggtggttgaagactcagaacctactcgcaatcaaaactttaccgacctcttggccgaattaagaatggcccagaaggagaaggattcccttttggaggatataaaaagactcaaacaggataagcaggctctcgaagtcgacttcgaaaagatgaaaaaagagcgcgaccaggccaaagatcaaatagcctacgtgacgggtgagaaactgtatgagataaagatcctggaggagactcacaagcaggaaatctccaggttacagaagaggctgcagtggtacgctgagaaccaggagctgcttgataaggatgctcttaggctgcgggaggccaacgaagaaatagaaaaactaaagctggaaattgagaagcttaaggcagaaagcggcaatccctctatcaggcagaaaatccggctcaaggataaggccgcagacgctaagaaaattcaggatcttgagcgccaagtgaaagagatggagggaatcctgaaacgtcgatatccgaactcgctcccagcactgatcctcgcagcttccgctgctggagacacggtagacaagaacacagtcgaatttatggaaaagaggatcaaaaaacttgaggccgacttggaaggaaaggacgaagatgccaagaaaagcctgagaactatggaacaacagttccagaagatgaagatccagtacgaacagagacttgaacagcaagaacaactccttgcttgtaaactgaatcagcatgattcgccacgaataaaggcactggaaaaggaactggacgatattaaagaggcccaccagattaccgtgagaaatttggaggccgagatagatgttctaaaacaccaaaacgccgagctcgatgtgaagaaaaatgataaggacgatgaagattttcaatctattgaattccaggtggagcaggcacacgctaaagccaagctggtgaggctcaacgaggagttagcagccaagaagcgtgagattcaagatttgtctaaaacagtcgagcgcctccagaaggacagaaggatgatgctaagcaaccagaattctaaaggccgcgaggaaatgtcggccaaacgtgcaaaaaaggacgtgctgcacagctcaaaagggaacgccaactcatttcccggaaccctggacagcaagctgtaccagccccacaccttcacagattcacacgtgtcagaagtgctgcaagaaaactaccgcttgaaaaatgagctcgaggggctcatatcagaaaaaaatgaacttaagatgaagtccgaggctgtcatgaaccaatttgaaaacagcatgagacgcgtcaaggaggacactgccgcccacattgcctctctcaaagcatcgcatcaaagagagatagagaaattgttatgccagaacgccgtggagaactccagttctaaagtggctgagttaaacagaaaaattgcaactcaggaggtcttgattcgccactttcagtctcaggtaaacgaactgcagtctaagcaggagtcacttgtggttagcgaggtgcgtgaagaaattcttcagaaggagattactaagttgctcgaggagttgcgcgaagccaaagagaatcatacacccgagatgaagcattttgtggggctcgagaagaagatcaaacaaatggagatgcggcacgcccagagggaacaggagctccaacaaataatacagcagacacatcaggtggtggagactgaacaaaacaaggaagttgagaagtggaaacgcctagctcagctgaagaaccgtgagctggagaagtttagaacagagctggattccatcctggacgtccttcgcgagcttcaccgtcagggcgtagttgtccccgttgcatttgccgatgaaatgaacgctcctgagtattag

SEQ ID NO: 182990 - DNA, 5156 bp, Artificial Sequence
  derived and/or modified sequence
gacaactggtggacccgcacagaccttccgggaaagcgcggaattcagaggcagagtgtttccaatgtttgaggtactttagaatgtttactttgggaggtcaaaattgttgactatggctaactgttcccaagaagagctagatgaagagtttgaacagtttatgaaagagctttcagatgattcttttgaaaattcagacaaaacagctagacaatctaaaaaagagatgaagaagaaagatacagtgccttggtggataactgaagatgattttaaagatgatggacttcttggaacaaatgtgagctatttgaaaacaaagaagacttctcagcctgttatggaaatagaagaggagtctgctgaaaagattcaatttcttaagagcagtggaacctctctcttaagtactgatagcttagaaacaaatgaactagtagtttctgagctcaaccatagtagtctcggagtgggattggacacattagaagaacaagaggagaaagaacaattttttgccaggcttgagaaaggcttgacatcttccattgattattcgagattaaataaggaattggattctaatgactctacacattttaaagctttacatagtaatcaagccaacgcagaactaactgatgacgaacatgagaatgaatcgaaacatgaagaactggcagaaaattacagtgatgattttgaagatgagtatgttggtgcaccgttgactactaaagatgaagagatgccttccaaagagaattccaaatcagaaaaaataagtgtgcccaaacaggaagaagaaaaaactggcatgcttgctaatgttgtgctgcttgattcattagactctgttgcagaggtcaatcttgatgaacaagataaaataacacctaagccaaggtgcctaccagaaatgactgagaatgaaatgacaggaacaggtgtttcttatggacaaagcagtagtgacgttgaagccctacatcaagcttattgtcatatagcccattcattgggagatgaagacaaacaaaaaattgagagtaacacagtggaagatatcaagagctcagtgaaaggtcatcctcaagaaaatgaagagaattcaaaaaacatctctactatggaatctgatctgcccacagtagaggagctgatgaaacctatcagaatagattcctttgggatcagtggttttgatttacaacctgtcagctctgagaaagtggccgaaagaaaagaaactgaattttttagctctttacccctgaagatgaacccaaatattttgtctcaagactcacaacatgtgaaccttttttttgacaaaaatgatgagaatgtgattttacaaaagaccacaaatgagagtatggaaaacagctgtccacaagtaactgaagtaactgccacagaagaacatgttgataaaatgtaccttaatattttgaggaaaaaaataactgttaattcttcatcattatctcaggatgacaaaattaataaaacttacagatctcaacttagttctgaagaagaaggggctgtaatgggtaaacaggtaccatacaagaaggccagaagtgcacctcctttacttaaaaggaaaccccagagtggattatatgcgtcagttaggagctcaggctatggcaaacccagttcaccactcaagatgttttctactcttgaaaagaaaacttcagaggacattataaaaagcaaaaacttgagatcgatttctacctccaatcaacctaggaaaaaagaaatcttatctggaacaaaactcatcaagcctgcagctttggataaaccagctcacaaaactgaaagttgcctgtctactcgtaagaagtctgaaaatcccacagaaactgattcctgtattcagtttcagactgattccttaggatactgtggtgagaacaaggagaagaaattacttatgtttaaaagagttcaggaagcagaggataaatggaggggtgcgcaagccctaattgagcaaattaaagccacattctcagaaaaggagaaagaactagaaaataagttggaagaactaaagaaacaacaggaaaaagaactcttcaaattgaatcaagataattatattcttcaagccaagttaagcagctttgaagaaacaaacaaaaaacaaaggtggttacattttggagaagcagctgatcctgtcactggagaaaagttgaagcaaatccaaaaagaaatacaagaacaagagacacttcttcaaggatatcaacaggaaaatgaacgattatataatcaagtaaaagatctccaagaacaaaacaagaaaaatgaggagcgaatgtttaaggaaaaccaaagtttattcagtgaggtagcttccttaaaagaacagatgcacaaaagtcgttttctgtctcaagtagttgaagattcagagcccacaagaaatcagaattttacagatctgttagcagaactacggatggcacagaaagaaaaagacagtttattggaagacatcaaaagactgaaacaagacaaacaagctcttgaagtagacttcgaaaaaatgaagaaagagagggaccaagccaaagatcagattgcttatgtcacaggtgagaaattatatgaaataaaaattttagaagaaacacataaacaagaaatcagtcgtctgcaaaaaagattacagtggtatgctgaaaatcaggaacttctggataaagatgcacttcggcttagagaagcaaatgaggaaattgagaagctcaaacttgagattgagaaactgaaagctgaatctgggaatccatctattcggcagaagatacgcttaaaagataaagcagcagatgccaaaaaaattcaggatctggagcgacaagttaaggaaatggaagggattctgaagagaagatatcccaattctttacctgctttaatattggctgcatcagcagctggtgatacagtggataaaaatacagtggaatttatggagaaaaggataaaaaagctagaagctgatctggagggcaaagatgaagatgcaaagaaaagccttcgtaccatggaacaacagtttcagaaaatgaagattcagtatgaacaaagactagagcagcaggagcagctacttgcctgcaaattgaatcaacatgactctcccagaattaaagccctagagaaggaacttgatgacatcaaggaagcccatcagatcactgtaagaaaccttgaagccgaaatagacgttcttaaacatcagaatgctgaattagacgtcaagaaaaatgataaagatgatgaagattttcagtctatagaattccaggtggaacaggctcatgctaaagctaaattagtaagactcaatgaagaactggctgcaaaaaagagagaaatacaagacctctcaaaaactgtggagaggcttcagaaagacagaagaatgatgctatcaaatcagaactcaaagggcagagaggaaatgtctgccaaaagggcaaagaaagatgttttgcactcaagtaaaggaaatgctaactccttccctggaaccctggacagcaagctgtaccaaccacatactttcactgattcccatgtttcagaagttttacaagaaaactacagattaaaaaatgagctagaaggattaatttcagagaagaatgaactgaagatgaaatctgaagcagtgatgaatcaatttgaaaactccatgagaagggtcaaggaagatactgcagcacacattgcatccctcaaagcatctcatcagagagaaatagagaaactcctttgccaaaatgcagtagaaaattcttcttccaaagtagctgaactaaatcgtaaaatagcaactcaagaggtacttataagacatttccaaagtcaagttaatgagctgcagagtaaacaagagtctctcgtagtttctgaagttcgagaagaaattctacagaaagagattacaaaactcttagaagaattgagagaagccaaagaaaaccatacaccagagatgaaacatttcgtgggcttagaaaagaaaattaagcagatggaaatgagacatgcacaaagagaacaggaacttcaacagataatacagcaaacacaccaagtagtagaaactgagcaaaacaaagaagttgaaaaatggaaaagactggcacagttaaagaatcgtgagctggagaagttccgcacagaactagactcaatattagatgttctccgagagctgcaccggcaaggagtggttgtgccagttgcttttgcagatgaaatgaatgcaccagagtattaatagaaattcagatttcataatgaccttattaaaaggcctgaagatggatgggattgtgccactgtcaggacagcttatgaaaaacaagtgttccaatatgtttccagaaagcaaacaaccaaagcaacatttcaaaataaattgcctttaaccaataagaaaaaaaacatataatggtgtattttactaaaaatcattaaccagtctcattttaagtgatttatggacagtttcctttatagcagagaagggctcacttgtatgctagaaatagaaagaaaagaaaattgaacatactccgccacatttttattgataatgtgaggtttttaaaatttttattttagatccagggggtacatgtgcttgttgtaacatgggtgtattgaataatggtgggaattgggcttctagtgtacccatcatccaaatattaaacactgtacccaacaggtaatttttcaacgcttactgccgctcacactctttcccctattggagtccccagtgtctgttatctccatctttatgtctctgtgtacccattgtttagctcctacttttaagtgagaatatatgcaatattttattttttatgtctgatttagttcacataggataatggcctccagctctatccatgttgctgcaaatgacatgatttcattcttttttatagttgcataatactccatttatatatctctctctatatatatctcacgttttctttatccagtcaattgttggtagatacttaggttggttccatgaatttgctattgtaaatattgctgcaataaacatacatgtacagatatctttttta

SEQ ID NO: 182991 - DNA, 4212 bp, Artificial Sequence
  derived and/or modified sequence
atggccaactgcagccaggaggagctggatgaggagtttgagcagttcatgaaggagctgagtgatgacagctttgagaacagcgacaagacagcccggcagagcaagaaggagatgaagaagaaggacacagtgccctggtggatcacagaagatgacttcaaggatgatggcctgctgggcaccaacgtgtcctacctgaagaccaagaagaccagccagcctgtgatggagattgaggaggagagcgctgagaagatccagttcctgaagagcagcggcaccagcctgctgagcacagacagcctggagaccaatgagctggtggtgtctgagctgaaccacagcagcctgggcgtgggcctggacaccctggaggagcaggaggagaaggagcagttctttgcccggctggagaagggcctgaccagcagcattgactacagccggctgaacaaggagctggacagcaatgacagcacccacttcaaggccctgcacagcaaccaggccaatgctgagctgacagatgatgaacatgaaaatgaaagcaagcatgaggagctggccgagaactacagtgatgactttgaagatgaatatgtgggcgcccccctgaccaccaaggatgaggagatgcccagcaaagaaaacagcaagtctgagaagatctctgtgcccaagcaggaggaggagaagacaggcatgctggccaacgtggtgctgctggacagcctggacagcgtggccgaggtgaacctggatgagcaggacaagatcacccccaagccccgctgcctgcctgagatgacagaaaatgagatgacaggcaccggggtgtcctatggccagagcagcagtgatgtggaggccctgcaccaggcctactgccacatcgcccacagcctgggagatgaggacaagcagaagattgagagcaacacagtggaggacatcaagagctctgtgaagggccacccccaggagaatgaggagaacagcaagaacatcagcaccatggagagtgacctgcccaccgtggaggagctgatgaagcccatcagaattgacagctttggcatcagcggctttgacctgcagcctgtgtcctctgagaaggtggccgagaggaaggagacagagttcttcagcagcctgcccctgaagatgaaccccaacatcctgagccaggacagccagcacgtgaacctcttctttgacaagaatgatgaaaatgtcatcctgcagaagaccaccaatgaatccatggagaacagctgcccccaggtgacagaggtgacagccacagaggagcacgtggacaagatgtacctgaacatcctgaggaagaagatcaccgtgaacagcagcagcctgagccaggatgacaagatcaacaagacctaccgcagccagctgagcagcgaggaggagggcgctgtgatgggcaagcaggtgccctacaagaaggcccggagcgccccacccctgctgaagaggaagccccagagcggcctgtatgcctctgtgcgcagcagcggctacggcaagcccagcagccccctgaagatgttcagcaccctggagaagaagaccagcgaggacatcatcaagagcaagaacctgcggagcatcagcaccagcaaccagcccaggaagaaggagatcctgagcggcaccaagctgatcaagccagctgccctggacaagccagcccacaagacagagagctgcctgagcaccaggaagaagtctgagaaccccacagaaacagacagctgcatccagttccagacagacagcctgggctactgtggggagaacaaggagaagaagctgctgatgttcaagagggtgcaggaggccgaggacaagtggaggggggcccaggccctgattgagcagatcaaggccaccttcagcgagaaggagaaggagctggagaacaagctggaggagctgaagaagcagcaggagaaggagctgttcaagctgaaccaggacaactacatcctgcaggccaagctgagcagctttgaggagaccaacaagaagcagcgctggctgcactttggagaggccgctgaccctgtgactggagagaagctgaagcagatccagaaggagatccaggagcaggagaccctgctgcagggctaccagcaggagaatgaaagactctacaaccaggtgaaggacctgcaggagcagaacaagaagaatgaggagaggatgttcaaggagaaccagagcctcttcagcgaggtggccagcctgaaggagcagatgcacaagagccgcttcctgagccaggtggtggaggacagcgagcccaccaggaaccagaacttcacagacctgctggccgagctgaggatggcccagaaggagaaggacagcctgctggaggacatcaagaggctgaagcaggacaagcaggccctggaggtggactttgagaagatgaagaaggagcgggaccaggccaaggaccagatcgcctacgtgactggagagaagctgtatgagatcaagatcctggaggagacccacaagcaggagatcagccggctgcagaagaggctgcagtggtatgcagagaaccaggagctgctggacaaggatgccctgcggctgcgggaggccaatgaggagattgagaagctgaagctggagattgagaagctgaaggccgagagcggcaaccccagcatccggcagaagatccggctgaaggacaaggccgcagatgccaagaagatccaggacctggagcggcaggtgaaggagatggagggcatcctgaagaggcgctaccccaacagcctgcctgccctgatcctggccgccagcgctgctggggacacagtggacaagaacacagtggagttcatggagaagaggatcaagaagctggaggccgacctggagggcaaggatgaagatgccaagaagagcctgcggaccatggagcagcagttccagaagatgaagatccagtatgagcagaggctggagcagcaggagcagctgctggcctgcaagctgaaccagcacgacagcccccgcatcaaggccctggagaaggagctggatgacatcaaggaggcccaccagatcaccgtgaggaacctggaggccgagattgatgtgctgaagcaccagaatgctgagctggatgtgaagaagaatgacaaggatgatgaggacttccagagcattgagttccaggtggagcaggcccacgccaaggccaagctggtgcggctgaatgaggagctggccgccaagaagcgggagatccaggacctgagcaagacagtggagcggctgcagaaggacaggaggatgatgctgagcaaccagaacagcaagggccgggaggagatgtctgccaagagggccaagaaggatgtgctgcacagcagcaaaggaaatgccaacagcttccctggcaccctggacagcaagctgtaccagccccacaccttcacagacagccacgtgtctgaggtgctgcaggagaactaccgcctgaagaatgagctggagggcctcatcagcgagaagaatgagctgaagatgaagtctgaggccgtgatgaaccagtttgaaaattccatgagaagagtgaaggaggacacagctgcccacatcgccagcctgaaggccagccaccagcgggagattgagaagctgctgtgccagaatgctgtggagaacagcagcagcaaggtggccgagctgaacaggaagatcgccacccaggaggtgctgatccgccacttccagagccaggtgaatgagctgcagagcaagcaggagagcctggtggtgtctgaggtgcgggaggagatcctgcagaaggagatcaccaagctgctggaggagctgcgggaggccaaggagaaccacaccccagagatgaagcactttgtgggcctggagaagaagatcaagcagatggagatgagacatgcccagcgggagcaggagctgcagcagatcatccagcagacccaccaggtggtggagacagagcagaacaaggaggtggagaagtggaagaggctggcccagctgaagaaccgggagctggagaagttcagaacagagctggacagcatcctggatgtgctgcgggagctgcaccggcagggcgtggtggtgcctgtggcctttgctgatgagatgaatgcccctgagtactag

SEQ ID NO: 182992 - DNA, 4212 bp, Artificial Sequence
  derived and/or modified sequence
atggccaactgcagccaggaggagctggacgaggagttcgagcagttcatgaaagagttatccgatgactccttcgagaacagcgataaaaccgcccgacagtcaaaaaaggaaatgaagaaaaaggacacagtcccttggtggatcacagaagacgattttaaagatgacgggctgttaggtaccaacgtgtcctaccttaagaccaagaaaaccagtcaaccagtcatggagatcgaggaagagagcgccgagaaaatccaatttctgaaaagcagcggcacgtcactgctgagtacagactctctggagaccaatgagctggtggtgtctgagctgaatcacagttcactgggtgtcgggttggatacactggaagagcaggaggaaaaggagcaattctttgcaagactggaaaaggggctgacttccagcatagactactctcgcctgaacaaggaattggacagcaacgattccacccatttcaaggcactccatagtaatcaggccaacgccgagctgactgacgacgagcacgaaaatgagtccaagcatgaagagctcgccgagaattattcagatgacttcgaggacgagtacgtgggggcacccttgaccacaaaggatgaagagatgccttcgaaggagaacagcaagagtgaaaaaatctcagtgccaaagcaggaagaagaaaaaacaggtatgctggctaacgtcgttttgctcgactcactagatagtgttgccgaggtgaatctcgatgaacaggataagattacgcctaaacccagatgcctacccgaaatgacggaaaatgaaatgacggggacaggagtatcttacggacaaagctcctctgacgtggaagccctgcatcaggcctactgtcacatcgcccattctctgggcgacgaagacaaacaaaagatcgaatccaacacggtggaggatatcaaatcgtcagtgaaaggacatccacaggaaaacgaagaaaattctaaaaacataagcactatggagtccgacctaccaacggtggaggagctcatgaaaccaatccgcatcgactccttcggaatctccgggtttgatctgcagcctgtcagtagcgaaaaggttgcagagcggaaagaaacagaatttttcagttctttgccccttaagatgaaccccaatattcttagtcaggattcacaacacgtcaatctgttttttgacaaaaacgacgagaacgtgatccttcaaaagacaacgaacgagtcaatggagaattcctgtccccaggtgacagaagttacggctaccgaggaacacgtggataagatgtatcttaatatcctgagaaagaaaatcactgtaaattctagcagtctgagccaggatgacaagataaacaagacatacaggagtcagctctcttccgaggaggaaggtgcagtgatgggcaagcaagtgccctacaagaaagcacgcagcgctcctccgctgctgaagaggaagccacagagcggactttatgcctccgtgaggagctctggatacggaaagccgagtagtccactgaaaatgttcagtacccttgaaaaaaagaccagcgaggatatcatcaagagcaaaaacctccggagcatctccacgagcaaccagccacgcaaaaaggaaatcctgtcaggcacaaagctgatcaaaccagctgccctcgataagcccgctcataagacagagtcttgtttaagcacccggaaaaagtctgagaatccaacagagacggactcctgcatccaatttcagaccgactctctgggctactgtggcgagaataaggaaaaaaagcttctgatgttcaaacgagtgcaagaggcagaagacaaatggaggggggcgcaggcactgatcgagcaaatcaaggctacgttcagcgagaaggagaaggagttggagaacaagctcgaagaactgaagaaacagcaggaaaaagagctgtttaagctaaatcaggacaattacatcctgcaggccaaactgtcatccttcgaggagacaaataagaaacagcggtggttgcactttggggaagctgcagatcccgtgacaggggaaaagctgaagcaaatacagaaagagatccaggagcaagagacacttctccagggataccagcaggaaaatgagcgcctttataatcaggtgaaagacctacaggagcaaaataagaagaacgaggagcgcatgttcaaagaaaatcaatccttattttccgaggttgccagtctaaaagaacagatgcacaagagtagattcttgtcccaggttgtggaggacagcgagcccacccgcaatcaaaacttcaccgacttgctggctgaactcaggatggctcagaaagagaaggacagtcttctggaagatataaagagacttaaacaggataagcaggcactagaagtggatttcgaaaagatgaagaaagagagagatcaggcaaaagaccagattgcctacgttacaggtgaaaaactgtacgagattaagattctcgaggagacgcacaagcaggaaatcagccggttacagaagcggctgcagtggtacgctgagaatcaggaattactggacaaagacgccctgcgattgagagaggccaatgaagagattgagaaactgaagctggagatagagaaactgaaggcggaatctggcaacccatccattcggcaaaagataaggttgaaggacaaggccgctgacgctaagaaaatccaggatctcgagcggcaggtgaaggagatggaagggatcttaaagcggagatatccgaactcactcccagctctgattttggccgcctcagcagccggggatactgttgataagaacactgtagaattcatggaaaagaggatcaaaaagctagaggctgatttggagggtaaggatgaggatgccaagaaaagtctgagaacaatggagcaacagttccaaaaaatgaaaatccagtacgaacagagactggagcagcaggagcagctgctggcttgcaagctaaaccagcatgattcacctagaattaaggcgctcgaaaaggaactcgacgatatcaaagaggctcaccaaatcaccgtgcgcaacctggaggcagaaatcgacgtactgaagcaccagaacgccgagctcgacgtgaaaaagaacgacaaggacgatgaggactttcagtctattgagtttcaggtcgagcaggcccacgccaaggcaaagcttgtgcggctgaacgaagagctggccgccaaaaaaagagaaatccaagatctgtcaaaaaccgtggaacgactacagaaggacaggcgcatgatgcttagtaaccaaaattcaaaaggacgagaggaaatgagcgcaaagagggccaagaaggatgtgctgcactcatctaaaggcaatgccaactccttccccgggacgctcgacagtaagttgtatcaacctcacacattcacagacagccatgtatctgaggttctacaggaaaattaccgcctcaaaaatgagcttgaaggccttatttcagagaaaaatgaacttaaaatgaagagcgaggccgttatgaatcagttcgagaattctatgcggcgagtgaaggaggacacagcggctcacattgcaagtctcaaggcatctcaccagcgcgagatcgaaaaactcctttgccagaatgctgtagaaaattcctctagtaaggtcgctgagctcaatcgcaagatagccacccaggaagtgctaattcgtcacttccagagccaagtcaacgaactgcaatccaagcaggagagtctcgtggtctctgaagtcagagaagagatccttcagaaggagattaccaagctgctggaagaactccgtgaagccaaagagaaccacacacccgagatgaagcatttcgtgggcctggaaaagaagattaagcagatggaaatgaggcacgcacagcgcgaacaagaactgcagcagatcatccaacagacacaccaggtggtggagaccgaacagaacaaggaagtggagaaatggaagcgactggcacaactcaagaaccgggagcttgaaaagttcaggaccgagttggatagcatactggatgtcctgcgcgaactacaccgccaaggggtggtggtaccagtggcatttgccgatgaaatgaacgcacctgaatattag

SEQ ID NO: 182993 - DNA, 4212 bp, Artificial Sequence
  derived and/or modified sequence
atggccaactgttcacaggaagagctcgacgaggaatttgagcagtttatgaaagagctgtctgatgattcctttgaaaactccgataagaccgctaggcagagtaaaaaagagatgaaaaagaaagatactgtgccatggtggatcacagaggacgactttaaggatgatggcttgctgggcacaaatgtgagctatcttaaaacaaaaaaaacctcgcaaccagtgatggaaattgaagaagaatccgccgagaagattcagttccttaaaagtagcggcactagtttactgtctacagacagcttggaaaccaacgaacttgttgtgtctgaactcaatcacagtagcttgggggtaggcctggacacgctagaagaacaagaagagaaggagcagtttttcgcacgattggagaaaggcttgacatcatcgatcgactacagccgccttaacaaggagcttgactccaacgatagtacccacttcaaggccttgcattcgaatcaggctaatgctgagctcaccgatgacgagcatgaaaatgaatccaagcacgaggaactcgccgagaattattctgacgacttcgaggacgagtatgtgggggcaccactgacaacgaaagacgaggagatgccctcaaaggagaattcgaagtccgagaagatatccgtccccaagcaggaggaggaaaagaccggaatgctcgccaatgtggtcctgctcgattctcttgacagcgtcgcagaagtgaacctcgacgagcaggacaagattactcccaagccaagatgcctgccagaaatgaccgagaacgagatgacgggcacaggagttagctacggtcagtcctcctcagacgttgaagctcttcaccaggcttattgtcacattgcacactcacttggcgacgaagataaacagaaaattgagagcaacaccgtggaggacatcaaaagcagtgtgaaagggcaccctcaggaaaacgaggagaattctaaaaacatttccaccatggaatctgacctgcctacggttgaggaactaatgaagcctatccggattgattcctttgggattagcggcttcgaccttcagccagtgagctctgagaaagtggctgagcgaaaagagacagaatttttcagttcgctgcccctcaagatgaacccaaatattctgtcacaagattctcagcatgtcaacctattcttcgacaagaatgacgaaaacgtgatactgcaaaagaccacaaacgagtcaatggaaaactcctgccctcaagtcaccgaggttaccgctacggaagagcacgttgataagatgtaccttaacatcctgcggaagaagattaccgtcaattcctccagtctcagtcaggacgataagatcaacaaaacctataggagccagttaagcagtgaagaggagggtgctgttatggggaaacaggtgccatacaaaaaggcacgatccgccccaccattgctgaaaaggaagccccagagtggactgtatgccagcgttagaagctctgggtacggaaagccatcctcacctctgaaaatgttttcgacactagagaagaagacatctgaggacatcattaagagcaaaaatctgagatcaatctctactagcaaccaaccccgtaagaaggagatcctgagtgggacgaagttgattaagccagcagccctggacaagccagcccacaaaaccgaaagctgtctgtcgacccgaaagaagagcgaaaatcccaccgagacagattcgtgcattcaattccagactgattcactgggctattgcggggagaataaagagaaaaagctgctgatgtttaagcgcgtgcaggaggccgaagataaatggagaggcgctcaagcattaatcgagcagataaaggcaacattctctgagaaggagaaagagctcgagaataagcttgaagagctgaaaaagcagcaagaaaaagaactgtttaaactaaatcaagacaattatattctccaagccaagttatctagttttgaagaaacaaacaaaaagcagcggtggctgcacttcggcgaggctgccgatcctgtgacaggcgaaaaactgaagcaaattcagaaagaaattcaggaacaggagaccttgctgcagggctaccaacaagagaacgaaagactctacaatcaggtcaaagatctccaggaacaaaacaaaaagaacgaggagagaatgtttaaagagaaccaatccctcttctctgaggtggcttccctgaaagagcaaatgcataagtcaaggttcttgagccaagttgtggaagactcagagcctacgcgcaaccagaattttactgacctgctcgccgaattacgcatggctcagaaggaaaaagattctctgctcgaagacatcaaacggctcaaacaggacaagcaggcactggaggtcgattttgagaagatgaagaaagaacgggatcaggcaaaggatcagatagcatacgtcaccggagaaaagttgtatgagattaagatacttgaggagactcataagcaggagatctctagactgcagaaacgccttcagtggtacgccgaaaaccaggagctgctggataaagatgcactgaggctgcgagaggcaaacgaggaaattgagaaactgaagctcgagatagaaaaactgaaggccgaatctggtaatccttccattagacagaaaatacggctgaaggataaggccgctgacgcaaaaaaaattcaagacctggaacggcaggtcaaggaaatggaaggcatacttaaaaggcggtatcccaactcgctgcccgcattgatcctcgcagcgagcgccgcaggcgatactgtggacaagaataccgtggagttcatggaaaagcggatcaaaaaattagaggcggacctggaggggaaggatgaagatgcgaagaagtctctaagaaccatggagcaacagtttcaaaagatgaaaatccagtacgaacagcgtttagaacagcaggaacagctcctggcttgtaaacttaatcagcacgattcccccaggatcaaggccctagagaaagagttggacgacattaaggaggcccatcagatcacggtgcggaatctagaggcagagattgacgtcctgaaacaccagaacgctgagctggatgttaagaagaatgataaagacgacgaggattttcagtccatagaatttcaggtggagcaggctcatgccaaagccaaactggttcggctgaacgaggagctcgctgccaagaagagagaaattcaggatctctctaaaacagtcgagcgcttgcagaaggacagaagaatgatgttgtctaatcaaaatagtaagggcagagaagagatgtcggccaaacgagccaagaaggatgtcctgcatagttccaaaggcaacgcaaacagctttccagggaccttggactctaagctttaccaacctcacacattcacagactcccacgtgtcagaggtgctccaagaaaattacaggctcaagaacgaactcgaaggcctgatcagcgaaaaaaacgaattaaaaatgaagagtgaagctgtgatgaaccagttcgagaattcaatgcgacgggtcaaagaagacactgctgctcacatcgcttccctgaaggcttcccatcaaagagagattgaaaaactgttgtgccagaacgccgttgaaaactcctctagtaaagtagccgagttaaataggaagattgccacacaggaggtgctgattcggcattttcagtctcaagttaacgagttacagtctaagcaggagtcactggtggtatccgaggtccgggaagagatactacagaaggaaattacaaaactcctcgaggagctccgggaggccaaagagaaccacacgccagaaatgaagcactttgtggggcttgagaagaagattaagcaaatggaaatgaggcacgcccaacgggaacaggagctgcagcaaatcatccagcagacgcaccaggtggtggaaactgagcagaacaaggaggtggagaaatggaagaggttggcccagctgaaaaatagggagctcgaaaagtttcggacagaactagactcaatactggatgttcttcgtgaattgcatcgccagggggtggtggtgccggtagcctttgccgacgaaatgaatgcacctgaatattag

SEQ ID NO: 182994 - protein, 519 aa, Artificial Sequence
  derived and/or modified sequence
MARDLVMFRDVAVDFSQEEWECLNSYQRNLYRDVILENYSNLVSLAGCSISKPDVITLLEQGKEPWMVVRDEKRRWTLDLESRYDTKKLFQGKDIYEMNLSQWKVMERIKSCGLEEQESPHEVCFRQVTKTTSEKMPTYRKLTSLPLYQKSHNREKPYECGECGKAFRVRQQLTFHQRIHTGEKPYECKECGKAFRQCAHLSRHQRIHTSDKLYECKKCGKIFTCGSDLRVHQRIHIGEKPYECKECGKAFRVRGQLNLHQRIHTGEKPYECKECGKAFRQYAHLTRHQRLNIAEKCYECKECGQAFLCSTGLRLHHKLHTGEKPYECKECGKAFRVRQQLTLHQRIHTGEKPYDCKECGKTFSRGYHLTLHQRIHTGEKPYECKECQKFFRRYSELISHQGIHIGEKPYECKECGKAFRLFSQLTQHQSIHFGEKPFKCKECEKTFRLLSQLTQHQSIHTGEKPYDCKECGKAFRLHSSLIQHQRIHSGEKPYKCKECKKAFRQHSHLTYHQRIHNVT

SEQ ID NO: 182995 - DNA, 1560 bp, Artificial Sequence
  derived and/or modified sequence
atggccagagacctggtgatgttcagagacgtggccgtggacttcagccaggaggagtgggagtgcctgaacagctaccagagaaacctgtacagagacgtgatcctggagaactacagcaacctggtgagcctggccggctgcagcatcagcaagcccgacgtgatcaccctgctggagcagggcaaggagccctggatggtggtgagagacgagaagagaagatggaccctggacctggagagcagatacgacaccaagaagctgttccagggcaaggacatctacgagatgaacctgagccagtggaaggtgatggagagaatcaagagctgcggcctggaggagcaggagagcccccacgaggtgtgcttcagacaggtgaccaagaccaccagcgagaagatgcccacctacagaaagctgaccagcctgcccctgtaccagaagagccacaacagagagaagccctacgagtgcggcgagtgcggcaaggccttcagagtgagacagcagctgaccttccaccagagaatccacaccggcgagaagccctacgagtgcaaggagtgcggcaaggccttcagacagtgcgcccacctgagcagacaccagagaatccacaccagcgacaagctgtacgagtgcaagaagtgcggcaagatcttcacctgcggcagcgacctgagagtgcaccagagaatccacatcggcgagaagccctacgagtgcaaggagtgcggcaaggccttcagagtgagaggccagctgaacctgcaccagagaatccacaccggcgagaagccctacgagtgcaaggagtgcggcaaggccttcagacagtacgcccacctgaccagacaccagagactgaacatcgccgagaagtgctacgagtgcaaggagtgcggccaggccttcctgtgcagcaccggcctgagactgcaccacaagctgcacaccggcgagaagccctacgagtgcaaggagtgcggcaaggccttcagagtgagacagcagctgaccctgcaccagagaatccacaccggcgagaagccctacgactgcaaggagtgcggcaagaccttcagcagaggctaccacctgaccctgcaccagagaatccacaccggcgagaagccctacgagtgcaaggagtgccagaagttcttcagaagatacagcgagctgatcagccaccagggcatccacatcggcgagaagccctacgagtgcaaggagtgcggcaaggccttcagactgttcagccagctgacccagcaccagagcatccacttcggcgagaagcccttcaagtgcaaggagtgcgagaagaccttcagactgctgagccagctgacccagcaccagagcatccacaccggcgagaagccctacgactgcaaggagtgcggcaaggccttcagactgcacagcagcctgatccagcaccagagaatccacagcggcgagaagccctacaagtgcaaggagtgcaagaaggccttcagacagcacagccacctgacctaccaccagagaatccacaacgtgacctag

SEQ ID NO: 182996 - DNA, 1560 bp, Artificial Sequence
  derived and/or modified sequence
atggcgcgagatctcgtgatgttccgcgatgttgcagtggacttttctcaagaggaatgggaatgcttgaattcttaccaacgaaatctgtaccgggacgtcatcctcgagaattacagcaacctggtgtccctagccggctgttccatctccaaaccagacgtgattacacttcttgagcagggtaaagaaccatggatggtagtccgtgacgagaaacgccggtggacactggatctggaaagcaggtacgacaccaaaaagttatttcagggcaaggatatttacgagatgaacctgagtcagtggaaggttatggagagaattaagtcctgcgggttagaggaacaagagagtcctcatgaagtgtgtttccgacaagtgacaaagactacatcggagaagatgcccacctataggaaattaacgtccctgccactgtatcagaagagtcacaacagagaaaagccctacgaatgtggcgagtgtgggaaggcatttagggtccggcagcaactgacttttcatcaaaggattcacactggggagaaaccctatgagtgcaaagagtgcggcaaggcctttagacaatgtgcccatttgagccggcaccaacggattcacacttcagataaattatacgaatgcaagaagtgcgggaagatttttacatgtgggagcgacttaagagtacatcagcggatacatatcggagaaaagccgtatgagtgtaaagaatgtggcaaagcttttagggttagaggccaactgaatctgcaccagcgcatccacacaggcgagaaaccatacgagtgtaaagagtgcggaaaagcatttaggcagtacgcccacttaacacgccatcaaaggttgaacatcgctgagaagtgctacgaatgtaaagagtgtggacaagcatttttatgctcaacagggttacgactgcatcacaagctccacaccggtgagaaaccctatgaatgcaaggagtgcgggaaagcttttagagtcagacagcagctcactttacatcagaggatccataccggggaaaaaccgtatgactgcaaggaatgtgggaagacattttcccgcgggtatcacttgactctgcaccagcgaattcacactggcgaaaagccttacgagtgcaaggaatgccaaaagttcttcaggcgctactccgagctgattagccatcaggggatccacatcggagaaaaaccttatgagtgtaaggagtgcgggaaggcctttcggctattcagccaactcacacagcaccagagcatacactttggagaaaaaccttttaagtgtaaggagtgtgaaaagacatttcgcttgctctcacaattgacccagcatcaatcaattcatacgggcgaaaagccatacgactgcaaagaatgtgggaaggctttccggctgcattcttcactgatacaacaccagagaatccattctggcgagaaaccctataagtgtaaagaatgtaaaaaggccttccgccaacatagccatctcacttatcatcagcgcatacacaacgtaacttag

SEQ ID NO: 182997 - DNA, 1560 bp, Artificial Sequence
  derived and/or modified sequence
atggcaagggatctcgttatgtttagagatgttgcagtagacttctcccaagaggaatgggagtgtctgaactcctatcagagaaacttatatcgcgatgtgatcctggagaactattcgaatctggtaagccttgccggatgctccatctcgaagccggacgtaattaccctcttggagcagggtaaggaaccatggatggtggtgagagatgagaagcgccggtggactctcgatttggaaagtaggtatgacactaaaaaactattccaggggaaggacatctatgaaatgaacctgagccagtggaaagtaatggaacgcatcaagtcatgcggattggaagagcaggaaagtccccacgaagtgtgttttaggcaggtgaccaaaacaacctcagagaagatgcctacttataggaagcttacatccttaccactatatcagaagtcccacaatcgggagaaaccatacgagtgtggcgagtgtgggaaagctttcagggttagacaacagctgacatttcatcagagaattcacacaggagaaaagccctacgagtgcaaagaatgtggcaaagcatttagacagtgcgcccatctatccagacaccagagaattcacacaagcgataagctgtacgaatgcaagaagtgcggcaagattttcacttgtggaagcgatctgagagtccatcaacgtatacacataggggagaagccttacgagtgtaaagagtgtgggaaggcattccgcgttcgcggccagctgaacctgcatcaacgcatccataccggggaaaaaccatacgaatgcaaggaatgcggtaaagcgtttcgccagtacgcacacctgaccaggcatcagcgcctgaatatcgctgaaaagtgctatgagtgtaaggagtgcggacaggcctttctgtgcagcacagggctgcggctccaccataaactgcataccggtgagaagccctacgagtgcaaggaatgtgggaaggcgttcagggtccgccagcagctgaccctgcaccagagaattcacaccggggaaaaaccttacgattgcaaggagtgtggcaagaccttcagccgggggtatcaccttaccttgcaccagcggatccatacaggcgagaaaccctacgaatgtaaggaatgtcagaaatttttccgacgttatagcgagcttatcagtcaccaggggattcacatcggcgaaaagccctatgagtgtaaggagtgtgggaaggcattcagactgttcagccagctgactcaacaccagtcgattcactttggtgagaaaccgtttaagtgtaaagagtgtgaaaaaacctttcgcctgctgtcccagctcacccaacaccagagcatccacactggcgagaagccttatgattgcaaagaatgcggaaaggcttttagactgcattccagcctgattcagcaccagcgaattcacagtggagagaagccctataagtgtaaggaatgtaaaaaggcatttaggcagcactcacacttgacgtaccatcagcggatccacaacgtgacctag

SEQ ID NO: 182998 - DNA, 1560 bp, Artificial Sequence
  derived and/or modified sequence
atggcccgggatcttgtcatgttcagagacgtcgctgtggacttttcccaggaagagtgggagtgcttaaactcttaccaaaggaatttgtaccgagacgtgattcttgaaaattacagcaacctagtgtcccttgctgggtgcagtatatccaagcctgacgtgataactcttctggagcaaggaaaggaaccgtggatggtggtgagagatgagaagcgaagatggacccttgatctggaatcaaggtacgatactaaaaagctattccagggcaaggacatttatgagatgaatctcagccagtggaaagtcatggagcggattaagtcatgcggactagaagagcaggaaagcccacacgaagtgtgtttccgccaagtcactaagactacatccgagaaaatgcctacctacagaaagctcacgagtctaccgctttaccagaagtctcacaacagggagaaaccatacgaatgtggcgagtgtggaaaggcttttcgggttcgtcagcagctgacatttcatcagaggatccatactggtgaaaaaccatacgagtgtaaggagtgcggtaaagcgtttcggcagtgcgctcatctgagccggcaccaaagaatccacaccagcgataagctgtatgaatgtaaaaaatgtgggaagatatttacctgcggttctgatctcagagttcatcagcgtattcacatcggagagaagccctatgaatgcaaggaatgcggaaaggctttccgggtgaggggccagctgaacctccatcagcggatacacactggtgagaagccatacgagtgtaaggaatgtggaaaggctttccgccagtacgcccacttaacacgacatcagcggctgaacattgccgaaaagtgttatgagtgtaaagagtgtgggcaggctttcctttgcagcacagggctgaggttacaccacaaattgcacaccggggagaagccctatgagtgcaaagagtgtggcaaggccttccgggtcagacagcagctcaccctgcaccaacgaattcacactggagagaagccttatgattgtaaagagtgtggaaagacattctctagaggctaccatctgactctgcatcagcgcattcataccggcgagaaaccatatgagtgcaaggagtgccagaagttctttcgtcggtactccgagctgataagtcaccagggtatacacattggcgagaagccatacgagtgcaaggagtgtggcaaagctttcagacttttctcccagttaacgcagcaccagtcgatccatttcggagagaaaccttttaagtgtaaagagtgcgagaaaacctttagactgctcagccaactcacccaacatcagtccattcataccggggaaaaaccctatgactgcaaggaatgtgggaaagcttttcggctgcattcaagcctgattcagcatcagcgaatccacagcggagagaaaccgtataagtgtaaagagtgtaagaaggccttcagacagcattcacacctgacttatcatcagaggatacataacgtgacttag

SEQ ID NO: 182999 - DNA, 1560 bp, Artificial Sequence
  derived and/or modified sequence
atggcccgggacctggtgatgttcagagatgtggccgtggacttcagccaggaggagtgggagtgcctgaacagctaccagaggaacctgtacagagatgtgatcctggagaactacagcaacctggtgtccctggccggctgcagcatcagcaagccagatgtgatcaccctgctggagcagggcaaggagccctggatggtggtgagagatgagaagaggcgctggaccctggacctggagagccgctatgacaccaagaagctgttccagggcaaggacatctatgagatgaacctgagccagtggaaggtgatggagcgcatcaagagctgtggcctggaggagcaggagagcccccatgaggtgtgcttccggcaggtgaccaagaccaccagcgagaagatgcccacctacaggaagctgaccagcctgcccctgtaccagaagagccacaaccgggagaagccctatgaatgtggggagtgtgggaaggccttccgggtgcggcagcagctgaccttccaccagaggatccacactggagagaagccctatgagtgcaaggaatgtgggaaggccttccggcagtgtgcccacctgagccgccaccagaggatccacaccagtgacaagctgtatgagtgcaagaagtgtgggaagatcttcacctgtggcagtgacctgcgggtgcaccagaggatccacatcggggagaagccctatgagtgcaaggaatgtgggaaggccttccgggtgcggggccagctgaacctgcaccagaggatccacactggagagaagccctatgagtgcaaggaatgtgggaaggccttccggcagtatgcccacctgaccaggcaccagaggctgaacattgctgagaagtgctatgagtgcaaggaatgtggccaggccttcctgtgcagcacaggcctgcggctgcaccacaagctgcacactggagagaagccctatgagtgcaaggaatgtgggaaggccttccgggtgcggcagcagctgaccctgcaccagaggatccacactggagagaagccctatgactgcaaggaatgtgggaagaccttcagccggggctaccacctgaccctgcaccagaggatccacactggagagaagccctatgagtgcaaggagtgccagaagttcttccgccgctacagcgagctgatcagccaccagggcatccacatcggggagaagccctatgagtgcaaggaatgtgggaaggccttccgcctcttcagccagctgacccagcaccagagcatccactttggagagaagcccttcaagtgcaaggaatgtgagaagaccttccggctgctgagccagctgacccagcaccagagcatccacactggagagaagccctatgactgcaaggaatgtgggaaggccttccggctgcacagcagcctcatccagcaccagaggatccacagcggggagaagccctacaagtgcaaggagtgcaagaaggccttccggcagcacagccacctgacctaccaccagaggatccacaacgtgacctag

SEQ ID NO: 183000 - DNA, 1560 bp, Artificial Sequence
  derived and/or modified sequence
atggcccgggacctggtgatgttccgggacgtggccgtggacttctcccaggaggagtgggagtgtctcaactcttatcagaggaatctttacagggatgtcatcctcgaaaactatagcaatttggtctctctggcaggatgctctatctctaagccggatgtaattacattgctggagcagggaaaggaaccgtggatggttgttcgggatgaaaaacgcagatggactctggacttggagtctcgttacgatacaaaaaagttgtttcagggtaaggatatctatgaaatgaacctgtctcagtggaaggtcatggaacggatcaagtcctgtggcctcgaggaacaggagtctcctcacgaagtctgcttcagacaggtgaccaagacaacatcagagaaaatgccgacttatcggaagttaacttcgctacccctgtatcagaagtctcataacagggaaaaaccttatgagtgcggggaatgtggaaaggccttccgggtccgtcagcagctgactttccaccaacgcatacacaccggtgagaagccttatgagtgtaaggagtgcggaaaagctttccgccaatgtgcacacttatcccggcatcagagaattcacacaagcgataaactgtacgaatgcaagaaatgtgggaagattttcacatgcgggtccgacctacgagtgcaccagaggatccacatcggagaaaagccttatgaatgcaaggagtgtgggaaggcgttccgggtgcgcgggcaattgaatcttcaccagcgcatccacacaggtgagaaaccatacgagtgtaaagagtgtggcaaagcctttaggcagtacgcccatcttaccaggcatcagcgactgaacatcgcggagaaatgttacgagtgtaaagaatgcgggcaggcatttctctgttctacaggtctccgcctgcaccataagttgcatacgggggagaagccctatgagtgcaaggaatgcggcaaagcttttagggtgagacagcagctgacacttcaccaaaggatccacaccggagagaaaccttatgactgtaaagaatgtggaaaaacctttagtcgaggttatcacctcaccttgcatcagagaattcacaccggagagaaaccatacgagtgtaaagaatgccagaagtttttcaggcgatattcggagttgatttctcaccagggtattcatatcggggaaaaaccttacgagtgcaaagaatgtggaaaggcttttcgactcttttctcagctgacccaacaccagtcgattcattttggagaaaaacctttcaaatgcaaggaatgcgaaaagaccttccggctgttgtcccagcttacgcaacatcaaagcatccatactggagagaagccttacgattgcaaggaatgtggaaaagcttttcgtcttcactcttcacttatccagcaccaacggatccattctggcgagaaaccatacaagtgcaaagaatgcaaaaaagcatttcggcagcattctcacctgacttatcatcagagaattcacaacgtgacctag

SEQ ID NO: 183001 - DNA, 1560 bp, Artificial Sequence
  derived and/or modified sequence
atggcccgggacctggtgatgttccgggacgtggccgtggacttctctcaggaggaatgggagtgtctgaattcttatcagaggaatttgtaccgcgatgtcattcttgaaaattactctaatcttgtctctctcgccggctgctccatttcaaaaccagatgtgattacgctgcttgagcagggaaaggaaccttggatggtcgtacgtgacgagaagaggcgatggacattggatcttgagtcaaggtatgacactaaaaaactgttccaaggtaaagacatttacgaaatgaatctgagtcagtggaaggtcatggaacgcattaagtcatgtggactcgaagaacaggagagtccacatgaggtgtgcttccgacaggttaccaagactacttcagaaaaaatgcccacctaccgaaaattgacatctctaccactctaccaaaagtctcacaacagggaaaagccatatgagtgtggcgaatgcggcaaggcatttcgggtgcgacagcagctgacattccaccagaggatacacactggagaaaagccttacgagtgcaaagagtgcgggaaagcatttagacaatgcgcacacctatctcggcaccagagaatccatacctctgacaagctttacgaatgcaagaaatgcggaaaaatttttacctgcggcagtgacttgcgggttcaccagcggattcatataggcgagaagccatatgaatgcaaggaatgcggtaaagcctttcgtgtcagagggcaactcaatctgcaccagcgaattcataccggagaaaaaccatatgaatgtaaggagtgtgggaaagcttttcgacagtatgcccatcttactaggcatcagaggctcaatattgccgagaaatgctatgaatgtaaggaatgtggacaagcctttctgtgcagtactgggttacgattgcaccacaaacttcacacaggtgagaaaccatacgagtgtaaagaatgtggcaaggcttttcgggtccgacaacagctcaccttgcaccagcgtatccacaccggggagaaaccctacgactgtaaagagtgtgggaagaccttctcaaggggctaccacttgaccctgcaccagaggatccacacaggcgaaaagccctacgagtgcaaggagtgccagaaattctttagacggtattctgagctaatatctcatcagggtattcacattggcgagaagccttacgaatgtaaggagtgtggcaaagcttttcggttattctcccagctcacgcagcatcagtcaattcactttggggaaaaacctttcaaatgcaaggaatgcgaaaaaacattccgattgctgagccagctcacccagcaccaatctatccatacgggagagaaaccatacgactgtaaagaatgcgggaaggccttccgcctacacagcagtttgatccagcaccagcgcattcacagtggcgagaaaccatacaagtgtaaggaatgcaagaaggcattccgacagcactcacacttgacttatcatcagcggatacataacgtcacatag

SEQ ID NO: 183002 - DNA, 1560 bp, Artificial Sequence
  derived and/or modified sequence
atggcccgggacctggtgatgttccgggacgtggccgtggacttcagtcaggaggagtgggaatgtctaaattcgtatcagcgtaatctgtatagagatgtgatcctggagaattattctaacctggtatccttagcgggttgttcaattagcaagcccgacgtgattacactccttgaacagggaaaggagccgtggatggtggtaagggatgagaaacggcgttggacgctggatttggaatctagatacgacactaaaaagctattccagggcaaggacatctatgagatgaatctgtcccagtggaaggtaatggagcggatcaagtcctgtgggcttgaagaacaagagtctcctcatgaagtctgtttccggcaggttaccaagaccacatctgagaagatgccaacttacagaaaactgacaagtctgcctttgtaccagaaatcccataatagagaaaagccatacgaatgcggtgagtgcggaaaggcgttccgtgtgcgacagcagctgacgtttcatcagcgcatccacactggggagaagccctatgagtgcaaggagtgtggtaaagcgttccgccagtgtgcgcacctgtcccgacatcaacgcattcataccagcgataaattgtatgaatgcaaaaagtgcggcaaaatctttacttgtggttccgacctgagggtccatcagaggatccacatcggagagaaaccctatgaatgtaaagaatgtgggaaagccttccgggtgagaggccagcttaatctccaccagaggatccacactggtgagaaaccatatgaatgtaaggagtgcggaaaagctttccggcagtatgcgcatctcactagacatcagcgcctgaatattgccgaaaagtgttacgaatgcaaggaatgcggacaagcctttctatgctcaacagggcttcgcctccatcataaactgcacacaggcgaaaagccctacgagtgtaaggaatgcgggaaagcgtttcgtgtcaggcagcagctcacacttcatcagcgcattcacactggagagaagccttacgactgtaaagagtgtggcaagacctttagccgaggataccacttaaccctgcaccaaaggatccacacgggcgagaagccctacgaatgtaaagaatgccagaaatttttccgacgctacagcgagttaatatctcaccaggggatacacatcggtgaaaagccttacgagtgcaaggaatgcgggaaagcttttagacttttctcccaactaacccagcatcaatccatacacttcggcgagaagcccttcaaatgtaaggaatgtgagaagacatttcgcctgcttagccagctcacacagcaccagtctatccataccggcgagaagccatacgactgcaaggagtgcggcaaggctttccggttgcactctagcttaattcagcatcaaagaatacacagcggcgaaaaaccctacaaatgtaaggagtgcaaaaaagcctttcggcaacatagtcatctaacctatcatcagagaattcacaacgtgacctag

SEQ ID NO: 183003 - DNA, 1560 bp, Artificial Sequence
  derived and/or modified sequence
atggcacgcgatctggtcatgttcagggacgtagcggtcgacttttctcaggaggagtgggagtgcctgaattcgtatcaaaggaacctatatcgagacgtgatacttgagaactactcaaacctggtatctctggcgggatgctccatttccaagcccgacgtgatcacgctgttagaacagggaaaggaaccatggatggtggttagggatgaaaaacgtcgctggacactggacctggaatcccgttacgatactaaaaagttgtttcaagggaaagacatatatgaaatgaacctgagtcagtggaaagtgatggaacggattaagtcctgtgggttagaagaacaggaatccccacatgaggtatgctttagacaggtgactaagactacgtcggaaaagatgcctacatacagaaaactgactagcttacctctgtaccagaaaagccataaccgcgagaagccctacgagtgtggtgaatgcggtaaggcatttcgtgtaagacagcaactcacgttccaccaacggatccacacaggcgaaaagccatatgaatgtaaggaatgcggaaaagcttttagacagtgtgctcacctgagccggcaccagcggattcataccagtgacaagctctacgagtgcaaaaagtgcggtaaaatatttacctgtggaagcgatcttcgggtgcatcagagaatccatattggggagaagccttacgaatgcaaggagtgcggcaaggccttccgggtcagggggcagctcaatctgcaccagagaattcacactggtgagaaaccctacgaatgcaaagagtgtggtaaggcgttccggcagtatgctcatttgacacggcatcagaggctcaacatagctgaaaaatgctacgagtgcaaagaatgcggtcaggcgttcctctgttcgaccggcctccggctccaccacaaactgcacactggggagaaaccatacgagtgtaaggagtgcggaaaggccttcagagtcaggcagcagcttactctccatcagcggattcatactggagagaaaccatatgactgcaaggaatgtggtaaaaccttttcccgcggataccatctgaccttgcatcagagaatccacaccggtgagaagccctatgaatgcaaggagtgtcagaagttctttcgcagatattccgaactgatttcccaccagggaatacacatcggggaaaagccttacgaatgcaaggagtgtggcaaggccttccggctgttttcccagttgacgcagcatcaaagcattcattttggagagaaaccttttaagtgcaaagaatgtgaaaagacattcagattgctgtctcagctgacccagcatcagtccattcataccggcgaaaagccgtatgattgcaaggagtgtggaaaggcgtttcgcctgcattcttcattaattcagcatcaaagaattcattccggggaaaagccatataaatgcaaggagtgcaaaaaggcttttcgtcagcactcacatttgacttatcatcagaggatacataacgtgacatag

SEQ ID NO: 183004 - DNA, 1560 bp, Artificial Sequence
  derived and/or modified sequence
atggccagagatctggtaatgtttcgggatgtagccgtggacttttcacaggaggagtgggagtgcttgaatagttaccagcgcaatctgtatcgtgatgtgatcctcgagaactacagcaacttagttagtctggccggttgcagcatttctaagcccgatgtgatcaccctgctggagcaaggcaaagaaccttggatggtggtacgggacgagaagaggcgctggaccctggatttggaaagcaggtacgacactaaaaaactctttcagggtaaagacatctacgaaatgaacctcagccagtggaaggtaatggaacggatcaagtcatgcggcctagaggaacaggagagcccacacgaggtgtgtttccgtcaggttactaagactacctccgaaaaaatgcccacctaccgcaaactgaccagcttaccgctgtaccagaagtctcataatcgagagaaaccctatgaatgtggcgagtgcggaaaagcctttagagtgcgacaacagctgacatttcatcaacggattcatactggggaaaagccatacgagtgtaaggaatgcggcaaggcttttagacagtgtgcgcacctctctcgccaccagcgcattcacacatccgacaagctttatgagtgtaagaagtgtggtaagatcttcacttgcggtagcgacctgagggtccatcaacgaattcacatcggcgaaaaaccgtacgagtgcaaagagtgtgggaaggctttccgggtccgcggtcaactcaatttgcaccagcgaattcataccggggaaaaaccatacgagtgcaaggagtgtggaaaagcattccggcagtacgcacacctcacccgccaccaacgcttgaacattgctgaaaaatgctatgagtgtaaggagtgcgggcaggcgttcttgtgtagcacaggcctgcggctgcaccacaaactgcacactggcgagaaaccgtatgaatgcaaggagtgcggaaaggctttccgcgttcggcagcagctgactctacaccagcgtatccatacaggtgaaaaaccttacgactgcaaagaatgtggtaagaccttcagcagagggtaccatctcactctgcatcaaagaatacacacaggcgaaaagccttatgagtgcaaagagtgtcagaagttctttcggagatactctgagctgatctcacaccaagggatccatatcggtgagaagccatacgaatgtaaggaatgtggcaaagcgtttagactgttcagccagctgactcagcatcagtccatccacttcggcgagaaacccttcaaatgtaaggagtgtgagaagacctttcggctgctaagtcagttgacccagcaccagtctattcataccggagagaaaccatatgattgcaaagagtgcggtaaggcattccggctgcactcttccttgattcagcatcagagaatacatagcggggagaaaccatacaagtgtaaggagtgtaaaaaggcctttcgtcagcactcccatcttacttaccatcagaggattcacaacgtgacctag

SEQ ID NO: 183005 - DNA, 1560 bp, Artificial Sequence
  derived and/or modified sequence
atggcacgcgacctggtgatgtttagagatgttgccgtggatttttcacaagaagagtgggaatgtctgaactcgtatcagagaaatctgtacagggatgtgatcctcgaaaactactcgaacctggtgtctctcgccggatgcagcatctctaagcctgatgtcattacactcctggaacagggtaaggagccctggatggtggtgcgtgacgaaaaacggagatggaccctggatcttgagtcccggtatgacactaagaagctctttcagggaaaggacatctatgagatgaatctgtcccagtggaaagttatggaaaggatcaaatcctgcgggcttgaggagcaggaatcccctcacgaggtctgcttccgacaggttaccaagaccacttccgaaaaaatgcccacttataggaaactgacctccttacccctttatcagaaatcacacaacagggagaagccatacgagtgtggcgagtgtggcaaggcctttagggtgcgtcagcaactgaccttccaccagcggatccacactggggagaagccttacgaatgtaaagagtgcggcaaagccttcaggcagtgcgctcatttaagtagacatcaaagaattcacacctcagacaagctctatgaatgcaagaagtgtggcaagatcttcacctgtggctccgacctgcgcgtgcatcagcggatccatatcggggagaagccctatgagtgtaaagaatgcggaaaagcgttcagggtgagagggcagctcaatctgcaccagcggatccacaccggcgaaaagccctacgagtgcaaggaatgcgggaaagcattccgccaatacgcccacctgacaagacaccagcgcctcaatatagccgagaagtgttacgagtgcaaggaatgcggacaggccttcctgtgctcaacaggtctgcgcctacatcacaaactccatactggtgagaaaccgtatgagtgcaaagaatgtgggaaggcatttagagtgagacagcaacttacactgcaccagaggatccatacaggcgagaagccctacgattgcaaagagtgcggcaaaacattctcccgagggtaccacctcactctgcaccagagaatccacacaggcgagaaaccatacgaatgcaaagagtgccaaaaattcttccggaggtacagcgaactgatatcccatcagggcatccatataggagagaagccatatgagtgcaaggagtgtggcaaggcattcagactgttcagccaactgacccagcaccagtctatccattttggggaaaaaccgttcaaatgcaaagagtgcgagaaaacttttcggctcctcagccagcttacacaacaccagtcaatacatacaggtgaaaaaccttatgattgtaaagagtgcggcaaagcgtttagactccactctagtctgatccagcaccaaaggatacattccggagagaaaccttataaatgtaaggagtgcaagaaggccttcagacagcattcccacctgacatatcatcagcggattcacaatgtcacatag

SEQ ID NO: 183006 - DNA, 4611 bp, Artificial Sequence
  derived and/or modified sequence
tggggctgggagccgggcgccactgtggccgctgcttttctgagggaaaagagcgcggagtgggccaggttttgcaggccgggccaaggtggagaaaaggttcctgtggagcctcaggccggtgtgctttttttcccgggactgagcttctgcagccctgaggcctggaggcccgggcggtagtaactgtgccggaccaggttcgtgggtgcggcctgtggtgcagttggagaccgaggccccgcgcatcctcgtccgcgcttcagccacttaggctcggccgtagcgaaaaggcccaagagggaagtcagaggtggcggttagttggggccagggaagcgtggagggtgggttccaatcgagtcaagaaaagcctggggtgtcctgaactctgcctgcttccccagccctgccagtttccagagaaggcgcttgagaaggagaaacgaatcgctgctgctcttctaaaagccggttccctctctggtgtctgtggaccctgcttctgaagtacatgaaccttgaggaaaattgaccagttctagcagttctaaaatcatggctcgtgatttggtgatgttcagagatgtggctgtagacttttctcaggaagaatgggaatgcctgaactcatatcagaggaatttgtacagagatgtgatattagagaactatagcaacttggtgtcactggcaggatgttctatttctaagccagatgtgatcaccctattggaacaagggaaagagccctggatggttgtgagggatgagaaaagaagatggactctagatttggaatccagatatgacactaaaaagttatttcaaggaaaggatatttatgaaatgaacttatctcagtggaaggtaatggaaagaattaaaagctgtggacttgaagaacaagaaagtcctcatgaggtgtgtttcaggcaagtgacaaaaaccacctctgaaaaaatgcctacttacagaaaactcacatctcttcctctgtatcagaaaagtcataacagagagaaaccctacgaatgtggggaatgtgggaaggcttttagagtacgacaacaacttactttccatcaaagaattcatactggtgagaaaccctatgaatgtaaagaatgtggaaaagcctttagacagtgtgcccacctcagtcgacatcagagaattcatacttctgacaaactctatgaatgtaaaaaatgtggaaagatcttcacatgtggctcagaccttcgagtacatcagagaattcatattggtgagaagccgtatgaatgtaaagaatgtgggaaagcctttagagttagaggacaacttaatctccatcaaaggattcacacgggtgagaaaccctatgaatgtaaagaatgtgggaaggcctttaggcagtatgcacaccttactcgacatcagagactgaacattgctgagaagtgctatgagtgtaaggaatgtggtcaggcctttctgtgtagtacaggccttcgactacatcacaaacttcatactggagaaaaaccctatgaatgtaaggagtgtggaaaggcctttagagtgcggcagcaacttactctccatcagagaattcacactggtgagaagccttatgattgtaaggaatgtgggaagactttcagtcgtggctatcatctaactctccatcagagaatacatactggtgaaaagccctatgaatgtaaggaatgtcagaagttctttcgtcgttactcagaacttatttcacatcagggtattcacattggagagaaaccttatgaatgtaaggaatgtgggaaggcatttaggctgttctcacagcttactcaacatcagagtattcattttggtgagaaaccctttaagtgtaaggaatgtgagaagacttttagactgctttcacaacttacccaacatcaaagtattcatactggtgaaaagccctatgactgtaaggaatgtggaaaggcctttagacttcattcatcactgattcaacatcagagaattcattctggtgagaaaccatacaaatgtaaggaatgtaaaaaggcatttagacaacattcacatcttacttaccatcagcgaattcataatgtaacttaataattattagaactcttcctttgcgaattttatgttgagcataggaagtacattctagaggaaaggtttttgaacgtgggaatcccttttgcttcatgctcacaactaagcataggaagttttatttaaaggaaagaatatgttaatgaacatatagaagcctttcatcacctttgaaaccatgttaaactttaggaaattcatcctagaaaagaactttattacaggactgaatgtggaaaagcttttgatcttacctattattatctccatattcttccatctgtgtatatacacacgaaggttgctagggaaccacttcattctgaaaatgtgtaaatgaaaggaaagtcatttagtctgcatttcctgtaggaactgtatttcagggcaaccagaagttaaggaggtaaagttcttctttattagaaaattccaggctaatgaatgcagaaagaataatagaaaattatattagaaaaactattgtgtaacacataatgaaataatggatctaggcatgattctctgtacaggttgacaccattcagtgaaggttgtgaactttatagtgaatagatgagactgacaacgtctgaacccactcatcatctcaacttcacaaaaagcaagagagtaaaaattacgtgcctcctaatgtgctacagtaagatatacacatcttgccaaaaatattgaacctgaatttaagcctcaagagccaactcccagtttagagaaaattcaaggaatggaagagtaaattacatgacacaaaaaggagcaattaaatctaaaataagggtaattctacaagaggaatcacctggtttcccaaccaataaaatggcattttaagaaataaggtggaactcctaggtattgacagacttgagacatcagtcaaatgcaatgaaacagtggtttttacttagatcatgagttgaacaaacatgtaaaagaagagatacttaacaataattgggagaatggaatattgacaatattagataatattaagaaactttgttatgtgtgataatagcattgtggttatgtaaaagtgtatttgttagagataatttctgaagtctatacacaggagatgatatatctggaatgtccttttgttcatacaaaagaaaaatgaggatgaataacaagtttggcaaaatgatggtaacctaagtcttggatacatggtttttatttgttttgtttttgctattctacttttgtgtatttaaaattttccatgatgttcttttaaagatcaaattatccatgaaattatagccagtttaaaatgaattattttaaaaaaaatttctggctgggcccggtggctcatgcctgtaatcccagcactttgggaggccggtgggcagatcatgaggtcaggagttcgagaccagcctgaccatcatggtgaaacctcatctccactaaaaatacaaaaattagccaggcgtggtcacatgcgcctgtaatcccagctactcgggcagctgagacaggagaatcacttgaacccaggaggcagaggttgcagtgagccgagatcacgccattgcactccagcctgggcaacaagagcaaaactctatctcaaagaaaaaaagaaaatttctacatattaaaacttgtggatgttgccaaagctctacacattgggattggaatattaattacactataatgacgataatgtattcaggaagttaaaatgtaggtccacattttatttagttgacctctctatctctatattatagtacccatggtatgcaccttttttttttttttttttgagacggagtctcgctctttcgcccaggctggcgtgcagtggcacagtctcggctcactgcaagctctgcctcccgggttcaagccattctcctccctcagacttccgagtggctgggattacaggcgcccgccaccacaccaggttgatttttgtatttttagtagagatggggtttcaccatgttggccaagctggtctcaactcctgacctcaggtgatccacctgccttggcctcccaaggtgctgggattacaggcgtgagccaccatgcccgactctcacttcatatgtttaaagaatgagtaaaagaaagcaattactactgctaaatgtgggaaataatggactagacctgtactaatatatggtagtcactagcaacctgttgagcacttgaaattgagttattgagcactgaaatgtggctagtccaaattcaaatggtgtttttttgtaaaacacaagattctgaagacttagttattttaaaaaagttaagtatctcaatttttcatattgagtacatattgaaataatattttagatatattggttcaaataaaatacattaaaatgaataacacttttttgtttttaaaattgttataggaaaatttatatatgtagctcacgtatttctattgtcagcgctggcataaacaataaaaagtagacttgg

SEQ ID NO: 183007 - DNA, 3916 bp, Artificial Sequence
  derived and/or modified sequence
gtggccgctgcttttctgagggaaaagagcgcggagtgggccaggttttgcaggccgggccaaggtggagaaaaggttcctgtggagcctcaggccggtgtgctttttttcccgggactgagcttctgcagccctgaggcctggaggcccgggcggtagtaactgtgccggaccaggttcgtgggtgcggcctgtggtgcagttggagaccgaggccccgcgcatcctcgtccgcgcttcagccacttaggctcggccgtagcgaaaaggcccaagagggaagtcagaggtgaacgccccaggatgaaggtcccctgcaaaacgctgggacctagatttggggtggcggttagttggggccagggaagcgtggagggtgggttccaatcgagtcaagaaaagcctggggtgtcctgaactctgcctgcttccccagccctgccagtttccagagaaggcgcttgagaaggagaaacgaatcgctgctgctcttctaaaagccggttccctctctggtgtctgtggaccctgcttctgaagtacatgaaccttgaggaaaattgaccagttctagcagttctaaaatcatggctcgtgatttggtgatgttcagagatgtggctgtagacttttctcaggaagaatgggaatgcctgaactcatatcagaggaatttgtacagagatgtgatattagagaactatagcaacttggtgtcactggcaggatgttctatttctaagccagatgtgatcaccctattggaacaagggaaagagccctggatggttgtgagggatgagaaaagaagatggactctagatttggaatccagatatgacactaaaaagttatttcaaggaaaggatatttatgaaatgaacttatctcagtggaaggtaatggaaagaattaaaagctgtggacttgaagaacaagaaagtcctcatgaggtgtgtttcaggcaagtgacaaaaaccacctctgaaaaaatgcctacttacagaaaactcacatctcttcctctgtatcagaaaagtcataacagagagaaaccctacgaatgtggggaatgtgggaaggcttttagagtacgacaacaacttactttccatcaaagaattcatactggtgagaaaccctatgaatgtaaagaatgtggaaaagcctttagacagtgtgcccacctcagtcgacatcagagaattcatacttctgacaaactctatgaatgtaaaaaatgtggaaagatcttcacatgtggctcagaccttcgagtacatcagagaattcatattggtgagaagccgtatgaatgtaaagaatgtgggaaagcctttagagttagaggacaacttaatctccatcaaaggattcacacgggtgagaaaccctatgaatgtaaagaatgtgggaaggcctttaggcagtatgcacaccttactcgacatcagagactgaacattgctgagaagtgctatgagtgtaaggaatgtggtcaggcctttctgtgtagtacaggccttcgactacatcacaaacttcatactggagaaaaaccctatgaatgtaaggagtgtggaaaggcctttagagtgcggcagcaacttactctccatcagagaattcacactggtgagaagccttatgattgtaaggaatgtgggaagactttcagtcgtggctatcatctaactctccatcagagaatacatactggtgaaaagccctatgaatgtaaggaatgtcagaagttctttcgtcgttactcagaacttatttcacatcagggtattcacattggagagaaaccttatgaatgtaaggaatgtgggaaggcatttaggctgttctcacagcttactcaacatcagagtattcattttggtgagaaaccctttaagtgtaaggaatgtgagaagacttttagactgctttcacaacttacccaacatcaaagtattcatactggtgaaaagccctatgactgtaaggaatgtggaaaggcctttagacttcattcatcactgattcaacatcagagaattcattctggtgagaaaccatacaaatgtaaggaatgtaaaaaggcatttagacaacattcacatcttacttaccatcagcgaattcataatgtaacttaataattattagaactcttcctttgcgaattttatgttgagcataggaagtacattctagaggaaaggtttttgaacgtgggaatcccttttgcttcatgctcacaactaagcataggaagttttatttaaaggaaagaatatgttaatgaacatatagaagcctttcatcacctttgaaaccatgttaaactttaggaaattcatcctagaaaagaactttattacaggactgaatgtggaaaagcttttgatcttacctattattatctccatattcttccatctgtgtatatacacacgaaggttgctagggaaccacttcattctgaaaatgtgtaaatgaaaggaaagtcatttagtctgcatttcctgtaggaactgtatttcagggcaaccagaagttaaggaggtaaagttcttctttattagaaaattccaggctaatgaatgcagaaagaataatagaaaattatattagaaaaactattgtgtaacacataatgaaataatggatctaggcatgattctctgtacaggttgacaccattcagtgaaggttgtgaactttatagtgaatagatgagactgacaacgtctgaacccactcatcatctcaacttcacaaaaagcaagagagtaaaaattacgtgcctcctaatgtgctacagtaagatatacacatcttgccaaaaatattgaacctgaatttaagcctcaagagccaactcccagtttagagaaaattcaaggaatggaagagtaaattacatgacacaaaaaggagcaattaaatctaaaataagggtaattctacaagaggaatcacctggtttcccaaccaataaaatggcattttaagaaataaggtggaactcctaggtattgacagacttgagacatcagtcaaatgcaatgaaacagtggtttttacttagatcatgagttgaacaaacatgtaaaagaagagatacttaacaataattgggagaatggaatattgacaatattagataatattaagaaactttgttatgtgtgataatagcattgtggttatgtaaaagtgtatttgttagagataatttctgaagtctatacacaggagatgatatatctggaatgtccttttgttcatacaaaagaaaaatgaggatgaataacaagtttggcaaaatgatggtaacctaagtcttggatacatggtttttatttgttttgtttttgctattctacttttgtgtatttaaaattttccatgatgttcttttaaagatcaaattatccatgaaattatagccagtttaaaatgaattattttaaaaaaaatttctggctgggattacaggcgtgagccaccatgcccgactctcacttcatatgtttaaagaatgagtaaaagaaagcaattactactgctaaatgtgggaaataatggactagacctgtactaatatatggtagtcactagcaacctgttgagcacttgaaattgagttattgagcactgaaatgtggctagtccaaattcaaatggtgtttttttgtaaaacacaagattctgaagacttagttattttaaaaaagttaagtatctcaatttttcatattgagtacatattgaaataatattttagatatattggttcaaataaaatacattaaaatgaataacacttttttgtttttaaaattgttataggaaaatttatatatgtagctcacgtatttctattgtcagcgctggcataaacaataaaaagtagacttgg

SEQ ID NO: 183008 - DNA, 4440 bp, Artificial Sequence
  derived and/or modified sequence
acagccagcgtcagagtcaggcaccaccgcgcagccttctctgcggcaccatcctaatcccccgctagagaacggcacacgcgcacgcagcagccccgtgcacggaaacactactccgccagcggccaggcactcggtccaggtggcggttagttggggccagggaagcgtggagggtgggttccaatcgagtcaagaaaagcctggggtgtcctgaactctgcctgcttccccagccctgccagtttccagagaaggcgcttgagaaggagaaacgaatcgctgctgctcttctaaaagccggttccctctctggtgtctgtggaccctgcttctgaagtacatgaaccttgaggaaaattgaccagttctagcagttctaaaatcatggctcgtgatttggtgatgttcagagatgtggctgtagacttttctcaggaagaatgggaatgcctgaactcatatcagaggaatttgtacagagatgtgatattagagaactatagcaacttggtgtcactggcaggatgttctatttctaagccagatgtgatcaccctattggaacaagggaaagagccctggatggttgtgagggatgagaaaagaagatggactctagatttggaatccagatatgacactaaaaagttatttcaaggaaaggatatttatgaaatgaacttatctcagtggaaggtaatggaaagaattaaaagctgtggacttgaagaacaagaaagtcctcatgaggtgtgtttcaggcaagtgacaaaaaccacctctgaaaaaatgcctacttacagaaaactcacatctcttcctctgtatcagaaaagtcataacagagagaaaccctacgaatgtggggaatgtgggaaggcttttagagtacgacaacaacttactttccatcaaagaattcatactggtgagaaaccctatgaatgtaaagaatgtggaaaagcctttagacagtgtgcccacctcagtcgacatcagagaattcatacttctgacaaactctatgaatgtaaaaaatgtggaaagatcttcacatgtggctcagaccttcgagtacatcagagaattcatattggtgagaagccgtatgaatgtaaagaatgtgggaaagcctttagagttagaggacaacttaatctccatcaaaggattcacacgggtgagaaaccctatgaatgtaaagaatgtgggaaggcctttaggcagtatgcacaccttactcgacatcagagactgaacattgctgagaagtgctatgagtgtaaggaatgtggtcaggcctttctgtgtagtacaggccttcgactacatcacaaacttcatactggagaaaaaccctatgaatgtaaggagtgtggaaaggcctttagagtgcggcagcaacttactctccatcagagaattcacactggtgagaagccttatgattgtaaggaatgtgggaagactttcagtcgtggctatcatctaactctccatcagagaatacatactggtgaaaagccctatgaatgtaaggaatgtcagaagttctttcgtcgttactcagaacttatttcacatcagggtattcacattggagagaaaccttatgaatgtaaggaatgtgggaaggcatttaggctgttctcacagcttactcaacatcagagtattcattttggtgagaaaccctttaagtgtaaggaatgtgagaagacttttagactgctttcacaacttacccaacatcaaagtattcatactggtgaaaagccctatgactgtaaggaatgtggaaaggcctttagacttcattcatcactgattcaacatcagagaattcattctggtgagaaaccatacaaatgtaaggaatgtaaaaaggcatttagacaacattcacatcttacttaccatcagcgaattcataatgtaacttaataattattagaactcttcctttgcgaattttatgttgagcataggaagtacattctagaggaaaggtttttgaacgtgggaatcccttttgcttcatgctcacaactaagcataggaagttttatttaaaggaaagaatatgttaatgaacatatagaagcctttcatcacctttgaaaccatgttaaactttaggaaattcatcctagaaaagaactttattacaggactgaatgtggaaaagcttttgatcttacctattattatctccatattcttccatctgtgtatatacacacgaaggttgctagggaaccacttcattctgaaaatgtgtaaatgaaaggaaagtcatttagtctgcatttcctgtaggaactgtatttcagggcaaccagaagttaaggaggtaaagttcttctttattagaaaattccaggctaatgaatgcagaaagaataatagaaaattatattagaaaaactattgtgtaacacataatgaaataatggatctaggcatgattctctgtacaggttgacaccattcagtgaaggttgtgaactttatagtgaatagatgagactgacaacgtctgaacccactcatcatctcaacttcacaaaaagcaagagagtaaaaattacgtgcctcctaatgtgctacagtaagatatacacatcttgccaaaaatattgaacctgaatttaagcctcaagagccaactcccagtttagagaaaattcaaggaatggaagagtaaattacatgacacaaaaaggagcaattaaatctaaaataagggtaattctacaagaggaatcacctggtttcccaaccaataaaatggcattttaagaaataaggtggaactcctaggtattgacagacttgagacatcagtcaaatgcaatgaaacagtggtttttacttagatcatgagttgaacaaacatgtaaaagaagagatacttaacaataattgggagaatggaatattgacaatattagataatattaagaaactttgttatgtgtgataatagcattgtggttatgtaaaagtgtatttgttagagataatttctgaagtctatacacaggagatgatatatctggaatgtccttttgttcatacaaaagaaaaatgaggatgaataacaagtttggcaaaatgatggtaacctaagtcttggatacatggtttttatttgttttgtttttgctattctacttttgtgtatttaaaattttccatgatgttcttttaaagatcaaattatccatgaaattatagccagtttaaaatgaattattttaaaaaaaatttctggctgggcccggtggctcatgcctgtaatcccagcactttgggaggccggtgggcagatcatgaggtcaggagttcgagaccagcctgaccatcatggtgaaacctcatctccactaaaaatacaaaaattagccaggcgtggtcacatgcgcctgtaatcccagctactcgggcagctgagacaggagaatcacttgaacccaggaggcagaggttgcagtgagccgagatcacgccattgcactccagcctgggcaacaagagcaaaactctatctcaaagaaaaaaagaaaatttctacatattaaaacttgtggatgttgccaaagctctacacattgggattggaatattaattacactataatgacgataatgtattcaggaagttaaaatgtaggtccacattttatttagttgacctctctatctctatattatagtacccatggtatgcaccttttttttttttttttttgagacggagtctcgctctttcgcccaggctggcgtgcagtggcacagtctcggctcactgcaagctctgcctcccgggttcaagccattctcctccctcagacttccgagtggctgggattacaggcgcccgccaccacaccaggttgatttttgtatttttagtagagatggggtttcaccatgttggccaagctggtctcaactcctgacctcaggtgatccacctgccttggcctcccaaggtgctgggattacaggcgtgagccaccatgcccgactctcacttcatatgtttaaagaatgagtaaaagaaagcaattactactgctaaatgtgggaaataatggactagacctgtactaatatatggtagtcactagcaacctgttgagcacttgaaattgagttattgagcactgaaatgtggctagtccaaattcaaatggtgtttttttgtaaaacacaagattctgaagacttagttattttaaaaaagttaagtatctcaatttttcatattgagtacatattgaaataatattttagatatattggttcaaataaaatacattaaaatgaataacacttttttgtttttaaaattgttataggaaaatttatatatgtagctcacgtatttctattgtcagcgctggcataaacaataaaaagtagacttgg

SEQ ID NO: 183009 - protein, 611 aa, Artificial Sequence
  derived and/or modified sequence
MSIHIVALGNEGDTFHQDNRPSGLIRTYLGRSPLVSGDESSLLLNAASTVARPVFTEYQASAFGNVKLVVHDCPVWDIFDSDWYTSRNLIGGADIIVIKYNVNDKFSFHEVKDNYIPVIKRALNSVPVIIAAVGTRQNEELPCTCPLCTSDRGSCVSTTEGIQLAKELGATYLELHSLDDFYIGKYFGGVLEYFMIQALNQKTSEKMKKRKMSNSFHGIRPPQLEQPEKMPVLKAEASHYNSDLNNLLFCCQCVDVVFYNPNLKKVVEAHKIVLCAVSHVFMLLFNVKSPTDIQDSSIIRTTQDLFAINRDTAFPGASHESSGNPPLRVIVKDALFCSCLSDILRFIYSGAFQWEELEEDIRKKLKDSGDVSNVIEKVKCILKTPGKINCLRNCKTYQARKPLWFYNTSLKFFLNKPMLADVVFEIQGTTVPAHRAILVARCEVMAAMFNGNYMEAKSVLIPVYGVSKETFLSFLEYLYTDSCCPAGIFQAMCLLICAEMYQVSRLQHICELFIITQLQSMPSRELASMNLDIVDLLKKAKFHHSDCLSTWLLHFIATNYLIFSQKPEFQDLSVEERSFVEKHRWPSNMYLKQLAEYRKYIHSRKCRCLVM

SEQ ID NO: 183010 - DNA, 1836 bp, Artificial Sequence
  derived and/or modified sequence
atgagcatacacatagtggctcttggtaacgagggggatactttccatcaggataataggccctccggtctcatccgtacatacctcgggaggagccccctggtcagtggagacgaaagtagcctcctcctgaatgcagcgtcaaccgtggcacggccagtcttcaccgagtatcaggcctccgctttcgggaatgtgaaactagttgtgcacgattgcccagtgtgggatatatttgactctgattggtacacgagccgaaaccttatcggcggcgcagacataatcgtaatcaaatataacgtaaatgacaaatttagcttccatgaagtgaaggataactacatccccgttatcaagagggccctcaactctgttcctgtcattattgccgcagtgggaactagacagaacgaggagctgccatgcacgtgtccgctctgtacaagtgaccgagggagctgtgtgtcaacaaccgaggggattcagctcgctaaagaactaggcgccacatatcttgagcttcattccctggacgatttttatattggcaagtacttcggcggcgtccttgagtacttcatgattcaggctttgaaccagaaaacaagcgaaaagatgaaaaaaaggaaaatgtccaattccttccatggcattcgacctccacagctggaacagcccgagaagatgcccgtgctgaaggccgaagcctcacattataacagcgacctgaacaacttgttgttctgctgtcagtgtgtggatgttgtgttttataatccaaacctgaagaaagttgttgaagcccataaaattgtgttgtgcgcagtgtctcacgtctttatgttgctatttaacgtcaagtctcccacagacattcaagattcttccatcattcggactacacaggatctgtttgcaatcaacagggatacagcctttccaggtgctagccatgagagcagcggaaaccctccactcagagtgatagttaaggacgctctattctgctcttgtttgtctgatatcctcaggttcatctactccggtgcttttcagtgggaggagctggaagaagacattagaaagaagcttaaagactctggagacgtgagcaacgttatagagaaggtgaagtgtattttgaagactcccgggaaaattaactgcctgaggaactgcaagacttaccaggctagaaagcctctatggttttataacacgtccctcaaatttttcctgaacaagcctatgctcgccgatgtagtcttcgaaatccagggcacgacagtgccggcccatcgggccattttagtggcgcgttgtgaggtcatggctgccatgttcaacgggaactacatggaggcaaaatccgttctgattcccgtttatggggtatccaaggaaacctttctgagttttttggagtacctatacacggattcgtgttgcccagccggaatatttcaggcaatgtgcctgttaatatgcgcggaaatgtaccaggtgtccagactgcagcacatttgcgagctgttcatcataactcagctacagtctatgccctcacgggaactggcctcaatgaatctggacattgtggacctgctgaagaaggccaagtttcaccactctgattgccttagtacatggctgttgcattttatagcaactaattatttgatattctctcagaagcccgaatttcaagatttatctgtcgaagagcgctctttcgtcgaaaagcatcgctggccaagcaatatgtatttgaagcagctcgccgagtacagaaagtacattcactccagaaaatgtaggtgcctggtgatgtag

SEQ ID NO: 183011 - DNA, 1836 bp, Artificial Sequence
  derived and/or modified sequence
atgagcatccacatcgtggccctgggcaatgaaggagacaccttccaccaggacaaccggcccagcggcctcatccgcacctacctgggccgcagccccctggtgtctggagatgagagcagcctgctgctgaatgctgccagcacagtggcccggcctgtgttcacagagtaccaggccagcgcctttggaaatgtgaagctggtggtgcatgactgccctgtgtgggacatctttgacagcgactggtacaccagcaggaacctgattggaggagctgacatcatcgtcatcaagtacaacgtgaatgacaagttctccttccacgaggtgaaggacaactacatccctgtgatcaagagggccctgaacagcgtgcctgtgatcatcgctgctgtgggcacccggcagaatgaggagctgccctgcacctgccccctgtgcaccagtgaccggggcagctgtgtgtccaccacagagggcatccagctggccaaggagctgggcgccacctacctggagctgcacagcctggatgacttctacatcggcaagtactttggaggagtgctggagtacttcatgatccaggccctgaaccagaagaccagcgagaagatgaagaagaggaagatgagcaacagcttccacggcatccggcccccccagctggagcagcctgagaagatgcctgtgctgaaggccgaggccagccactacaacagcgacctgaacaacctgctcttctgctgccagtgtgtggatgtggtgttctacaaccccaacctgaagaaggtggtggaggcccacaagatcgtgctgtgtgctgtgagccacgtgttcatgctgctcttcaacgtgaagagccccacagacatccaggacagcagcatcatccgcaccacccaggacctgtttgccatcaacagagacacagccttccctggggccagccatgagagcagcggcaacccccccctgcgggtcatcgtgaaggatgccctcttctgcagctgcctgagtgacatcctgcgcttcatctacagcggggccttccagtgggaggagctggaggaggacatcaggaagaagctgaaggacagcggagatgtgtccaatgtgattgagaaggtgaagtgcatcctgaagaccccaggcaagatcaactgcctgaggaactgcaagacctaccaggccaggaagcccctgtggttctacaacaccagcctgaagttcttcctgaacaagcccatgctggctgatgtggtgtttgagatccagggcaccaccgtgcctgcccaccgggccatcctggtggcccgctgtgaggtgatggccgccatgttcaacggcaactacatggaggccaagtctgtgctgatccctgtgtatggagtgtccaaggagaccttcctgtccttcctggagtacctgtacacagacagctgctgcccagctggcatcttccaggccatgtgcctgctgatctgtgccgagatgtaccaggtgtcccggctgcagcacatctgtgagctgttcatcatcacccagctgcagagcatgcccagccgggagctggcctccatgaacctggacatcgtggacctgctgaagaaggccaagttccaccacagcgactgcctgagcacctggctgctgcacttcatcgccaccaactacctgatcttcagccagaagccagagttccaggacctgtctgtggaggagaggagctttgtggagaagcaccgctggcccagcaacatgtacctgaagcagctggccgagtacaggaagtacatccacagcaggaaatgtcgctgcctggtgatgtag

SEQ ID NO: 183012 - DNA, 1836 bp, Artificial Sequence
  derived and/or modified sequence
atgagcatccacatcgtggccctgggcaacgagggcgacaccttccaccaggataacaggccgtccggactgattcgaacttatttgggcagatcccccctggttagtggcgacgagtctagcctgcttctgaatgccgcgagtactgttgcacgcccagtattcaccgaataccaagcttctgctttcgggaacgtgaaactcgtggtacatgattgtcccgtgtgggacatcttcgactccgattggtatacttcccgaaatctaatcggaggagccgatatcatcgttattaagtataacgtaaacgacaagttctcttttcacgaagtcaaggataattacataccagttatcaaaagggctctcaatagcgtgccagtaattatcgctgccgtggggacacggcagaacgaggagcttccttgtacttgccctctgtgtacgtcagaccggggaagttgcgtctctacaacagagggtatccagcttgcaaaggagctgggtgcgacatacctggaactgcactccctggatgacttctatatagggaaatatttcggtggtgttctggagtattttatgattcaagctcttaaccagaagacttccgagaaaatgaagaaacgtaaaatgagtaattcattccatggaatccggcccccacaattagaacaacccgaaaagatgccagtcctgaaagctgaggccagccactacaactccgacctgaacaacttgctcttctgctgccagtgcgtggatgtggttttttacaaccccaacttaaaaaaagtggtggaggctcacaagattgttttgtgtgcagtttctcatgtgttcatgctgctgttcaacgtgaaatcccccacggacatccaggattccagcattatcagaaccacgcaggacctatttgccataaatcgggacactgcttttccaggggcgtcccatgagagcagcggcaacccacctcttcgagtcatagtgaaagatgctctgttctgtagctgtctttcagatatccttcggtttatttattcaggggcattccaatgggaagagttagaagaagacattcgcaagaaactcaaggactctggcgacgtcagcaacgtcatcgaaaaggtgaagtgcatcctgaaaactcccggaaagattaactgtctgagaaactgcaagacataccaagcccgcaagcccctgtggttctataacacatccctcaagtttttccttaataagccaatgcttgccgatgttgtgtttgagatacaggggactaccgtgccggcccaccgtgccattcttgtggctcggtgtgaagtcatggccgcgatgtttaacggaaactatatggaagcaaagagtgttcttattcctgtgtacggcgtgagcaaagaaacttttctgtctttcttggaatatctgtacacagattcctgttgcccagctggcatattccaggcgatgtgcctgctcatctgcgcggagatgtatcaggtttcccgactgcagcatatttgtgaacttttcataattacccagttacaatcaatgccgtctagggagctggcttcaatgaatttagacatagtggatctgttgaagaaagcgaagtttcaccactcagattgcctgtccacatggctgctgcacttcatagccactaattacctaatcttttcgcagaagcctgagttccaggacttgtctgtggaggagaggagttttgtggagaagcacaggtggccgtcaaatatgtatctgaagcaacttgccgaataccgcaaatacattcattcgcggaagtgccggtgtcttgttatgtag

SEQ ID NO: 183013 - DNA, 1836 bp, Artificial Sequence
  derived and/or modified sequence
atgtccatccatatagtcgccctgggtaatgagggcgacaccttccaccaggacaacaggcctagtggccttattcgtacttacttggggcgttcaccactggtgtctggggatgagagctctctcctactgaatgccgctagcacagtggccaggcccgtttttactgagtaccaagcaagcgcctttggaaacgtcaaactggttgtacacgattgccctgtgtgggatatttttgattcagactggtacactagcaggaacctcataggcggagccgatataatcgtgatcaaatataacgttaacgacaaattcagtttccacgaagtgaaagataactacattcctgtgatcaagagggcactcaacagcgttcccgtcatcattgccgcagtagggacaagacagaacgaggaactgccctgtacttgtccgctgtgtacctctgacagagggagctgcgtgtccaccacagaggggattcagttggcgaaggagttgggggctacctatctggagttgcactcgctggacgacttttatataggtaaatacttcgggggtgtgctggaatattttatgattcaggctctgaatcagaagacatcagaaaagatgaagaagcgtaagatgagcaacagttttcacggcattcggccacctcagctggaacaacctgagaagatgcccgtcctgaaagcagaggccagccattacaactccgatctgaacaacctcttgttctgctgccagtgcgttgacgtcgtcttctacaatcccaacctcaaaaaagtagtggaggcacataagattgtgctgtgcgccgtcagtcatgtcttcatgctcctgttcaatgtgaaatccccaactgacatccaggacagcagcattattcgcaccacacaggacttgtttgccattaaccgtgatactgctttccctggagcatcacacgagtcgtccggcaatccaccattgagggtcattgtaaaggatgctctgttctgttcatgtctctccgacatactgagattcatttacagcggtgcctttcagtgggaggaactggaagaagatatccgtaagaagctaaaggatagcggtgacgtctccaatgtgatagaaaaagtaaaatgcattctcaagactccgggtaagattaattgtctgaggaattgcaaaacctaccaagccaggaagccattgtggttctataacacttccctcaaatttttcctaaacaaacctatgctggccgatgtggtgtttgagattcaaggaacaaccgttcccgcacatcgggctatcctcgtggcgagatgcgaggtgatggctgccatgtttaacggcaactacatggaggctaagtctgtattgatcccggtctacggggtgagtaaagaaactttccttagctttttagaatatttgtataccgacagctgctgtcctgccggtatcttccaggctatgtgcctgttgatctgtgccgagatgtatcaagtctcccgactgcagcacatctgcgagttgtttattattacacagctacagtcgatgccgtctagggagctagcctcaatgaacctcgatattgtggatctactcaaaaaggccaagttccatcattcagactgtctttctacttggttactacattttattgccaccaattatctgattttttcccagaagcctgagttccaggacctgtctgtagaagaacgcagcttcgtggaaaaacacaggtggccaagtaacatgtacctcaagcaactagccgagtaccggaagtacattcactcccgcaagtgtcgatgcctggtgatgtag

SEQ ID NO: 183014 - DNA, 5537 bp, Artificial Sequence
  derived and/or modified sequence
ccgccaccggagctcccggggcctccgcggggagcgcgtcccccgcatccgcccgacccccggggctggcacgtgctgcgcccggtccgctgagggggcggaggccccgatctccccgaccccccttctctgcttagaggaggaggagcagcggcagcggcagcaggaggcgacagctgccagccgaggaggcgcggcggagaggggactgcggtcagctgcgtccacttggggctgtgcggcggtcccgcgcccggcgatgttcccgggcactccctgagtagcggcagcttatcccccgcccgctagcccgccctggtccccggctcgctcgctggctggcgcggccccggccccgctctgcgtcggccccgccgcggtggaggcgcgcgagggggacgcggccggggatgagcggattgcgggtgaactcgccgcccgggggccccgcgaagccgtgagccgctgcttttctccgagtcgccgccctgcccttggatttgagatcatgtccatccacatcgtggcgctggggaacgagggggacacattccaccaggacaaccggccgtcggggcttatccgcacttacctggggagaagccctctggtctccggggacgagagcagcttgttgctgaacgcggccagcacggtcgcgcgtccggtgttcaccgagtatcaggccagtgcgtttgggaatgtcaagctggtggtccacgactgtcccgtctgggacatatttgacagtgattggtacacttctcgaaatctaattgggggcgctgacatcattgtgatcaaatacaacgttaatgacaagttttcattccatgaagtaaaggataattatattccagtgataaaaagagcattaaattcagttccagtaattattgctgctgttggtaccagacaaaatgaagagttaccttgtacatgcccactatgtacctcagacagagggagctgtgttagtacaactgaagggatccaacttgcaaaagaactaggagcgacctatcttgaactccacagccttgatgacttctacataggaaagtattttggaggagtgttggagtattttatgattcaagccttaaatcagaagacaagtgaaaaaatgaagaaaagaaaaatgagcaactcctttcatggaattagaccacctcaacttgaacaaccagaaaaaatgcctgtcttaaaggctgaagcgtcacattataactctgacttaaataacttgctgttctgctgccagtgtgtggacgtggtattttacaaccccaatttaaagaaagttgtagaggcccacaagatcgttctctgcgctgtaagccatgttttcatgctgcttttcaatgtgaagagtcccactgacattcaggattccagtatcatccgaactacccaggatctttttgctataaacagagatactgcatttccaggtgctagccatgaatcttcaggcaacccaccattacgagtcattgttaaagacgccctcttctgttcttgtttatcagacatccttcgcttcatttattcaggtgcttttcagtgggaagaattggaagaagatatcaggaagaagttgaaagattctggggatgtttcaaatgtaatcgagaaagttaaatgcattttaaaaacaccaggaaagattaattgcctaaggaattgcaaaacctatcaagccagaaaacctttgtggttttataacacttccctcaagtttttccttaataagccgatgcttgccgatgttgtcttcgaaattcaaggtacgacagtgccagcccacagggccatcctggtggcccgttgtgaagtgatggcagccatgtttaatggtaattacatggaagcaaagagtgtcctgattcccgtttatggtgtttccaaagagactttcttgtcatttttagaatacctgtacacagactcctgctgcccagctggcatattccaggccatgtgtctcctgatctgtgccgagatgtaccaagtgtccagactgcagcacatctgtgagctgttcatcattacccagctgcagagcatgccaagcagggaactggcatccatgaaccttgatatagttgacctgcttaaaaaggccaagtttcaccactctgattgcctttcaacctggctacttcatttcattgctactaactacctcatcttcagtcaaaagcctgaatttcaggatctttcagtggaagaacgcagttttgttgaaaagcacagatggccgtcgaatatgtacttgaagcagcttgcggaatacaggaagtatattcactcccggaaatgtcgttgcttagtaatgtaacctggagcttttatacactacatttcttttttattattatgaagaatgggatacctccaggttccagtaaaattcttctgaccgaaaccaatgtgggtgttagaaaaattaccatatagcttaatatgtttattagttctctttggaaaaaaactaccactgtggtcttaaaagggaacaaaatataccataggctaaaactaaggctttcactctagaatgcaaagctgttttgcagctgttttcccttaaagatgtcctgttgctttagtgatatttagacccctctcagttaagaaatgcttagattaaaaaaaaaaaattacgtaggattaatacagaaatttaatcatgtctgattaattgctctattaaaataaggggcatttaaagacccagcataaccatttgtataatgagaaatctaggggaaaaccaatcagtccaacatgagattttaggaatagaaatttgccggccatttggaaagtgaaatgccacttagttctcaattgatgacagtgtttgaatcatcataaaaaaaatacctgcttttcatctggacaacccaattgagccactttatctccttttggcaatctgagtaggcggggaacctaggcagggctggctttcttagcgtgtaacttgtgtagcagcacagggcccacacttagaaggaccccacacttggttcaaggctctgctatagcggaaattcttaataatgtttgaagaagggccccatgatttcattttgtgctgagccctcaaaattatgtctgtttcgtggtgggaaatatcctatgttttcttgctcaaacacctttctctctgaaagcagaaaaaggcactgatataaagggaagagaaggaggctcaccggagggaagagaacatagtgaagattcccgcctttggggaggtctggaccacccagggcctccactgccaccttggctggcaagggagaaatgtgttgtgttgtcttagctttaaaacagtcacagttcttgctctatcatagatgaacaaatactttcttgatcattctgtaagaccaggaggttggtaagagtgactaaccagcctaactttaatacacatgtataaagatgttcacagagaaagatgctctgtagagaatttgctaccgaagttggctcaagaatttgtttttagtgttatttaccaagattaggacgtcagtggcttaaattctttgaattcttttcaaggactgcaagattatttgataaagagtagcatgaatcttgtgctctaatattacacagtaagttcaaagaaaggatgtaagtcaaagacttgttacatagagggaaaatggactgggatagaggacagactgatagtttctttctttcatatcacatgtatagagaaataattatatcagaaactcacaaacctagacatggaaaaacagattactgtctattgtcagcatcattttcatctgtaagtcactactggaatatatttttcttttaatttccagtgactttagaatacacacagtttttccgacttttcaaaaatttgattaaatggttttatagtataatattgggaccccataccgttagcccttgtatgtataccaacactgccaaagtaaaacattaggtcaggcatggtggctcaggcctgtaatcccagcattttgggaggctgaggcaagtggataacttgaggtcatgagttcgaaaccagcctggccaaaacagtgaaaccccgtctctactaaaaatacaaaattagccagatgtggtggcgcacacctgtaatcccagctactcaggaagctgaggcaggaaaatcgcttgaacctgggaggtggaagttgcagtgagccgagatcgcaccactgcactccagcctgggtgacaagagcgaaactccatctcaaaaaaaaaaaaaaaaccaaagtgaaacactaaaaattccctatagatatattccaggaaatattttaattgggctgattttaattaggctgtatcattgatgattactggaatcgattttatgtcttttgtattttaatcacttgagttaatcaaccactggcaaatcccatttgacaaagattagcattgtaaaaaacagatactgtggtagatttctagaaattcattcacatttaagacttctaaaatggaataatagccttttgtttttcatgagcatattcgcacccctatatgaattacagcatttaaagttcaaaatcagtaacttttaatctaggaaattgaaaaatattaagttgcaaagcaaaaaaaggtattttcttgaaaatactatttaatgtttaactagactataggtagttccttaaggttgtttgacctgaagtggagttgggtttggaagctggtgcccagttggtgtggagtgtgtagttttgttatgaaagttctctaccacctacctgtgtgagtgacaccaacatccagatgtcacagctctccagagctagtcagaagagaaatcaaattagtgtttaaacccatttgcatattgacttgtcagtacctttaactcaatttaatataacaagaaatcgtaaaatacttataacctatcttagagaaatgagtgctggttttgagagttgttttttaactgaaagattatttctagatgggtagtgctttgtgctggtttctgcttccatatatttcccagtcattttaattagagaagatactctatggtagaactaaggcctttcctttcttggccaaagtctttaccctatttaaccctttgtatatttctgactgctcactgttcatattataggggaccagatttgtaatatagaattctccataacatgaatgaaattaattctgtccaagccagcatggtggcttcatattaagtagtaacagaagtctgaacaattggataaatttgacttccaagacagctaaacttttcaactgcaattttaaaaactacactacactgttatagttaatctgacaaaaatgtcctcaaagagtactttattttatttaaagcatctgtttaattcaacctttaataattttgcaaagaagggtatgtgtgtattttaatatagcctgacctgaatttatatgtttttagctttagtatttaactttttgtaacaaataaaccttttttaaaacaagtttaa

SEQ ID NO: 183015 - DNA, 1836 bp, Artificial Sequence
  derived and/or modified sequence
atgagcatccacatcgtggccctgggcaacgagggcgacaccttccaccaggacaacagacccagcggcctgatcagaacctacctgggcagaagccccctggtgagcggcgacgagagcagcctgctgctgaacgccgccagcaccgtggccagacccgtgttcaccgagtaccaggccagcgccttcggcaacgtgaagctggtggtgcacgactgccccgtgtgggacatcttcgacagcgactggtacaccagcagaaacctgatcggcggcgccgacatcatcgtgatcaagtacaacgtgaacgacaagttcagcttccacgaggtgaaggacaactacatccccgtgatcaagagagccctgaacagcgtgcccgtgatcatcgccgccgtgggcaccagacagaacgaggagctgccctgcacctgccccctgtgcaccagcgacagaggcagctgcgtgagcaccaccgagggcatccagctggccaaggagctgggcgccacctacctggagctgcacagcctggacgacttctacatcggcaagtacttcggcggcgtgctggagtacttcatgatccaggccctgaaccagaagaccagcgagaagatgaagaagagaaagatgagcaacagcttccacggcatcagacccccccagctggagcagcccgagaagatgcccgtgctgaaggccgaggccagccactacaacagcgacctgaacaacctgctgttctgctgccagtgcgtggacgtggtgttctacaaccccaacctgaagaaggtggtggaggcccacaagatcgtgctgtgcgccgtgagccacgtgttcatgctgctgttcaacgtgaagagccccaccgacatccaggacagcagcatcatcagaaccacccaggacctgttcgccatcaacagagacaccgccttccccggcgccagccacgagagcagcggcaacccccccctgagagtgatcgtgaaggacgccctgttctgcagctgcctgagcgacatcctgagattcatctacagcggcgccttccagtgggaggagctggaggaggacatcagaaagaagctgaaggacagcggcgacgtgagcaacgtgatcgagaaggtgaagtgcatcctgaagacccccggcaagatcaactgcctgagaaactgcaagacctaccaggccagaaagcccctgtggttctacaacaccagcctgaagttcttcctgaacaagcccatgctggccgacgtggtgttcgagatccagggcaccaccgtgcccgcccacagagccatcctggtggccagatgcgaggtgatggccgccatgttcaacggcaactacatggaggccaagagcgtgctgatccccgtgtacggcgtgagcaaggagaccttcctgagcttcctggagtacctgtacaccgacagctgctgccccgccggcatcttccaggccatgtgcctgctgatctgcgccgagatgtaccaggtgagcagactgcagcacatctgcgagctgttcatcatcacccagctgcagagcatgcccagcagagagctggccagcatgaacctggacatcgtggacctgctgaagaaggccaagttccaccacagcgactgcctgagcacctggctgctgcacttcatcgccaccaactacctgatcttcagccagaagcccgagttccaggacctgagcgtggaggagagaagcttcgtggagaagcacagatggcccagcaacatgtacctgaagcagctggccgagtacagaaagtacatccacagcagaaagtgcagatgcctggtgatgtag

SEQ ID NO: 183016 - protein, 1166 aa, Artificial Sequence
  derived and/or modified sequence
MDGRTPRPQDAPARRKPKAKAPLPPAETKYTDVSSAADSVESTAFIMEQKENMIDKDVELSVVLPGDIIKSTTVHGSKPMMDLLIFLCAQYHLNPSSYTIDLLSAEQNHIKFKPNTPIGMLEVEKVILKPKMLDKKKPTPIIPEKTVRVVINFKKTQKTIVRVSPHASLQELAPIICSKCEFDPLHTLLLKDYQSQEPLDLTKSLNDLGLRELYAMDVNRESCQISQNLDIMKEKENKGFFSFFQRSKKKRDQTASAPATPLVNKHRPTFTRSNTISKPYISNTLPSDAPKKRRAPLPPMPASQSVPQDLAHIQERPASCIVKSMSVDETDKSPCEAGRVRAGSLQLSSMSAGNSSLRRTKRKAPSPPSKIPPHQSDENSRVTALQPVDGVPPDSASEANSPEELSSPETFHPGLSSQEQCTAPKLMEETSVFECPGTPEAAITSLTSGISSDYSLEEIDEKEELSEVPKVEAENISPKSQDIPFVSTDIINTLKNDPDSALGNGSGEFSQNSMEEKQETKSTDGQEPHSVVYDTSNGKKVVDSIRNLKSLGPNQENVQNEIIVYPENTEDNMKNGVKKTEINVEGVAKNNNIDMEVERPSNSEAHETDTAISYKENHLAASSVPDQKLNQPSAEKTKDAAIQTTPSCNSFDGKHQDHNLSDSKVEECVQTSNNNISTQHSCLSSQDSVNTSREFRSQGTLIIHSEDPLTVKDPICAHGNDDLLPPVDRIDKNSTASYLKNYPLYRQDYNPKPKPSNEITREYIPKIGMTTYKIVPPKSLEISKDWQSETIEYKDDQDMHALGKKHTHENVKETAIQTEDSAISESPEEPLPNLKPKPNLRTEHQVPSSVSSPDDAMVSPLKPAPKMTRDTGTAPFAPNLEEINNILESKFKSRASNAQAKPSSFFLQMQKRVSGHYVTSAAAKSVHAAPNPAPKELTNKEAERDMLPSPEQTLSPLSKMPHSVPQPLVEKTDDDVIGQAPAEASPPPIAPKPVTIPASQVSTQNLKTLKTFGAPRPYSSSGPSPFALAVVKRSQSFSKERTESPSASALVQPPANTEEGKTHSVNKFVDIPQLGVSDKENNSAHNEQNSQIPTPTDGPSFTVMRQSSLTFQSSDPEQMRQSLLTAIRSGEAAAKLKRVTIPSNTISVNGRSRLSHSMSPDAQDGH

SEQ ID NO: 183017 - DNA, 3501 bp, Artificial Sequence
  derived and/or modified sequence
atggacggcagaacccccagaccccaggacgcccccgccagaagaaagcccaaggccaaggcccccctgccccccgccgagaccaagtacaccgacgtgagcagcgccgccgacagcgtggagagcaccgccttcatcatggagcagaaggagaacatgatcgacaaggacgtggagctgagcgtggtgctgcccggcgacatcatcaagagcaccaccgtgcacggcagcaagcccatgatggacctgctgatcttcctgtgcgcccagtaccacctgaaccccagcagctacaccatcgacctgctgagcgccgagcagaaccacatcaagttcaagcccaacacccccatcggcatgctggaggtggagaaggtgatcctgaagcccaagatgctggacaagaagaagcccacccccatcatccccgagaagaccgtgagagtggtgatcaacttcaagaagacccagaagaccatcgtgagagtgagcccccacgccagcctgcaggagctggcccccatcatctgcagcaagtgcgagttcgaccccctgcacaccctgctgctgaaggactaccagagccaggagcccctggacctgaccaagagcctgaacgacctgggcctgagagagctgtacgccatggacgtgaacagagagagctgccagatcagccagaacctggacatcatgaaggagaaggagaacaagggcttcttcagcttcttccagagaagcaagaagaagagagaccagaccgccagcgcccccgccacccccctggtgaacaagcacagacccaccttcaccagaagcaacaccatcagcaagccctacatcagcaacaccctgcccagcgacgcccccaagaagagaagagcccccctgccccccatgcccgccagccagagcgtgccccaggacctggcccacatccaggagagacccgccagctgcatcgtgaagagcatgagcgtggacgagaccgacaagagcccctgcgaggccggcagagtgagagccggcagcctgcagctgagcagcatgagcgccggcaacagcagcctgagaagaaccaagagaaaggcccccagcccccccagcaagatccccccccaccagagcgacgagaacagcagagtgaccgccctgcagcccgtggacggcgtgccccccgacagcgccagcgaggccaacagccccgaggagctgagcagccccgagaccttccaccccggcctgagcagccaggagcagtgcaccgcccccaagctgatggaggagaccagcgtgttcgagtgccccggcacccccgaggccgccatcaccagcctgaccagcggcatcagcagcgactacagcctggaggagatcgacgagaaggaggagctgagcgaggtgcccaaggtggaggccgagaacatcagccccaagagccaggacatccccttcgtgagcaccgacatcatcaacaccctgaagaacgaccccgacagcgccctgggcaacggcagcggcgagttcagccagaacagcatggaggagaagcaggagaccaagagcaccgacggccaggagccccacagcgtggtgtacgacaccagcaacggcaagaaggtggtggacagcatcagaaacctgaagagcctgggccccaaccaggagaacgtgcagaacgagatcatcgtgtaccccgagaacaccgaggacaacatgaagaacggcgtgaagaagaccgagatcaacgtggagggcgtggccaagaacaacaacatcgacatggaggtggagagacccagcaacagcgaggcccacgagaccgacaccgccatcagctacaaggagaaccacctggccgccagcagcgtgcccgaccagaagctgaaccagcccagcgccgagaagaccaaggacgccgccatccagaccacccccagctgcaacagcttcgacggcaagcaccaggaccacaacctgagcgacagcaaggtggaggagtgcgtgcagaccagcaacaacaacatcagcacccagcacagctgcctgagcagccaggacagcgtgaacaccagcagagagttcagaagccagggcaccctgatcatccacagcgaggaccccctgaccgtgaaggaccccatctgcgcccacggcaacgacgacctgctgccccccgtggacagaatcgacaagaacagcaccgccagctacctgaagaactaccccctgtacagacaggactacaaccccaagcccaagcccagcaacgagatcaccagagagtacatccccaagatcggcatgaccacctacaagatcgtgccccccaagagcctggagatcagcaaggactggcagagcgagaccatcgagtacaaggacgaccaggacatgcacgccctgggcaagaagcacacccacgagaacgtgaaggagaccgccatccagaccgaggacagcgccatcagcgagagccccgaggagcccctgcccaacctgaagcccaagcccaacctgagaaccgagcaccaggtgcccagcagcgtgagcagccccgacgacgccatggtgagccccctgaagcccgcccccaagatgaccagagacaccggcaccgcccccttcgcccccaacctggaggagatcaacaacatcctggagagcaagttcaagagcagagccagcaacgcccaggccaagcccagcagcttcttcctgcagatgcagaagagagtgagcggccactacgtgaccagcgccgccgccaagagcgtgcacgccgcccccaaccccgcccccaaggagctgaccaacaaggaggccgagagagacatgctgcccagccccgagcagaccctgagccccctgagcaagatgccccacagcgtgccccagcccctggtggagaagaccgacgacgacgtgatcggccaggcccccgccgaggccagccccccccccatcgcccccaagcccgtgaccatccccgccagccaggtgagcacccagaacctgaagaccctgaagaccttcggcgcccccagaccctacagcagcagcggccccagccccttcgccctggccgtggtgaagagaagccagagcttcagcaaggagagaaccgagagccccagcgccagcgccctggtgcagccccccgccaacaccgaggagggcaagacccacagcgtgaacaagttcgtggacatcccccagctgggcgtgagcgacaaggagaacaacagcgcccacaacgagcagaacagccagatccccacccccaccgacggccccagcttcaccgtgatgagacagagcagcctgaccttccagagcagcgaccccgagcagatgagacagagcctgctgaccgccatcagaagcggcgaggccgccgccaagctgaagagagtgaccatccccagcaacaccatcagcgtgaacggcagaagcagactgagccacagcatgagccccgacgcccaggacggccactag

SEQ ID NO: 183018 - DNA, 4898 bp, Artificial Sequence
  derived and/or modified sequence
cggcgcccgcgggctgggagccggggcccgcaggtggaagcgcacccgggaggcgggccggccggggctggagcggctcgggcgggctcttgacgctcagccagcttcgctccggcctcgggaaggcgcgcgtcccgccctgacccgccggcctctcccaccccagcagtgacgcgccgcctgggagctggagcccgcgcagcgccccgcagggcgatggacggccgaaccccgcgcccgcaggacgccccagccaggagaaaaccaaaagccaaggcaccacttcctccagctgagaccaaatatactgatgtctcttcagctgctgattctgtagaatccactgctttcatcatggaacagaaagaaaacatgatagataaagacgttgaactctcagtggtcctacctggggatattatcaaatctactactgttcatggcagtaaacctatgatggacttgttgatattcctttgtgcacagtatcacttaaatccatcaagttacacaatcgatctgttgtcagctgaacagaaccacattaaatttaagccaaacacaccaataggaatgttggaggtagagaaggtaattttaaagccaaaaatgttggataagaaaaaacctacacctataataccagagaaaactgtgagagtagtgattaattttaagaaaacacagaagaccatagtgagagtgagtccacatgcatcgcttcaagagcttgcccctattatatgtagcaaatgtgagtttgatccgttgcatacactattgttgaaagattatcaatcgcaggagcctcttgacttgacaaaatctcttaatgacctgggactaagagaattatatgcgatggatgtcaacagagagtcctgccaaatatcacaaaacctagatattatgaaggagaaagaaaataaagggtttttcagtttttttcaacgcagtaagaaaaagcgagaccaaactgcaagtgcccctgcaacccctctagtaaataagcaccgcccaacttttacaaggtccaataccatttccaaaccatatatttccaacaccctgccgtcggatgcacccaagaagaggcgggctccactgcccccgatgccagcatctcagagtgtcccccaagaccttgcacacatccaggagaggcctgcttcttgtatagtgaaatccatgagcgtggatgagacagataagagtccctgtgaagcaggaagagtgagggcaggttcactgcagctcagcagcatgtctgcagggaattcatctttgagaaggacaaagcgaaaagcaccttccccaccctccaaaatacccccgcatcaaagtgatgaaaatagtcgtgtgactgccttacagccagtagatggagttcctccagacagtgcttcagaagcaaactctcctgaggagctatccagcccagaaacctttcaccctgggctttccagtcaggagcagtgcactgcgcccaaactgatggaggaaacctctgtctttgagtgccctgggacacctgaggcagccataacatcattgacatctggaataagctctgattatagccttgaagagatagatgaaaaggaagaactgagtgaagtgcctaaagttgaagctgaaaatatttctccgaagtcacaagatattccttttgtatctactgatataataaatacactgaaaaatgatcctgactcagcccttggcaatggtagtggagagttctcacaaaactccatggaagaaaaacaagaaactaaaagcacagatggacaagaaccacacagtgtagtatatgatacaagcaatggaaagaaggtagttgacagtataagaaacttgaagtcgttgggcccaaaccaagagaatgttcaaaatgaaataattgtctatccagagaacacagaagacaatatgaaaaatggagtgaagaaaacagaaatcaatgtagaaggtgttgccaaaaataacaacattgatatggaagttgagagaccatcaaactctgaggcacatgaaactgatactgctataagttacaaggaaaaccatctagcagcttcatcagtaccagatcaaaaactgaatcaacccagtgcagaaaagacaaaagatgcagcaattcagacaaccccttcttgtaacagttttgatgggaaacaccaagatcataatttatctgactccaaagttgaagaatgtgtgcaaacttcaaataacaacatatcaactcaacactcatgcttaagttcacaagattctgtaaatacctcaagggaattcaggagtcaaggcaccctaattatacattcagaagatccgcttaccgtaaaagatccaatttgtgcacatggtaatgatgatcttttgcctcctgtagataggattgacaaaaattccactgcttcttacctaaagaattacccactttatagacaggactacaatcccaagccaaaaccttcaaatgaaattacacgagagtatatacccaaaattggcatgactacttataaaatagtgcctcccaaatccttggaaatatcgaaagactggcaatcagaaaccatagagtataaagatgatcaggacatgcatgctttagggaaaaagcacactcatgagaatgtgaaagaaactgccatccaaacagaagattctgctatttctgaaagcccagaagagccactgccaaaccttaaaccgaagcctaacctgagaacagagcatcaagtgcccagttctgtgagctcacctgatgatgccatggttagtcctctgaaacctgctcccaaaatgacaagagacactggcacagctccttttgcaccaaatttggaagaaataaacaatattttggaatcaaaatttaaatctcgggcttcaaatgcccaggccaaacccagctctttttttttgcagatgcagaagagagtatcgggtcactatgtgacatctgcagctgccaagagtgtccatgctgcccctaatcctgctccaaaagaactgacaaataaagaggcagaaagggatatgctgccttctccggagcagactctttctcccttaagtaaaatgcctcactctgttccacaaccccttgttgaaaaaactgatgatgatgtcatcggtcaggctcctgctgaagcctcccctcctcccatagctccaaaacctgtgacaattcctgctagtcaggtatccacacaaaatctgaagactttgaaaacttttggtgccccacgaccatactcaagttctggtccttcaccgtttgctcttgctgtagtgaaaaggtcacagtctttcagtaaagagcgcaccgagtcacctagtgccagtgcattggtccaacctccagccaacacagaggaagggaagactcattctgtaaataaatttgtggacatcccacagcttggtgtgtctgataaggaaaataactctgcacataatgaacagaattcccaaataccaactccaactgatggcccatcattcactgttatgagacaaagttctttaacattccaaagctctgacccagaacagatgcgacagagtttgctgactgcaatccgttcgggagaggctgctgccaaattgaaaagggttaccattccatcaaatacaatatctgtgaatggaaggtcaagactcagccattccatgtcccctgatgcccaggacggccattaaatgttaccctgccacaccactgcacttcacttccacttcagaccaacttcatactaatggaacattttggcaaatgtatattcagatgtacactaatatattatctattaaaatattagaatttgtgttgtggcttttaatgccagaagaaaagttaccagaatttataatttatagtaattttttgatcttttttttgccttaagagttgaatatgctgctttagaactttaaaacaaggtgtaaatgattttcattttttacaaatgaaaaataattcctttgtattgatttcacttaccagcacattctctacaatggtgacttagacaaaagtataagattcatagactttatatttgtatgacatacaactaggacaaacatagatatgacatttgctgcctcagtgtagcaattggaaatatttataagttatatgaaagcctgttttgggctgaaagaatgatttagaaaactagtgataccaaataagtatattcagttcaataattattttcaatgatgaatcacttagtgtgaaagacttgccttgtgtattctttatgtaattacaaatcactgtcaattttatgggaagctcatagtattttaatattttattaacatggaactcttgtttttttaatctttagaacttaaattctacaagaattttaaatattttctgtatataattatgacattgtcacacagaaattacacattttatgtgccagaagccttaaacatctttctgtgaaaatgctgatatattgtgacagttatttcacatttgatatgtagagaggaataggggttagtttatgtttatattgaaaaactttaaagactatttggaagttccagaaattctggttttaattcaagtaaaatgataaaatagtcattatatagttcagatgctaatattctaagtaataatatatatttacattgaagctaaaactgttaagcaaaacaatgcccatttgtcggcttacagctcttccggagtctagagcctgttggtgttctgtccctactttaagaatttaattgctcacttattctgaaagctttgttcaaacaagatgatattaaatttgttttcactaaaactactgggatatctgcctcttggggatttttttttcaatttaataaaagcaagttgtata

SEQ ID NO: 183019 - DNA, 3501 bp, Artificial Sequence
  derived and/or modified sequence
atggacggaaggacgcctaggcctcaggacgccccagcacgcaggaagcctaaagcaaaggctcctttaccaccagcggaaaccaaatacactgatgtgtcttccgccgcggatagcgtcgagtctacggccttcattatggagcagaaggagaacatgatcgataaggacgttgagctgtcagtggtgttacctggagacatcataaagtctacgaccgtgcacggtagtaagcccatgatggacctcctcatttttctgtgtgctcagtaccatctgaatcccagctcgtataccattgatctacttagcgcagaacagaatcatattaaattcaagcctaatacacccatcggcatgttagaggtggaaaaagttatcctgaagcctaagatgctcgataaaaagaaaccaacccccatcattcctgaaaagactgtacgggttgtgattaactttaagaagacccagaaaactattgtgcgggtgagcccccatgcctctctgcaggaactggctcccattatatgtagcaaatgcgaatttgatccactgcacacactgctgctcaaggattaccaatcccaggaacctctcgacctcaccaaatcactgaatgacttaggcctgcgcgagctatatgccatggacgtgaacagggaatcttgccagattagccagaatctggatattatgaaagagaaggaaaacaagggatttttcagcttcttccaaagatccaagaaaaaacgcgaccagaccgcaagcgctcccgccaccccgctagtcaacaaacacagacccactttcaccagaagcaacacaataagcaaaccttacatatcaaatactctcccgtccgacgcccccaagaagcgaagagctccacttccccctatgcctgcaagtcagagcgtgccccaggacctggcacacatccaggagaggcccgcttcatgcattgtaaagtctatgtccgtagatgagacagataagtccccatgtgaggcggggagggtgcgtgctggatctctccagctgagtagcatgagcgcgggtaatagcagcttacgtagaactaaacgcaaagctccaagccccccctccaagatacctcctcatcaaagcgatgagaatagtcgggtaacagctttacagcccgtggacggcgtgcctcctgattctgcaagtgaggctaatagccccgaggaacttagttccccagagaccttccacccaggattgtcctcgcaggagcagtgtactgctccgaaacttatggaagaaacttcggtgtttgagtgccccggaacgcctgaagccgctatcacttccctcacgagtggaatttccagtgactactccctggaagaaattgatgaaaaagaagaactgagcgaggtgcccaaggttgaagcagaaaacattagccctaagagtcaggacattccttttgtctctactgatatcatcaacactctgaagaacgatcctgatagtgctctaggcaatggttcaggagagtttagccagaactccatggaagagaaacaggagactaagtctacagacggccaagaaccccactccgttgtatacgataccagtaatggcaagaaggtcgtagactcaatacgtaatttgaagtcactgggccccaaccaagagaacgtacagaatgagattattgtttaccccgagaacaccgaggataatatgaaaaatggcgtcaagaagacagaaataaacgtcgagggcgtggcaaaaaataataacattgacatggaagtggagcgcccgtccaatagtgaggcccacgaaacagataccgccatctcatacaaagaaaaccatctagcagcatcaagtgtcccggatcagaagctgaaccagccaagcgcggagaagactaaggatgctgcaatccaaaccacccccagttgcaatagcttcgacggtaagcaccaggaccataatttatccgacagcaaggttgaagaatgcgtacagaccagtaataataatatctctactcagcacagttgtctttcaagccaggattctgttaacaccagcagggagtttcggagtcaggggacacttatcattcattctgaagacccactaactgtgaaggacccaatctgtgctcacggcaatgatgaccttctccctcctgtggataggattgataagaacagcacagcttcctacctcaaaaattacccactttatcggcaggattataatcccaaaccaaagccttcaaacgagatcactagagagtacatccctaagattgggatgactacatataagatcgttccgcccaagagccttgagatctcaaaagactggcagtcagagaccattgaatataaggacgaccaggatatgcacgccctgggcaagaaacatacccatgagaacgtcaaagagaccgcgatccagaccgaggactctgctattagtgaatctcctgaagaaccactgcccaacctgaagcctaaaccaaatctgaggactgaacatcaggtccccagctctgtgtctagtcccgacgatgccatggtgtctccgctcaaaccagcccccaagatgactcgggatactggtacggcccctttcgctcccaatctggaggagatcaataatatactggagtcaaaattcaaatctcgcgcttctaatgcacaagctaaaccatcctccttttttctccaaatgcaaaagagagtttctggccactacgtaacctcggcagccgcaaagagcgtccacgccgctccaaaccctgcccctaaggagctcacaaataaggaagctgaacgtgatatgcttcctagccccgagcagactttatctcctttgagcaaaatgcctcacagcgtgccgcagcccctggtggagaagacggacgacgacgtgattgggcaggcccctgcagaagctagcccgccccctatcgccccaaagcctgtcactattcccgccagccaggtatctacacagaacctgaagactctaaagacatttggcgccccaaggccctatagttccagcggcccctctcccttcgctctagccgtcgtgaagcggagtcaaagttttagtaaagaaaggactgagtcacccagcgcatctgctctggttcaaccgcccgcgaacacagaagaaggcaagacacacagtgtcaacaagtttgtagacatacctcaattgggcgttagcgacaaagagaataatagcgcccacaatgaacagaattcgcagatcccaacaccgactgatgggccatccttcacagtgatgcgccagtcaagtctgacatttcagagctccgaccccgagcagatgcggcagtcgctgttgacagcaatcaggtctggagaggctgctgctaagttgaaacgcgtcactatcccgtctaacaccatatccgtgaacgggcgaagtcgcctcagccactcaatgtctccagatgcacaggacggtcactag

SEQ ID NO: 183020 - DNA, 3501 bp, Artificial Sequence
  derived and/or modified sequence
atggatggccgcaccccccggccccaggatgccccagcccggaggaagcccaaggccaaggcccccctgcccccagctgagaccaagtacacagatgtgtcctctgctgctgacagcgtggagagcacagccttcatcatggagcagaaggagaacatgattgacaaggatgtggagctgtctgtggtgctgcccggggacatcatcaagagcaccaccgtgcacggcagcaagcccatgatggacctgctgatcttcctgtgtgcccagtaccacctgaaccccagcagctacaccatcgacctgctgtctgctgagcagaaccacatcaagttcaagcccaacacccccatcggcatgctggaggtggagaaggtgatcctgaagcccaagatgctggacaagaagaagcccacccccatcatccctgagaagacagtgcgggtggtgatcaacttcaagaagacccagaagaccatcgtgcgggtgagcccccacgccagcctgcaggagctggcccccatcatctgcagcaaatgtgaatttgaccccctgcacaccctgctgctgaaggactaccagagccaggagcccctggacctgaccaagagcctgaatgacctgggcctgcgggagctgtatgccatggatgtgaaccgggagagctgccagatcagccagaacctggacatcatgaaggagaaggagaacaagggcttcttctccttcttccagaggagcaagaagaagagggaccagacagccagcgccccagccacccccctggtgaacaagcaccggcccaccttcaccaggagcaacaccatcagcaagccctacatcagcaacaccctgcccagtgatgcccccaagaagagaagagcccccctgccccccatgcctgccagccagagcgtgccccaggacctggcccacatccaggagaggcctgccagctgcatcgtgaagtccatgtctgtggatgaaacagacaagagcccctgtgaggccggccgggtgcgggccggcagcctgcagctgagctccatgtctgctggcaacagcagcctgcggaggaccaagaggaaggcccccagcccccccagcaagatccccccccaccagagtgatgagaacagccgggtgacagccctgcagcctgtggatggagtgcccccagattctgccagcgaggccaacagccctgaggagctgagcagccctgagaccttccaccctggcctgagcagccaggagcagtgcacagcccccaagctgatggaggagacctctgtgtttgagtgccccggcaccccagaggccgccatcaccagcctgaccagcggcatcagcagtgactacagcctggaggagattgatgagaaggaggagctgtctgaggtgcccaaggtggaggccgagaacatcagccccaagagccaggacatcccctttgtgtccacagacatcatcaacaccctgaagaatgaccctgacagcgccctgggcaatggcagcggggagttcagccagaacagcatggaggagaagcaggagaccaagagcacagatggccaggagccccacagcgtggtgtatgacaccagcaatggcaagaaggtggtggacagcatccggaacctgaagagcctgggccccaaccaggagaatgtgcagaatgagatcatcgtgtacccagaaaatacagaggacaacatgaagaatggagtgaagaagacagagatcaacgtggagggcgtggccaagaacaacaacatcgacatggaggtggagcggcccagcaacagcgaggcccacgagacagacacagccatctcctacaaggagaaccacctggccgccagctctgtgcctgaccagaagctgaaccagcccagcgctgagaagaccaaggatgctgccatccagaccacccccagctgcaacagctttgatggcaagcaccaggaccacaacctgagtgacagcaaggtggaggagtgtgtgcagaccagcaacaacaacatcagcacccagcacagctgcctgagcagccaggacagcgtgaacaccagccgggagttccgcagccagggcaccctcatcatccacagcgaggaccccctgactgtgaaggaccccatctgtgcccacggcaatgatgacctgctgccccctgtggacagaattgacaagaacagcacagccagctacctgaagaactaccccctgtaccggcaggactacaaccccaagcccaagcccagcaatgagatcacccgggagtacatccccaagattggcatgaccacctacaagatcgtgccccccaagagcctggagatcagcaaggactggcagagcgagaccatcgagtacaaggatgaccaggacatgcacgccctgggcaagaagcacacccatgaaaatgtgaaggagacagccatccagacagaagattctgccatcagcgagagccctgaggagcccctgcccaacctgaagcccaagcccaacctgaggacagagcaccaggtgcccagctctgtgagcagcccagatgatgccatggtgagccccctgaagccagcccccaagatgacccgggacacaggaacagccccctttgcccccaacctggaggagatcaacaacatcctggagagcaagttcaagagccgggccagcaatgcccaggccaagcccagcagcttcttcctgcagatgcagaagagggtgtctggccactacgtgaccagcgctgctgccaagtctgtgcacgccgcccccaacccagcccccaaggagctgaccaacaaggaggccgagcgggacatgctgcccagccctgagcagaccctgagccccctgagcaagatgccccacagcgtgccccagcccctggtggagaagacagatgatgatgtgattggccaggccccagctgaggccagccccccacccatcgcccccaagcctgtgaccatcccagccagccaggtgtccacccagaacctgaagaccctgaagaccttcggggccccccggccctacagcagcagcggccccagcccctttgccctggccgtggtgaagaggagccagagcttcagcaaggagaggacagagagccccagcgccagcgccctggtgcagcccccagccaacacagaggagggcaagacccacagcgtgaacaagtttgtggacatcccccagctgggcgtgtctgacaaggagaacaacagcgcccacaatgagcagaacagccagatccccacccccacagatggccccagcttcaccgtgatgaggcagagcagcctgaccttccagagcagtgaccctgagcagatgaggcagagcctgctgacagccatccgctctggagaggccgccgccaagctgaagagggtgaccatccccagcaacaccatctctgtgaatggccgcagccggctgagccacagcatgagcccagatgcccaggacggccactag

SEQ ID NO: 183021 - DNA, 3501 bp, Artificial Sequence
  derived and/or modified sequence
atggacggccggaccccccggccccaggacgcccccgcccggcggaaacccaaggctaaggctcccttgccacccgcggaaaccaaatacactgatgtctcttcggcagctgattcagtggaatctactgcatttatcatggaacagaaagagaatatgatcgacaaagacgtggagttgtctgttgtgctgcccggggatattattaaatcaacgaccgtacacgggagtaaacccatgatggatctgctgatctttctgtgtgcacagtaccacttaaacccctctagctataccattgatctgttatcagcggaacagaatcatatcaagttcaagcccaacacaccaattggcatgctggaagtggagaaggttattctgaaacccaagatgttagacaagaagaagcccacccccattattccagagaagactgttagagtagtcataaacttcaagaagacccagaaaaccatcgtgagagtgagccctcacgcaagcctgcaggaattggccccgataatctgcagtaagtgcgagtttgatccactccatacacttcttttaaaagattaccaatcccaggaacctctagacctgaccaaatccctaaacgacctgggactacgagagttgtacgcaatggacgtaaatagagaatcatgccagatatctcagaacctcgatattatgaaggagaaggagaataagggattcttttcattttttcagcgatcaaaaaaaaaaagagatcagaccgcttcggctccggccacccctctggtcaacaaacaccggccaaccttcactaggagtaatacaatatctaagccttacatctctaacacgctgccgagtgacgcacccaagaaacgacgagctccgctcccgcccatgcccgcttcacagagtgtccctcaggatctcgctcacatccaggagcgccccgcctcatgtatagtgaaaagcatgtctgtggacgaaacggataaatctccctgcgaagcgggccgggtccgcgctggttcattacagttgagcagtatgagcgcgggtaattcgagcctacggcgcacgaagagaaaagcgccgtctcccccaagcaagatccccccccatcagtccgatgaaaattctcgagtcactgcactccaacctgttgacggcgtgccccctgacagtgccagtgaagctaattccccggaggagctctcttcacccgaaacctttcacccaggtctgagtagccaagagcagtgtactgctcctaagctcatggaagagaccagcgtctttgaatgtcccggcaccccggaggctgctattaccagtttgacatcaggaatatcatcggactattcactggaggaaatcgatgaaaaagaggaactctcggaggtgccaaaggttgaggccgagaatatctctccaaagtcccaggacatcccatttgtgtcaactgacatcattaacacattgaagaatgatcctgacagcgccctgggtaatggatctggggagttttcgcaaaatagtatggaggaaaaacaagaaaccaagagcaccgatggccaggagcctcattcagtagtttacgacacttcgaatgggaaaaaagtggtggactctatccgcaatcttaagagtctcggcccaaaccaggaaaacgtccaaaacgaaataattgtgtaccctgagaacactgaagacaacatgaagaacggcgtgaaaaagactgagataaatgtggagggcgtagcaaaaaacaataacatcgacatggaagtggaaaggccaagcaattcagaagcacatgaaacagacacagccataagctacaaggagaatcatcttgcagcctctagcgtgccggaccagaaattgaatcagccttcagctgaaaaaacaaaagatgcagcaatccagaccactccctcttgtaattcctttgacggcaagcaccaggatcataacctctcagactctaaggtcgaagagtgtgtgcagactagtaacaacaacatatcgacacagcattcatgtctgtcttcacaggactcggtcaacacaagcagagaattcaggtcccaagggacactaatcatccatagcgaggaccccttaacggtgaaagatccaatatgcgcacatgggaacgacgacctactgccacctgtggacaggatagataagaacagcaccgcctcttaccttaaaaactacccattataccgacaggattataatcctaaaccaaagccatcaaacgaaattacgcgcgagtacatccccaaaatcggaatgaccacctataaaattgtgccccccaagtcactggagatcagtaaggactggcagagcgaaaccattgaatacaaggacgatcaggacatgcacgcgctcggaaagaagcacacacacgagaatgtcaaggagactgccatacaaaccgaagactccgccatttcagagtcccccgaggagccgctgcccaacctcaagcctaagcccaacctgaggacggagcatcaggtgccctcttccgtgtcaagtcccgatgacgcgatggttagtccactcaagccagcaccaaaaatgacccgggataccgggacagcaccgtttgctcccaacctcgaagaaattaataacatcctagaaagcaaattcaagtctcgcgcaagcaatgcccaggccaaaccatctagcttcttcctgcagatgcaaaagagggtctcaggccactacgtaacttccgcagccgccaagtccgtgcacgcagcccccaaccccgctccaaaagagttgacaaacaaggaggccgaacgcgacatgctcccttccccagaacagacactctcgcctctgagcaaaatgccccacagcgttccccagccactcgtagagaaaacagacgatgacgtgattggccaggccccagcggaggcttcccctcctccaatcgcaccaaagcctgtaactatacctgcctctcaggtgtccactcagaacctgaagacactgaagactttcggggccccaaggccctacagctcttctgggccaagtccctttgccctcgctgtagtgaaacgatcacagtccttctctaaggaacggactgaatctccttcagcctccgcgctcgtgcagcctcccgctaacacagaagagggtaaaactcattcggtcaataagtttgtcgatattccacaactaggagtgagtgacaaagaaaacaattctgcacacaacgagcagaactcacaaatcccaacccccaccgatggcccatcgttcacagtgatgcggcagtcatcacttacttttcagtcaagtgacccggagcagatgcgacagagtctcctgacagccattagaagtggcgaagcagcagcaaagctgaagcgggtgacgatcccctcaaacacaatatccgtcaatggaaggtcacgactcagtcactcaatgtcacccgacgcacaggatgggcattag

SEQ ID NO: 183022 - DNA, 3501 bp, Artificial Sequence
  derived and/or modified sequence
atggacggaaggacaccacgcccacaagacgccccagcccgtcgcaagcctaaggcaaaggcccctttgccccctgccgagaccaagtacaccgatgtatcctccgccgctgacagcgttgagtcaacagctttcatcatggagcaaaaggaaaacatgatcgacaaagacgtggaactgtcagtagtactgcctggggacatcatcaaatctacaaccgttcatggtagcaagccaatgatggacctgttaatttttttgtgtgcccagtatcatctcaatcccagcagctatacaattgacctgctctctgccgagcagaatcatatcaagtttaaacctaatacgccaataggtatgctggaagttgaaaaggttatacttaagccaaagatgctcgacaagaagaagcctactcctattatcccagagaagactgtccgcgtggtaatcaatttcaagaagacacaaaaaaccatagtgagagtctctccccacgccagcctgcaggaattggccccaatcatttgcagtaagtgcgaatttgaccctctgcacacattacttctaaaagactaccagagtcaggagcctttggatttaactaagtccctgaatgacctcggcctgagagagctatacgctatggacgtgaaccgagagtcatgccagatttctcagaatcttgatatcatgaaagagaaagagaacaaaggctttttttctttctttcagcggagcaaaaaaaagcgcgaccaaacggcctctgcccctgccacccctcttgtgaataagcaccgacctaccttcacgcggagcaataccatatcaaaaccgtacatctctaatacactccccagtgacgcacctaagaaaaggcgggctccactgccccctatgcctgcgtctcagagcgtcccccaggatcttgcacatatacaggagaggcctgcaagctgcatagtcaagtcaatgagcgtggatgaaacggataagtccccttgtgaggccggacgggtgcgggcagggtctctgcagctctcttccatgagcgccggtaatagtagcctcaggcggacaaaacggaaggccccttcaccccctagcaagattcctccccaccagagtgatgagaattcccgggtaactgctcttcagccggtggacggggtgccacctgattccgcatcagaggctaacagccccgaagaactgtcctctccggagacttttcaccccggtctgagcagccaggagcagtgcaccgccccaaagttgatggaggagaccagtgtcttcgagtgcccaggaactccagaagctgctatcacctccctgacctctgggatctccagcgattacagtctggaagagatcgacgaaaaggaagagttgtctgaggtccctaaagtggaagcggagaatattagccccaagtctcaggacatcccgttcgtatctacagatatcatcaataccctgaagaatgatcccgatagcgccctgggcaacggcagcggggaattcagtcaaaactctatggaggagaaacaagagacaaaaagtactgacggccaggagccccactctgtggtctacgatacatccaacggaaaaaaagtggtggattccatccgaaatttgaagtccttgggacccaatcaggaaaacgtgcagaatgaaatcatcgtatacccagagaacaccgaagacaacatgaagaacggggtgaaaaaaaccgagatcaatgtagagggagtggctaagaacaacaatatagacatggaggtggagcgacccagcaactctgaagcgcacgaaacggataccgccatctcatacaaagagaatcacttagctgccagttctgtgcctgatcagaagctgaatcagccctctgccgaaaagacaaaggacgccgcaattcagacaactccatcttgtaattcgttcgatggcaagcaccaggaccacaatttaagcgattcaaaagttgaggaatgcgtgcaaacatctaacaataacatcagcacacagcacagctgtctatccagtcaggattcagtcaatacctcaagagagttccgtagtcagggcactcttatcatccattccgaagacccacttaccgtaaaggaccccatctgtgctcacggcaatgacgatcttctgcctccagttgaccgcatcgataaaaacagtactgcctcctatctcaaaaattatcccctttatagacaagattacaatcctaagcccaaaccatccaacgaaatcactcgagagtacattccgaaaattggtatgactacctacaaaattgtccctcccaaatcccttgaaatttccaaagattggcagagtgagaccattgagtataaggacgaccaagatatgcacgctctcggcaaaaaacatacacatgagaacgtgaaagagactgcgatccagaccgaggacagcgcgatctccgagtctcctgaagaacctctccccaacctgaagccaaaaccaaacctgcgcacggagcaccaagtaccctcaagcgtgagtagccctgatgacgccatggtctccccactcaaacctgctcccaaaatgacaagggacacgggcactgcccctttcgctcctaacctggaagagatcaacaacatcctggagagtaaatttaagagcagagctagcaacgctcaggccaagccctcatccttttttcttcagatgcagaagagggtctcgggtcactacgtgacaagcgcagccgctaagtctgtgcacgccgctcccaatccagcccctaaagaacttacaaataaggaagccgagagggatatgttgccctctcctgaacagactcttagcccacttagcaagatgccacactcagtgccacaaccgctcgtggagaagaccgacgatgatgttattgggcaggccccagccgaagcatcccctcctccaatcgctccgaagcccgtgacgatccctgcctcacaggtatccacccagaacctaaagacattgaagacgtttggggcacccagaccctactctagctctggaccttcaccgtttgccctcgccgtggtcaagcgcagccagagcttctctaaggaacggactgagtccccatcagcatcagccctcgtgcaaccgccagccaataccgaagaagggaaaactcatagcgtgaataagttcgtggacatcccccagctgggagtatcggataaggaaaacaactccgcacataatgagcagaattcacaaattcccacacctacagatggaccttccttcaccgtgatgcgccaaagttccctgacatttcagtctagcgatcctgagcagatgcgccagtctcttctcactgctattcggtccggagaggcggctgctaagctgaagagagtaacaatcccctccaacacaatatcagtaaacggtaggtcaaggctttcccactctatgagccccgatgcacaggacggacactag

SEQ ID NO: 183023 - protein, 2363 aa, Artificial Sequence
  derived and/or modified sequence
MPVLGVASKLRQPAVGSKPVHTALPIPNLGTTGSQHCSSRPLELTETESSMLSCQLALKSTCEFGEKKPLQGKAKEKEDSKIYTDWANHYLAKSGHKRLIKDLQQDIADGVLLAEIIQIIANEKVEDINGCPRSQSQMIENVDVCLSFLAARGVNVQGLSAEEIRNGNLKAILGLFFSLSRYKQQQHHQQQYYQSLVELQQRVTHASPPSEASQAKTQQDMQSSLAARYATQSNHSGIATSQKKPTRLPGPSRVPAAGSSSKVQGASNLNRRSQSFNSIDKNKPPNYANGNEKDSSKGPQSSSGVNGNVQPPSTAGQPPASAIPSPSASKPWRSKSMNVKHSATSTMLTVKQSSTATSPTPSSDRLKPPVSEGVKTAPSGQKSMLEKFKLVNARTALRPPQPPSSGPSDGGKDDDAFSESGEMEGFNSGLNSGGSTNSSPKVSPKLAPPKAGSKNLSNKKSLLQPKEKEEKNRDKNKVCTEKPVKEEKDQVTEMAPKKTSKIASLIPKGSKTTAAKKESLIPSSSGIPKPGSKVPTVKQTISPGSTASKESEKFRTTKGSPSQSLSKPITMEKASASSCPAPLEGREAGQASPSGSCTMTVAQSSGQSTGNGAVQLPQQQQHSHPNTATVAPFIYRAHSENEGTALPSADSCTSPTKMDLSYSKTAKQCLEEISGEDPETRRMRTVKNIADLRQNLEETMSSLRGTQISHSTLETTFDSTVTTEVNGRTIPNLTSRPTPMTWRLGQACPRLQAGDAPSLGAGYPRSGTSRFIHTDPSRFMYTTPLRRAAVSRLGNMSQIDMSEKASSDLDMSSEVDVGGYMSDGDILGKSLRTDDINSGYMTDGGLNLYTRSLNRIPDTATSRDIIQRGVHDVTVDADSWDDSSSVSSGLSDTLDNISTDDLNTTSSVSSYSNITVPSRKNTQLRTDSEKRSTTDETWDSPEELKKPEEDFDSHGDAGGKWKTVSSGLPEDPEKAGQKASLSVSQTGSWRRGMSAQGGAPSRQKAGTSALKTPGKTDDAKASEKGKAPLKGSSLQRSPSDAGKSSGDEGKKPPSGIGRSTATSSFGFKKPSGVGSSAMITSSGATITSGSATLGKIPKSAAIGGKSNAGRKTSLDGSQNQDDVVLHVSSKTTLQYRSLPRPSKSSTSGIPGRGGHRSSTSSIDSNVSSKSAGATTSKLREPTKIGSGRSSPVTVNQTDKEKEKVAVSDSESVSLSGSPKSSPTSASACGAQGLRQPGSKYPDIASPTFRRLFGAKAGGKSASAPNTEGVKSSSVMPSPSTTLARQGSLESPSSGTGSMGSAGGLSGSSSPLFNKPSDLTTDVISLSHSLASSPASVHSFTSGGLVWAANMSSSSAGSKDTPSYQSMTSLHTSSESIDLPLSHHGSLSGLTTGTHEVQSLLMRTGSVRSTLSESMQLDRNTLPKKGLRYTPSSRQANQEEGKEWLRSHSTGGLQDTGNQSPLVSPSAMSSSAAGKYHFSNLVSPTNLSQFNLPGPSMMRSNSIPAQDSSFDLYDDSQLCGSATSLEERPRAISHSGSFRDSMEEVHGSSLSLVSSTSSLYSTAEAGGSLEQIHKLRRELVASQEKVATLTSQLSANAHLVAAFEKSLGNMTGRLQSLTMTAEQKESELIELRETIEMLKAQNSAAQAAIQGALNGPDHPPKDLRIRRQHSSESVSSINSATSHSSIGSGNDADSKKKKKKNWVNSRGSELRSSFKQAFGKKKSTKPPSSHSDIEELTDSSLPASPKLPHNAGDCGSASMKPSQSASAICECTEAEAEIILQLKSELREKELKLTDIRLEALSSAHHLDQIREAMNRMQNEIEILKAENDRLKAETGNTAKPTRPPSESSSSTSSSSSRQSLGLSLNNLNITEAVSSDILLDDAGDATGHKDGRSVKIIVSISKGYGRAKDQKSQAYLIGSIGVSGKTKWDVLDGVIRRLFKEYVFRIDTSTSLGLSSDCIASYCIGDLIRSHNLEVPELLPCGYLVGDNNIITVNLKGVEENSLDSFVFDTLIPKPITQRYFNLLMEHHRIILSGPSGTGKTYLANKLAEYVITKSGRKKTEDAIATFNVDHKSSKELQQYLANLAEQCSADNNGVELPVVIILDNLHHVGSLSDIFNGFLNCKYNKCPYIIGTMNQGVSSSPNLELHHNFRWVLCANHTEPVKGFLGRYLRRKLIEIEIERNIRNNDLVKIIDWIPKTWHHLNSFLETHSSSDVTIGPRLFLPCPMDVEGSRVWFMDLWNYSLVPYILEAVREGLQMYGKRTPWEDPSKWVLDTYPWSSATLPQESPALLQLRPEDVGYESCTSTKEATTSKHIPQTDTEGDPLMNMLMKLQEAANYSSTQSCDSESTSHHEDILDSSLESTL

SEQ ID NO: 183024 - protein, 2363 aa, Artificial Sequence
  derived and/or modified sequence
MPVLGVASKLRQPAVGSKPVHTALPIPNLGTTGSQHCSSRPLELTETESSMLSCQLALKSTCEFGEKKPLQGKAKEKEDSKIYTDWANHYLAKSGHKRLIKDLQQDIADGVLLAEIIQIIANEKVEDINGCPRSQSQMIENVDVCLSFLAARGVNVQGLSAEEIRNGNLKAILGLFFSLSRYKQQQHHQQQYYQSLVELQQRVTHASPPSEASQAKTQQDMQSSLAARYATQSNHSGIATSQKKPTRLPGPSRVPAAGSSSKVQGASNLNRRSQSFNSIDKNKPPNYANGNEKDSSKGPQSSSGVNGNVQPPSTAGQPPASAIPSPSASKPWRSKSMNVKHSATSTMLTVKQSSTATSPTPSSDRLKPPVSEGVKTAPSGQKSMLEKFKLVNARTALRPPQPPSSGPSDGGKDDDAFSESGEMEGFNSGLNSGGSTNSSPKVSPKLAPPKAGSKNLSNKKSLLQPKEKEEKNRDKNKVCTEKPVKEEKDQVTEMAPKKTSKIASLIPKGSKTTAAKKESLIPSSSGIPKPGSKVPTVKQTISPGSTASKESEKFRTTKGSPSQSLSKPITMEKASASSCPAPLEGREAGQASPSGSCTMTVAQSSGQSTGNGAVQLPQQQQHSHPNTATVAPFIYRAHSENEGTALPSADSCTSPTKMDLSYSKTAKQCLEEISGEDPETRRMRTVKNIADLRQNLEETMSSLRGTQISHSTLETTFDSTVTTEVNGRTIPNLTSRPTPMTWRLGQACPRLQAGDAPSLGAGYPRSGTSRFIHTDPSRFMYTTPLRRAAVSRLGNMSQIDMSEKASSDLDMSSEVDVGGYMSDGDILGKSLRTDDINSGYMTDGGLNLYTRSLNRIPDTATSRDIIQRGVHDVTVDADSWDDSSSVSSGLSDTLDNISTDDLNTTSSVSSYSNITVPSRKNTQLRTDSEKRSTTDETWDSPEELKKPEEDFDSHGDAGGKWKTVSSGLPEDPEKAGQKASLSVSQTGSWRRGMSAQGGAPSRQKAGTSALKTPGKTDDAKASEKGKAPLKGSSLQRSPSDAGKSSGDEGKKPPSGIGRSTATSSFGFKKPSGVGSSAMITSSGATITSGSATLGKIPKSAAIGGKSNAGRKTSLDGSQNQDDVVLHVSSKTTLQYRSLPRPSKSSTSGIPGRGGHRSSTSSIDSNVSSKSAGATTSKLREPTKIGSGRSSPVTVNQTDKEKEKVAVSDSESVSLSGSPKSSPTSASACGAQGLRQPGSKYPDIASPTFRRLFGAKAGGKSASAPNTEGVKSSSVMPSPSTTLARQGSLESPSSGTGSMGSAGGLSGSSSPLFNKPSDLTTDVISLSHSLASSPASVHSFTSGGLVWAANMSSSSAGSKDTPSYQSMTSLHTSSESIDLPLSHHGSLSGLTTGTHEVQSLLMRTGSVRSTLSESMQLDRNTLPKKGLRYTPSSRQANQEEGKEWLRSHSTGGLQDTGNQSPLVSPSAMSSSAAGKYHFSNLVSPTNLSQFNLPGPSMMRSNSIPAQDSSFDLYDDSQLCGSATSLEERPRAISHSGSFRDSMEEVHGSSLSLVSSTSSLYSTAEEKAHSEQIHKLRRELVASQEKVATLTSQLSANAHLVAAFEKSLGNMTGRLQSLTMTAEQKESELIELRETIEMLKAQNSAAQAAIQGALNGPDHPPKDLRIRRQHSSESVSSINSATSHSSIGSGNDADSKKKKKKNWVNSRGSELRSSFKQAFGKKKSTKPPSSHSDIEELTDSSLPASPKLPHNAGDCGSASMKPSQSASAICECTEAEAEIILQLKSELREKELKLTDIRLEALSSAHHLDQIREAMNRMQNEIEILKAENDRLKAETGNTAKPTRPPSESSSSTSSSSSRQSLGLSLNNLNITEAVSSDILLDDAGDATGHKDGRSVKIIVSISKGYGRAKDQKSQAYLIGSIGVSGKTKWDVLDGVIRRLFKEYVFRIDTSTSLGLSSDCIASYCIGDLIRSHNLEVPELLPCGYLVGDNNIITVNLKGVEENSLDSFVFDTLIPKPITQRYFNLLMEHHRIILSGPSGTGKTYLANKLAEYVITKSGRKKTEDAIATFNVDHKSSKELQQYLANLAEQCSADNNGVELPVVIILDNLHHVGSLSDIFNGFLNCKYNKCPYIIGTMNQGVSSSPNLELHHNFRWVLCANHTEPVKGFLGRYLRRKLIEIEIERNIRNNDLVKIIDWIPKTWHHLNSFLETHSSSDVTIGPRLFLPCPMDVEGSRVWFMDLWNYSLVPYILEAVREGLQMYGKRTPWEDPSKWVLDTYPWSSATLPQESPALLQLRPEDVGYESCTSTKEATTSKHIPQTDTEGDPLMNMLMKLQEAANYSSTQSCDSESTSHHEDILDSSLESTL

SEQ ID NO: 183025 - DNA, 7092 bp, Artificial Sequence
  derived and/or modified sequence
atgccggttctgggggtcgcatccaaattgcggcagcccgctgtggggtctaagccggtacacacagccctacctatccccaatcttggaactaccgggtcgcagcactgctcatcccggcccctagaactcaccgaaaccgaatccagcatgctctcctgccagctggctctgaagagtacttgcgagtttggcgagaagaaaccactgcaaggtaaggcaaaagagaaggaagactctaagatctacaccgactgggctaaccactatctggctaagtccggccacaagcgacttatcaaagaccttcagcaggatatcgccgatggagttctgctcgcggagattatccaaatcatcgctaacgaaaaggtggaagacataaacggctgtcccagatcccagagccaaatgattgaaaatgtcgacgtatgcctgagcttcctggctgcacgcggagtcaacgttcagggactatcagccgaggagatcagaaacggcaaccttaaggccattctcggcttattctttagcctttctcggtacaagcagcaacagcatcatcaacagcagtactaccaaagcctcgttgaacttcagcagcgcgtgacccacgctagccctccttcagaagcctctcaagcgaagacccagcaagacatgcagtctagcctggcagcaagatatgccactcagagtaaccattctggtatcgcaacttcccagaagaaacccactagactccctggtcctagcagggtgcccgccgccggaagtagctccaaggtgcaaggcgccagtaacttgaacagaaggagtcagagctttaactctattgacaagaataagcctcctaattacgctaacggaaacgaaaaggacagctcaaagggacctcagagctctagcggagtcaatggtaacgttcaaccacccagcaccgcaggtcagccccccgcctccgccattccatcccccagcgcctctaagccctggcgctccaagtcaatgaacgtaaagcattcagctactagcactatgttaacggtgaaacaaagtagtacagccacttcccccactccctctagcgatagactgaagccgccagtttcagagggggttaagactgctcccagcgggcagaaatccatgctcgagaagtttaagctggttaatgcccgcaccgcgttgaggccccctcagccccctagcagcggacccagcgatggaggtaaagacgatgacgctttctccgagtcaggggagatggagggcttcaattccgggttgaattcaggcggatccacgaacagtagcccgaaggtcagcccaaaactcgccccaccaaaagccgggtctaaaaatctgtcaaacaaaaagtctctattacaacctaaagaaaaggaagagaaaaaccgcgacaagaataaggtttgtaccgagaaacctgttaaagaggaaaaggatcaggtgaccgaaatggcaccgaagaagacctccaagatcgcttctctaattccaaaaggcagtaaaactaccgctgcgaaaaaagagtcgcttatcccttccagtagcggtattcccaagccagggtcaaaagtgccaacagtaaagcagaccatctcacccggctccaccgccagcaaggagtctgaaaagttccgtacgactaaggggtcgcccagccaaagcctgtcaaaacctatcaccatggagaaggccagtgcatctagttgccctgccccgctcgaggggcgggaagcgggacaggcaagcccaagtgggagctgtacgatgaccgtcgcccagtccagcggccaaagtacagggaacggggcagtacaactcccacaacaacagcagcatagccacccaaacaccgcaacagtagccccctttatctacagagctcactctgaaaacgaaggcacggcactgccgtcggcagactcgtgcacttccccgaccaagatggatttgagttattccaagacggccaaacagtgcctcgaagagataagtggggaagaccctgagaccaggcgaatgcgaacagtgaaaaacattgcagacttaagacagaatttggaggagacaatgtcttccctccgaggcacacagatcagccacagcacactcgagaccactttcgatagcaccgtgaccacagaggtgaatgggagaactatccccaacttgacgtctaggccaactccaatgacgtggcgacttggacaggcttgccccaggctgcaggccggggacgctccgagtcttggcgcgggctatcctagaagcggcacaagcagattcattcacactgatccttcgaggttcatgtacaccaccccgttacggagggcagccgtatccagactggggaacatgtcacaaattgatatgtccgaaaaagcctcttcagacctcgacatgtctagtgaggtggatgtgggtggatacatgagcgatggcgacatcctgggaaagtccctgcgaacagacgacatcaattcaggttatatgaccgacgggggcctgaacctgtacactcggtctctgaacagaatcccggacacagcaacctcacgggacattatccagcggggtgtgcatgacgtgaccgtggacgctgacagttgggacgattcttcctccgtctcctccggactgtcggacaccctcgacaatattagtaccgatgatttgaacaccacgtcatccgtctcaagctatagcaatattaccgttcctagccgcaaaaacacacagcttcggacggatagtgagaaaaggagcacgactgatgagacctgggacagtcctgaagaactaaagaagccggaggaggatttcgacagccacggggacgcgggtggtaagtggaagacggtgtccagcggactcccagaagaccctgagaaggccggtcagaaggcaagtttgtccgtctcccagacaggaagctggaggagggggatgagtgcccagggcggcgcacccagcaggcaaaaggcaggaactagcgctctcaagacacctggaaaaactgacgacgctaaagcaagcgagaaaggcaaggccccactcaaaggcagctcacttcagagatcgccgtcagatgccggaaagtccagcggggatgaggggaagaagccaccctccggaataggccgcagcaccgcaaccagctcctttggtttcaagaagccttccggagttggctccagtgccatgatcacaagttcgggggccacaattaccagtggctcagccacactgggtaaaattcccaaaagcgctgctatcggcggaaagagcaacgcaggacggaagacctccctagatggtagtcagaaccaagacgacgttgtccttcatgtgagctctaaaactactctccagtaccggagtctccctagaccctccaagtccagtacatccggcatccccggcagagggggtcaccgcagctccacttcttcaatcgatagcaatgtgagcagtaagtctgcaggagcaaccacaagtaagttgagagagccaactaaaattgggagcgggaggtccagtccggtaactgtcaaccagactgacaaggagaaggagaaggtggcggttagtgattcagaatccgtcagtctttccggatcccccaaaagctcacccaccagcgcctcagcttgtggagcacagggactgcgccaacctggcagcaagtacccggacattgcctctcctactttccgacgactgtttggtgccaaagctggcggaaagtccgcaagcgcccctaacacggagggcgtgaaatcctcatctgtgatgcccagtccttcaacgacactcgcgcgccaggggagcctggagtccccatcctccgggacagggtctatggggagcgcaggaggtctctcggggtcctcatcacccctctttaataaacctagcgacttgacaactgatgtgattagcctctcacattctttggcaagctctcccgcctcggtgcattcgtttacctccgggggcctggtgtgggctgccaatatgtcctcatcatccgccggcagtaaggatacgccctcataccagagtatgacctcactgcacacatctagcgagtctatcgatctgcccttgagtcaccatgggtcactatctggcctgactactggtactcacgaggtgcaatctttgctgatgagaaccggctcggtgaggtccacactgagtgagagcatgcaactggacaggaacactctgcccaagaagggtctgcgctatactccatcctctagacaggcaaaccaggaagaaggaaaggagtggctcagaagccacagtaccgggggcttgcaggacacaggcaaccaatccccgctggtgtcaccctctgccatgtcttcctcagccgcgggtaagtatcacttctcaaatctggttagccccacgaatttatcacagttcaatctccccggtccctctatgatgcggagcaattccatcccggctcaggactcctcttttgatttgtatgatgattctcagctgtgtgggtccgcaacttccctcgaggaacgcccaagagccattagccacagcggatcatttagggatagcatggaggaggtgcacgggtccagtttaagtcttgtgagttctacaagctccttgtattccaccgcagaggcaggcggttcactggagcagattcacaagttaagaagggaactggtggctagtcaggaaaaggtagccactctaaccagccagctaagtgctaacgcgcatctcgttgccgctttcgagaagtcactaggaaatatgaccgggcgccttcagagcctgaccatgacagcggagcagaaggagtcagagctgattgagctccgcgagaccatcgagatgctgaaggcccagaattcagctgctcaagcggctatccagggtgcgcttaacggacctgaccaccctcccaaggatcttcgtatacgccgccaacacagctcagagtccgtttcatccatcaacagcgccacttctcattcatctataggttctgggaacgatgccgactctaagaaaaaaaagaaaaagaactgggtaaatagccggggcagtgaactgaggtcttccttcaagcaagcctttggcaaaaagaagtctacaaagccacccagttcccatagcgatatcgaagagcttacagactcgtccctgccggcctcaccaaagctgccgcacaacgcgggagattgtggctctgcttcgatgaaacccagccagagtgcctccgccatatgtgagtgtaccgaagctgaggctgagatcatcttgcaattgaagtccgagcttagggagaaagaactgaaactaacagacattcgattagaggcactcagctccgctcatcacctggatcagatccgcgaggccatgaatcgcatgcagaacgagatcgagatcttaaaagctgagaatgatagactgaaggctgagacgggtaacacggcgaagcccacgcgcccaccatctgagtcatcctctagtacctcatccagtagttccaggcaatccctgggtctgagcttaaacaatttgaatattacagaggccgtgtcaagcgatatacttttagatgatgctggggatgcaacaggacacaaggacggaagatcggtgaagatcatagttagcatttccaagggatacgggagggccaaggaccagaaaagtcaagcttatctaatcggatccattggagtttccgggaaaactaaatgggatgtgctggatggcgtgattcggaggctttttaaggaatatgtcttccgcatagatacgtccacctccctggggctctcgtctgattgtattgcttcctattgcataggcgacttgatccgcagccataatcttgaggtcccggagttgctgccatgcggttatttggttggtgataacaatatcatcacagtgaaccttaaaggtgtggaggagaatagtctggactcatttgtcttcgacaccttgattcccaaacccataacgcagagatacttcaatttgttaatggagcaccatagaattattctgagcggcccgagtgggacaggaaagacatacctcgccaacaagctggccgagtatgtgatcactaagtctggtcggaaaaagacagaggatgccatcgccaccttcaacgtcgatcacaagtcctcgaaagagctccagcagtacctagctaacttagccgagcaatgcagcgccgacaacaatggagttgagctgcccgtcgtgattatactagacaacctacaccatgttgggtctcttagcgatatttttaacggatttttaaattgtaaatacaacaaatgcccttatatcattggaactatgaatcagggtgtttcttcctcacccaacctggagctgcaccacaatttcaggtgggtactgtgcgccaatcatacagagccagttaaaggtttcctcgggaggtacctgaggcgcaagctgatagaaattgaaatagaacgaaacatacgcaataacgatctcgtgaaaattattgattggatccctaagacttggcaccacctgaattcctttcttgaaactcactcctcgagcgatgtcacgatcggaccccgtctctttttgccttgccctatggatgtcgagggctctcgtgtttggttcatggatctctggaattactcactggtcccatacattctggaagcagtgcgcgaaggcttacaaatgtatgggaagaggactccctgggaagatcccagcaagtgggtgctggatacatatccttggagcagcgcaaccctgcctcaggagagccctgcactgttacagctgcgacctgaagatgtcggctatgagtcctgcacatccacaaaagaagctactacctcaaagcacatcccccagaccgacactgaaggggaccctttgatgaacatgctgatgaagttgcaggaggctgccaattattcttcaacccaatcttgtgactcggaaagcaccagtcaccacgaagatattctggacagcagcctggagagtaccctgtag

SEQ ID NO: 183026 - DNA, 7092 bp, Artificial Sequence
  derived and/or modified sequence
atgcccgttcttggagtcgcttcaaagttacggcaacccgctgtcggatcaaagcccgtgcacaccgctctacccattcctaatctggggaccaccgggtctcagcactgcagcagccggccccttgagctcactgagactgaaagttccatgctatcatgccagttggcattaaaatctacctgtgagttcggagaaaaaaagcctctccagggtaaagcaaaggagaaagaggacagtaaaatttataccgactgggcaaaccactatctggccaaaagtggacataaaagactgatcaaagatctgcagcaagatattgccgatggggttcttctggcggagattattcagattatcgcaaatgaaaaagtggaggacataaatgggtgccctaggtcccaaagtcaaatgatcgagaatgttgatgtgtgtctgagcttcttggctgcccgaggcgtgaatgttcagggcctttcagccgaggagattagaaacggaaatctgaaagccattctaggtctcttcttcagtctcagtcgttataagcaacagcagcaccaccaacagcagtactaccagtctctcgtggaactccagcagagagtgacacacgcctcccctcccagcgaggcctcgcaggcaaaaacacagcaggatatgcagtcttctttggctgctaggtacgccactcaatcaaatcactctgggattgcgacttcccaaaaaaagcccacaaggttgccaggcccctctcgcgttccagctgcaggctcctccagcaaggtgcaaggcgccagcaacttaaaccggcgcagtcagtccttcaatagcatcgacaaaaacaagcctcctaactatgccaatggaaacgagaaagacagctcaaaaggtccccagtcctcttccggcgtgaacggaaacgtgcagccacctagtaccgccggccaacctccggcttccgcaatcccttctcctagtgccagcaaaccctggagatctaagtccatgaacgtgaagcactccgctacttctacaatgctcaccgtcaagcagtcctccacagccacttcccctactccaagtagcgatagactcaagccccccgtgtccgagggcgttaagacggccccctcgggccagaaatccatgctggagaagtttaaactggtaaacgcacgcacggcacttagacctcctcaaccgcctagctctggcccctctgacggaggaaaagacgacgacgccttcagtgagagcggggaaatggagggctttaactccggactcaacagcggcggaagcacaaactcttctcctaaagtgtccccgaaactggcccccccaaaagccggcagcaagaatttgagtaacaagaagtccctgttgcagcctaaagaaaaggaggaaaaaaacagagacaaaaataaagtgtgtacagaaaagccggtcaaggaggagaaagatcaggtaacagagatggctcccaagaagacgtctaaaattgcaagtctaattcctaagggctccaagaccacagccgcaaagaaagaatcacttatccctagctcttcagggattccaaaacctgggtccaaggtccccacagtgaaacagacaatatcccccgggtctacagctagtaaggagtccgagaaattcaggactacaaagggctcaccttcccagtctttaagcaagcctattactatggagaaagcttctgcttcttcttgccccgcgccactcgaagggagggaggcgggccaggccagcccaagtggctcctgcacaatgacagtcgcccagtcctctggccagtctacgggcaatggcgctgtgcagttgccccagcagcagcagcactcacacccaaatactgccaccgtggctccatttatttatcgagcacacagcgaaaacgagggcacagcgctcccatccgcagattcatgcaccagtcctacaaagatggatctatcctacagcaaaacagccaagcagtgcttggaggaaattagcggcgaagacccagaaactcgtcggatgaggactgtgaagaacatcgccgatcttcggcagaatctcgaagagaccatgtcatccctgcgcgggacccagattagccatagcaccttggagaccacatttgattcaaccgtgactacagaagtgaacggccgaacaattccaaacctgacgtcacggccaacccccatgacttggcgcttaggacaggcgtgcccacgtctgcaagctggtgacgcaccatcattaggtgctgggtatcctcggtctggcacctcacggtttatccacaccgacccctccagatttatgtacacgacgcctttacgccgagcagccgtatctaggcttgggaacatgtcgcagatcgacatgtccgagaaagcctcatccgacctagacatgagctctgaggtggatgtcggcggatacatgtcagacggtgacattcttggcaaaagcctccggaccgatgatataaactcgggatacatgaccgacggcggactgaacctgtacactcggagtctgaaccgaattcccgacaccgctactagccgagatatcattcaaagaggcgtacatgacgtgactgtggatgccgattcctgggacgactcatcatccgttagctccggactcagtgacaccttggacaacatatcgacagacgatctgaatacgactagcagcgtctcatcttatagcaatatcacggtgccgagcagaaagaatactcagttgaggacggattcagagaagcgatctaccacggatgaaacctgggattccccggaggaattaaagaaacccgaggaagattttgactcacacggcgatgcagggggcaagtggaaaacagtgtcctcagggctccctgaggacccagaaaaggcgggccagaaagcgagcctgagtgtatcccagacaggctcatggaggagaggcatgtctgcacagggcggagctccctcaaggcagaaagctggcacctctgccctgaagacccctgggaaaaccgatgatgccaaggcttcagaaaaagggaaggcccctctgaagggctcgtcactgcagaggagtcctagcgatgccggtaaatcctcaggcgatgaggggaagaagcctccttccggaatcggacgttcgacagcgacgtccagctttggctttaagaagccatccggtgtgggctcttcagcaatgatcacatcaagcggggccacaatcactagcggatcggctactctgggcaagatcccaaagtccgctgccatcggaggaaaatctaacgccggccgcaaaacctccctggatgggagccaaaaccaggatgacgtggttctacacgtcagttccaagacaacccttcagtaccgtagcttgcctaggccgtccaagtctagtacctcaggaattcctgggcgcggcggacatcgctcttccacttcctctatagactccaatgtcagcagcaaaagcgcaggcgcaactaccagtaaactgagagagcccactaagattggctcagggcgctcaagcccagtgaccgttaatcaaactgacaaggaaaaggagaaggttgctgtcagtgactcagaatcggtgtccctgtccggatctccaaagtcaagcccaacatccgcaagtgcatgcggcgcgcaagggctcagacagccaggttccaagtatccagacattgctagcccaacttttagaagattgttcggcgccaaagcaggcggtaaatcagcgagtgcacccaataccgagggcgtgaaaagctcgtccgtgatgccctctccttctaccaccttagcccggcaaggctctcttgagtcgccttccagcgggaccgggagcatgggctccgccggaggtctgtcgggtagctcctctcctctcttcaacaaaccatctgatctgacgacagatgtcatttccttgtcacacagcctcgcttccagtcctgcatccgtgcacagcttcacatcaggagggcttgtttgggcagccaacatgagtagctccagcgccgggagcaaggacaccccatcctaccagtccatgactagtttgcatacctcatcagaatccattgatctgcctctctcccatcatggatcattatctggtctaactaccggaacgcatgaagtgcaaagcctgctgatgcgcactgggtccgttcggtccaccctgtcagaaagcatgcagctcgacaggaatactctgcccaagaaaggactcagatatacgccaagcagtcggcaggcgaatcaggaggaaggtaaagagtggcttcgctcacactcaactggagggctgcaggataccggcaaccagtcacccttggttagcccctccgcaatgtctagcagcgccgcaggcaaatatcacttcagtaatttagtgtctccaacaaacctgtctcagttcaatctccccggtccaagcatgatgcgtagcaacagcattcctgctcaggactcctcgtttgatctttacgacgacagccagctttgcggatctgcaacatcgctcgaggagcgtccgcgtgcaattagtcactctgggagtttccgtgactccatggaggaggtacatggttcctccctgtctctggtttctagcacctcgtcactgtactccacagccgaggaaaaggcacattccgagcaaatccataagctgcggcgtgagctcgtggccagtcaggagaaggttgccaccctgaccagccagctcagtgcgaatgcccatctggtggcagcctttgaaaaaagcctcggaaatatgaccggacgtcttcagtccctgactatgactgcagaacagaaggagtccgaactgatagagttgagagaaacgatagagatgttaaaggcccaaaactccgctgctcaggccgctatccagggagccctaaatgggcccgatcatcccccgaaagacctccggatccgcaggcaacattctagcgagtctgtgtcctccatcaatagcgcaacctctcactctagcataggaagtgggaacgacgcagatagcaaaaagaaaaagaagaagaactgggtcaatagcagaggcagcgaactgagaagctccttcaagcaagcattcggaaaaaaaaagagcactaaacctccaagttcccattcggatattgaagagctgaccgatagttccttaccggcctctccaaagcttcctcacaacgccggcgactgtgggagcgcgtccatgaagccatcccagagcgccagtgctatctgtgaatgcactgaggccgaggccgagattattctccagctaaaaagtgaactccgagaaaaagaactcaagctaactgatatcagactcgaggctctgtcaagcgcacaccatcttgaccaaatccgggaggccatgaaccgcatgcagaacgaaattgagattctcaaagctgagaatgaccgcctgaaagccgagactggaaataccgccaaacctacaaggccaccgtcagaatcctccagctccacctccagcagttctagccgacagtctttgggactatcactgaacaacctgaatatcacggaggccgtgtccagcgatattttacttgatgacgctggtgacgctactggccataaggacggacggagtgttaagatcatcgtgagtatctccaaagggtacgggcgggcaaaggatcagaagagccaggcttacctcataggttccatcggagtcagcggaaagaccaagtgggacgttttagacggcgtgatcaggagactgttcaaggaatacgtgtttaggatagatacatcaactagtctaggattgagctccgactgcattgccagttactgcattggggatctgatccgttctcacaacttagaagtccctgagctgttgccatgtggctaccttgtgggcgacaataatattatcacagtcaacctgaaaggggtggaggagaactctttagactcgttcgtcttcgacacacttatacccaagccgattacacagcgctattttaacctcctgatggagcatcaccggatcatactttctggaccaagcggaactggcaagacctatctggcgaacaaacttgctgagtacgtgattacaaaatccggtaggaaaaagacggaggacgccatcgcaacatttaacgtcgatcataaaagttccaaggagcttcagcagtaccttgctaatttggcagaacagtgttcagctgataacaacggcgtcgaactgccagtcgttattatcctggataacttgcatcacgtgggtagcctgtccgatatattcaatggctttctgaactgcaagtataataagtgcccctacatcattggcaccatgaaccagggagtctcctcatcaccgaacctcgagctgcatcataatttccgctgggttctatgtgccaatcacaccgagcccgtgaagggattcctcggcaggtatctgagaagaaaactgatcgagatagaaattgagaggaatattaggaacaatgacttggttaaaattatagactggatccctaagacgtggcaccacctgaattctttccttgagacccacagcagctccgatgtaactattggcccccggctgtttctcccgtgtcccatggacgtcgaggggagtagggtgtggttcatggacctgtggaattatagtctcgtgccatacattctggaggctgtcagggagggattgcaaatgtatggtaaacggaccccttgggaggacccttcaaaatgggtcttagatacctacccctggagttccgccacactgcctcaagagagccccgctttgctgcaactgcggcccgaagatgtcggatacgagtcgtgcacaagcacaaaggaggccacaacgagtaaacacatccctcagacagacacagaaggtgaccctctcatgaacatgctaatgaagctacaggaagcagctaattattcaagcacacagagctgtgatagcgaaagtactagccatcatgaagatatcttggattctagcctagagagcaccctgtag

SEQ ID NO: 183027 - DNA, 7092 bp, Artificial Sequence
  derived and/or modified sequence
atgcctgtgctgggcgtggccagcaagctgcggcagcctgctgtgggcagcaagcctgtgcacacagccctgcccatccccaacctgggcaccaccggcagccagcactgcagcagccggcccctggagctgacagaaacagagagctccatgctgagctgccagctggccctgaagagcacctgtgaatttggagagaagaagcccctgcagggcaaggccaaggagaaggaggacagcaagatctacacagactgggccaaccactacctggccaagagcggccacaagaggctcatcaaggacctgcagcaggacattgctgatggagtgctgctggccgagatcatccagatcatcgccaatgagaaggtggaggacatcaatggctgccccaggagccagagccagatgattgaaaatgtggatgtgtgcctgtccttcctggccgcccggggcgtgaatgtgcagggcctgtctgctgaggagatcagaaatggaaacctgaaggccatcctgggcctcttcttcagcctgagccgctacaagcagcagcagcaccaccagcagcagtactaccagagcctggtggagctgcagcagagggtgacccacgccagcccccccagcgaggccagccaggccaagacccagcaggacatgcagagcagcctggccgcccgctatgccacccagagcaaccacagcggcatcgccaccagccagaagaagcccacccggctgcccggccccagccgggtgcctgctgctggcagcagcagcaaggtgcagggcgccagcaacctgaacagaagaagccagagcttcaacagcattgacaagaacaagccacccaactatgccaatggaaatgagaaggacagcagcaagggcccccagagcagcagtggagtgaatggaaatgtgcagccccccagcacagctggccagcccccagccagcgccatccccagccccagcgccagcaagccctggaggagcaagtccatgaatgtgaagcacagcgccaccagcaccatgctgactgtgaagcagagcagcacagccaccagccccacccccagcagtgaccggctgaagccccctgtgtctgaaggagtgaagacagcccccagcggccagaagtccatgctggagaagttcaagctggtgaatgccaggacagccctgcggcccccccagccccccagcagcggccccagtgatggcggcaaggatgatgatgccttcagcgagagcggggagatggagggcttcaacagcggcctgaacagcggcggcagcaccaacagcagccccaaggtgagccccaagctggccccacccaaggccggcagcaagaacctgagcaacaagaagagcctgctgcagcccaaggagaaggaggagaagaacagagacaagaacaaggtgtgcacagagaagcctgtgaaggaggagaaggaccaggtgacagagatggcccccaagaagaccagcaagatcgccagcctcatccccaagggcagcaagaccacagctgccaagaaggagagcctcatccccagcagcagcggcatccccaagccaggcagcaaggtgcccaccgtgaagcagaccatcagccctggcagcacagccagcaaggagagcgagaagttccgcaccaccaagggcagccccagccagagcctgagcaagcccatcaccatggagaaggccagcgccagcagctgcccagcccccctggagggccgggaggccggccaggccagccccagcggcagctgcaccatgacagtggcccagagcagcggccagagcactggaaatggagctgtgcagctgccccagcagcagcagcacagccaccccaacacagccaccgtggcccccttcatctaccgggcccacagtgaaaatgaaggaacagccctgcccagcgctgacagctgcaccagccccaccaagatggacctgagctacagcaagacagccaagcagtgcctggaggagatcagcggggaggaccctgagaccaggaggatgaggacagtgaagaacattgctgacctgcggcagaacctggaggagaccatgagcagcctgcggggcacccagatcagccacagcaccctggagaccacctttgacagcacagtgaccacagaggtgaatggccgcaccatccccaacctgaccagccggcccacccccatgacctggaggctgggccaggcctgcccccggctgcaggccggagatgcccccagcctgggcgccggctaccccaggagcggcaccagccgcttcatccacacagaccccagccgcttcatgtacaccacccccctgcggcgggctgctgtgtcccggctgggcaacatgagccagattgacatgtctgagaaggccagcagtgacctggacatgagcagcgaggtggatgtgggcggctacatgtctgatggagacatcctgggcaagagcctgaggacagatgacatcaacagcggctacatgacagatggcggcctgaacctgtacaccaggagcctgaaccgcatcccagacacagccaccagccgggacatcatccagaggggcgtgcatgatgtgacagtggatgctgacagctgggatgacagcagctctgtgagcagcggcctgagtgacaccctggacaacatcagcacagatgacctgaacaccaccagctctgtgagcagctacagcaacatcaccgtgcccagcaggaagaacacccagctgaggacagacagcgagaagaggagcaccacagatgagacctgggacagccctgaggagctgaagaagccagaagaagattttgacagccatggagatgctgggggcaagtggaagacagtgagcagcggcctgcctgaggaccctgagaaggccggccagaaggccagcctgtctgtgtcccagacaggctcctggaggcggggcatgtctgcccagggcggggcccccagccggcagaaggccggcaccagcgccctgaagaccccaggcaagacagatgatgccaaggccagcgagaagggcaaggcccccctgaagggcagcagcctgcagaggagccccagtgatgctgggaagagcagtggagatgagggcaagaagccacccagcggcatcggccgcagcacagccaccagcagctttggcttcaagaagcccagcggcgtgggcagcagcgccatgatcaccagcagcggggccaccatcaccagcggcagcgccaccctgggcaagatccccaagtctgctgccatcggcggcaagagcaatgccggcaggaagaccagcctggatggcagccagaaccaggatgatgtggtgctgcacgtgagcagcaagaccaccctgcagtaccgcagcctgccccggcccagcaagagcagcaccagcggcatccctggccggggcggccacaggagcagcaccagcagcattgacagcaatgtgagcagcaagtctgctggggccaccaccagcaagctgcgggagcccaccaagattggcagcggccgcagcagccctgtgacagtgaaccagacagacaaggagaaggagaaggtggccgtgtctgattctgagagcgtgtccctgagcggcagccccaagagcagccccaccagcgccagcgcctgtggggcccagggcctgcggcagcccggcagcaagtacccagacatcgccagccccaccttcagaagactctttggagccaaggccggcggcaagagcgccagcgcccccaacacagagggcgtgaagagcagctctgtgatgcccagccccagcaccaccctggcccggcagggcagcctggagagccccagcagcggcaccggctccatgggcagcgctgggggcctgagcggcagcagcagccccctcttcaacaagcccagcgacctgaccacagatgtgatcagcctgagccacagcctggccagcagccctgcctctgtgcacagcttcaccagcggcggcctggtgtgggccgccaacatgagcagcagcagcgctggcagcaaggacacccccagctaccagagcatgaccagcctgcacaccagcagcgagagcattgacctgcccctgagccaccacggcagcctgagcggcctgaccaccggcacccatgaggtgcagagcctgctgatgaggactggatctgtgcgcagcaccctgtctgagagcatgcagctggacaggaacaccctgcccaagaagggcctgcgctacacccccagcagccggcaggccaaccaggaggagggcaaggagtggctgcggagccacagcactggaggcctgcaggacaccggcaaccagagccccctggtgagccccagcgccatgagcagcagcgctgctgggaagtaccacttcagcaacctggtgagccccaccaacctgagccagttcaacctgcccggccccagcatgatgaggagcaacagcatcccagcccaggacagcagctttgacctgtatgatgacagccagctgtgtggcagcgccaccagcctggaggagcggccccgggccatcagccacagcggcagcttccgggacagcatggaggaggtgcacggcagcagcctgagcctggtgagcagcaccagcagcctgtacagcacagctgaggccggcggcagcctggagcagatccacaagctgcggcgggagctggtggccagccaggagaaggtggccaccctgaccagccagctgagcgccaatgcccacctggtggccgcctttgagaagagcctgggcaacatgacaggccgcctgcagagcctgaccatgacagctgagcagaaggagagcgagctgattgagctgcgggagaccatcgagatgctgaaggcccagaacagcgctgcccaggccgccatccagggcgccctgaatggaccagaccacccccccaaggacctgcgcatccggcggcagcacagcagcgagagcgtgagcagcatcaacagcgccaccagccacagcagcatcggcagcggaaatgatgctgacagcaagaagaagaagaagaagaactgggtgaacagccggggcagcgagctgcggagcagcttcaagcaggccttcggcaagaagaagagcaccaagccacccagcagccacagcgacatcgaggagctgacagacagcagcctgcctgccagccccaagctgccccacaatgctggggactgtggcagcgcctccatgaagcccagccagagcgccagcgccatctgtgaatgtacagaagctgaggccgagatcatcctgcagctgaagtctgagctgcgggagaaggagctgaagctgacagacatccggctggaggccctgagcagcgcccaccacctggaccagatccgggaggccatgaacaggatgcagaatgaaattgagatcctgaaggccgagaatgaccggctgaaggccgagaccggcaacacagccaagcccaccaggcctccttctgagagcagcagcagcaccagcagcagcagcagccggcagagcctgggcctgagcctgaacaacctgaacatcacagaggccgtgtccagtgacatcctgctggatgatgctggagatgccaccggccacaaggatggccgctctgtgaagatcatcgtgtccatcagcaagggctacggccgggccaaggaccagaagagccaggcctacctgattggcagcattggagtgtctgggaagaccaagtgggatgtgctggatggagtcatccggcggctcttcaaggagtatgtgttcagaattgacaccagcaccagcctgggcctgagcagtgactgcatcgccagctactgcatcggggacctgatccgcagccacaacctggaggtgcctgagctgctgccctgtggctacctggtgggggacaacaacatcatcaccgtgaacctgaagggcgtggaggagaacagcctggacagctttgtgtttgacaccctcatccccaagcccatcacccagcgctacttcaacctgctgatggagcaccaccgcatcatcctgagcggccccagcggcaccgggaagacctacctggccaacaagctggccgagtatgtgatcaccaagagcggcaggaagaagacagaagatgccatcgccaccttcaacgtggaccacaagagcagcaaggagctgcagcagtacctggccaacctggccgagcagtgcagcgctgacaacaatggagtggagctgcctgtggtgatcatcctggacaacctgcaccacgtgggcagcctgagtgacatcttcaacggcttcctgaactgcaagtacaacaagtgcccctacatcatcggcaccatgaaccagggcgtgagcagcagccccaacctggagctgcaccacaacttccgctgggtgctgtgtgccaaccacacagagcctgtgaagggcttcctgggccgctacctgcggaggaagctgattgaaattgaaattgaaagaaacatccggaacaatgacctggtgaagatcatcgactggatccccaagacctggcaccacctgaacagcttcctggagacccacagcagcagtgatgtgaccatcggccccaggctcttcctgccctgccccatggatgtggagggcagccgggtgtggttcatggacctgtggaactacagcctggtgccctacatcctggaggccgtgcgggagggcctgcagatgtatggcaagaggaccccctgggaggaccccagcaagtgggtgctggacacctacccctggagcagcgccaccctgccccaggagagccctgccctgctgcagctgcggccagaagatgtgggctatgagagctgcaccagcaccaaggaggccaccaccagcaagcacatcccccagacagacacagaaggagaccccctgatgaacatgctgatgaagctgcaggaggccgccaactacagcagcacccagagctgtgacagcgagagcaccagccaccacgaggacatcctggacagcagcctggagagcaccctgtag

SEQ ID NO: 183028 - DNA, 7092 bp, Artificial Sequence
  derived and/or modified sequence
atgcctgtgctgggcgtggccagcaagctgcggcagcctgctgtgggcagcaagcctgtgcacacagccctgcccatccccaacctgggcaccaccggcagccagcactgcagcagccggcccctggagctgacagaaacagagagctccatgctgagctgccagctggccctgaagagcacctgtgaatttggagagaagaagcccctgcagggcaaggccaaggagaaggaggacagcaagatctacacagactgggccaaccactacctggccaagagcggccacaagaggctcatcaaggacctgcagcaggacattgctgatggagtgctgctggccgagatcatccagatcatcgccaatgagaaggtggaggacatcaatggctgccccaggagccagagccagatgattgaaaatgtggatgtgtgcctgtccttcctggccgcccggggcgtgaatgtgcagggcctgtctgctgaggagatcagaaatggaaacctgaaggccatcctgggcctcttcttcagcctgagccgctacaagcagcagcagcaccaccagcagcagtactaccagagcctggtggagctgcagcagagggtgacccacgccagcccccccagcgaggccagccaggccaagacccagcaggacatgcagagcagcctggccgcccgctatgccacccagagcaaccacagcggcatcgccaccagccagaagaagcccacccggctgcccggccccagccgggtgcctgctgctggcagcagcagcaaggtgcagggcgccagcaacctgaacagaagaagccagagcttcaacagcattgacaagaacaagccacccaactatgccaatggaaatgagaaggacagcagcaagggcccccagagcagcagtggagtgaatggaaatgtgcagccccccagcacagctggccagcccccagccagcgccatccccagccccagcgccagcaagccctggaggagcaagtccatgaatgtgaagcacagcgccaccagcaccatgctgactgtgaagcagagcagcacagccaccagccccacccccagcagtgaccggctgaagccccctgtgtctgaaggagtgaagacagcccccagcggccagaagtccatgctggagaagttcaagctggtgaatgccaggacagccctgcggcccccccagccccccagcagcggccccagtgatggcggcaaggatgatgatgccttcagcgagagcggggagatggagggcttcaacagcggcctgaacagcggcggcagcaccaacagcagccccaaggtgagccccaagctggccccacccaaggccggcagcaagaacctgagcaacaagaagagcctgctgcagcccaaggagaaggaggagaagaacagagacaagaacaaggtgtgcacagagaagcctgtgaaggaggagaaggaccaggtgacagagatggcccccaagaagaccagcaagatcgccagcctcatccccaagggcagcaagaccacagctgccaagaaggagagcctcatccccagcagcagcggcatccccaagccaggcagcaaggtgcccaccgtgaagcagaccatcagccctggcagcacagccagcaaggagagcgagaagttccgcaccaccaagggcagccccagccagagcctgagcaagcccatcaccatggagaaggccagcgccagcagctgcccagcccccctggagggccgggaggccggccaggccagccccagcggcagctgcaccatgacagtggcccagagcagcggccagagcactggaaatggagctgtgcagctgccccagcagcagcagcacagccaccccaacacagccaccgtggcccccttcatctaccgggcccacagtgaaaatgaaggaacagccctgcccagcgctgacagctgcaccagccccaccaagatggacctgagctacagcaagacagccaagcagtgcctggaggagatcagcggggaggaccctgagaccaggaggatgaggacagtgaagaacattgctgacctgcggcagaacctggaggagaccatgagcagcctgcggggcacccagatcagccacagcaccctggagaccacctttgacagcacagtgaccacagaggtgaatggccgcaccatccccaacctgaccagccggcccacccccatgacctggaggctgggccaggcctgcccccggctgcaggccggagatgcccccagcctgggcgccggctaccccaggagcggcaccagccgcttcatccacacagaccccagccgcttcatgtacaccacccccctgcggcgggctgctgtgtcccggctgggcaacatgagccagattgacatgtctgagaaggccagcagtgacctggacatgagcagcgaggtggatgtgggcggctacatgtctgatggagacatcctgggcaagagcctgaggacagatgacatcaacagcggctacatgacagatggcggcctgaacctgtacaccaggagcctgaaccgcatcccagacacagccaccagccgggacatcatccagaggggcgtgcatgatgtgacagtggatgctgacagctgggatgacagcagctctgtgagcagcggcctgagtgacaccctggacaacatcagcacagatgacctgaacaccaccagctctgtgagcagctacagcaacatcaccgtgcccagcaggaagaacacccagctgaggacagacagcgagaagaggagcaccacagatgagacctgggacagccctgaggagctgaagaagccagaagaagattttgacagccatggagatgctgggggcaagtggaagacagtgagcagcggcctgcctgaggaccctgagaaggccggccagaaggccagcctgtctgtgtcccagacaggctcctggaggcggggcatgtctgcccagggcggggcccccagccggcagaaggccggcaccagcgccctgaagaccccaggcaagacagatgatgccaaggccagcgagaagggcaaggcccccctgaagggcagcagcctgcagaggagccccagtgatgctgggaagagcagtggagatgagggcaagaagccacccagcggcatcggccgcagcacagccaccagcagctttggcttcaagaagcccagcggcgtgggcagcagcgccatgatcaccagcagcggggccaccatcaccagcggcagcgccaccctgggcaagatccccaagtctgctgccatcggcggcaagagcaatgccggcaggaagaccagcctggatggcagccagaaccaggatgatgtggtgctgcacgtgagcagcaagaccaccctgcagtaccgcagcctgccccggcccagcaagagcagcaccagcggcatccctggccggggcggccacaggagcagcaccagcagcattgacagcaatgtgagcagcaagtctgctggggccaccaccagcaagctgcgggagcccaccaagattggcagcggccgcagcagccctgtgacagtgaaccagacagacaaggagaaggagaaggtggccgtgtctgattctgagagcgtgtccctgagcggcagccccaagagcagccccaccagcgccagcgcctgtggggcccagggcctgcggcagcccggcagcaagtacccagacatcgccagccccaccttcagaagactctttggagccaaggccggcggcaagagcgccagcgcccccaacacagagggcgtgaagagcagctctgtgatgcccagccccagcaccaccctggcccggcagggcagcctggagagccccagcagcggcaccggctccatgggcagcgctgggggcctgagcggcagcagcagccccctcttcaacaagcccagcgacctgaccacagatgtgatcagcctgagccacagcctggccagcagccctgcctctgtgcacagcttcaccagcggcggcctggtgtgggccgccaacatgagcagcagcagcgctggcagcaaggacacccccagctaccagagcatgaccagcctgcacaccagcagcgagagcattgacctgcccctgagccaccacggcagcctgagcggcctgaccaccggcacccatgaggtgcagagcctgctgatgaggactggatctgtgcgcagcaccctgtctgagagcatgcagctggacaggaacaccctgcccaagaagggcctgcgctacacccccagcagccggcaggccaaccaggaggagggcaaggagtggctgcggagccacagcactggaggcctgcaggacaccggcaaccagagccccctggtgagccccagcgccatgagcagcagcgctgctgggaagtaccacttcagcaacctggtgagccccaccaacctgagccagttcaacctgcccggccccagcatgatgaggagcaacagcatcccagcccaggacagcagctttgacctgtatgatgacagccagctgtgtggcagcgccaccagcctggaggagcggccccgggccatcagccacagcggcagcttccgggacagcatggaggaggtgcacggcagcagcctgagcctggtgagcagcaccagcagcctgtacagcacagctgaggagaaggcccacagcgagcagatccacaagctgcggcgggagctggtggccagccaggagaaggtggccaccctgaccagccagctgagcgccaatgcccacctggtggccgcctttgagaagagcctgggcaacatgacaggccgcctgcagagcctgaccatgacagctgagcagaaggagagcgagctgattgagctgcgggagaccatcgagatgctgaaggcccagaacagcgctgcccaggccgccatccagggcgccctgaatggaccagaccacccccccaaggacctgcgcatccggcggcagcacagcagcgagagcgtgagcagcatcaacagcgccaccagccacagcagcatcggcagcggaaatgatgctgacagcaagaagaagaagaagaagaactgggtgaacagccggggcagcgagctgcggagcagcttcaagcaggccttcggcaagaagaagagcaccaagccacccagcagccacagcgacatcgaggagctgacagacagcagcctgcctgccagccccaagctgccccacaatgctggggactgtggcagcgcctccatgaagcccagccagagcgccagcgccatctgtgaatgtacagaagctgaggccgagatcatcctgcagctgaagtctgagctgcgggagaaggagctgaagctgacagacatccggctggaggccctgagcagcgcccaccacctggaccagatccgggaggccatgaacaggatgcagaatgaaattgagatcctgaaggccgagaatgaccggctgaaggccgagaccggcaacacagccaagcccaccaggcctccttctgagagcagcagcagcaccagcagcagcagcagccggcagagcctgggcctgagcctgaacaacctgaacatcacagaggccgtgtccagtgacatcctgctggatgatgctggagatgccaccggccacaaggatggccgctctgtgaagatcatcgtgtccatcagcaagggctacggccgggccaaggaccagaagagccaggcctacctgattggcagcattggagtgtctgggaagaccaagtgggatgtgctggatggagtcatccggcggctcttcaaggagtatgtgttcagaattgacaccagcaccagcctgggcctgagcagtgactgcatcgccagctactgcatcggggacctgatccgcagccacaacctggaggtgcctgagctgctgccctgtggctacctggtgggggacaacaacatcatcaccgtgaacctgaagggcgtggaggagaacagcctggacagctttgtgtttgacaccctcatccccaagcccatcacccagcgctacttcaacctgctgatggagcaccaccgcatcatcctgagcggccccagcggcaccgggaagacctacctggccaacaagctggccgagtatgtgatcaccaagagcggcaggaagaagacagaagatgccatcgccaccttcaacgtggaccacaagagcagcaaggagctgcagcagtacctggccaacctggccgagcagtgcagcgctgacaacaatggagtggagctgcctgtggtgatcatcctggacaacctgcaccacgtgggcagcctgagtgacatcttcaacggcttcctgaactgcaagtacaacaagtgcccctacatcatcggcaccatgaaccagggcgtgagcagcagccccaacctggagctgcaccacaacttccgctgggtgctgtgtgccaaccacacagagcctgtgaagggcttcctgggccgctacctgcggaggaagctgattgaaattgaaattgaaagaaacatccggaacaatgacctggtgaagatcatcgactggatccccaagacctggcaccacctgaacagcttcctggagacccacagcagcagtgatgtgaccatcggccccaggctcttcctgccctgccccatggatgtggagggcagccgggtgtggttcatggacctgtggaactacagcctggtgccctacatcctggaggccgtgcgggagggcctgcagatgtatggcaagaggaccccctgggaggaccccagcaagtgggtgctggacacctacccctggagcagcgccaccctgccccaggagagccctgccctgctgcagctgcggccagaagatgtgggctatgagagctgcaccagcaccaaggaggccaccaccagcaagcacatcccccagacagacacagaaggagaccccctgatgaacatgctgatgaagctgcaggaggccgccaactacagcagcacccagagctgtgacagcgagagcaccagccaccacgaggacatcctggacagcagcctggagagcaccctgtag

SEQ ID NO: 183029 - DNA, 7092 bp, Artificial Sequence
  derived and/or modified sequence
atgcccgtgctgggcgtggccagcaagctgcggcagcccgccgtgggctccaagcccgtccacaccgcactccccattccaaatctgggaacaaccggctcacagcattgctcatctcgcccgttggagctgacagagacagaatcttcgatgctgagctgccaacttgctctgaaatccacctgtgagttcggagaaaaaaagcctctgcaggggaaagccaaggagaaggaggatagcaaaatttatacagactgggcaaaccactacctggccaaaagcggacacaagagactaattaaagatctccagcaggacatcgcagacggggtcctcctagcagaaatcatccagatcatcgccaacgaaaaagtagaggacataaatggctgtccgcgcagccagtcacagatgatcgagaacgtggacgtctgccttagtttcctggctgccagaggggtgaatgtgcagggcctcagtgccgaagaaattaggaacggaaatctgaaggcaatacttggactattcttctctctgtccaggtacaagcagcaacagcatcatcagcagcagtactaccaatccctcgtggagctgcaacagagagtgacccatgctagcccaccctctgaagcatcccaggccaaaacgcagcaggacatgcagtcatccctggctgcaagatacgccacccaatcgaaccattctggaattgctacaagccaaaagaaacccacacgtttgccaggaccatcccgagtcccagcagcgggtagctccagcaaagtccagggagcttcaaatctgaatagaagatctcaaagcttcaatagtatcgacaaaaataaaccacctaattatgccaatggcaacgagaaagattcatccaaggggcctcagtcatcaagcggcgtcaatggaaatgtgcagccaccttcaacagccggacaacctccggcctcagctattccttccccttccgcctccaaaccatggcgctccaaaagcatgaacgtgaaacacagtgccacctctacgatgttgaccgttaaacagagctcgacagccacctccccaaccccttcgagcgatcgcctgaaaccacctgtcagcgagggggtgaagacagccccctccggccaaaaatctatgctggagaaatttaagctggttaacgcccgaacggctttgcgcccccctcagcctccttcatcagggccctcggatggcggtaaagatgacgatgccttctccgagtccggcgagatggaggggttcaatagcggtttgaattccggggggagcactaatagctcgcctaaggtgtcccccaagttagctcctcccaaggcggggtctaagaatctgtctaacaaaaagtcactactccaacccaaagagaaggaggaaaagaaccgcgataaaaacaaggtctgtacagagaagcctgtgaaggaagaaaaagatcaggtcacagagatggcaccaaagaagacaagcaagattgcctctctgatcccaaaaggtagtaagaccacggccgcgaagaaagagagcctgattccctcttctagcgggattccaaagccaggttcaaaagtgccaacagtcaaacaaaccatctcgccagggtccactgcttctaaggaatctgaaaagtttagaaccacaaaaggcagtcccagtcaaagtttgagcaagcccatcacgatggagaaggcaagcgcttctagctgccccgctcctctcgaaggtcgcgaagccggacaagcttccccaagcggaagctgtactatgaccgttgctcaaagctccggccagtctaccgggaacggcgcagtgcaattaccccaacaacaacaacatagccacccaaataccgcaaccgtggcaccctttatatatcgagcccattccgaaaacgagggcactgccttgccttccgccgacagctgtaccagcccaacgaagatggacctgagctactctaaaaccgcaaaacagtgcttagaagaaatatcgggggaagacccagagacacgcaggatgcgcaccgtaaagaatatcgccgacctccggcaaaatttggaggaaacaatgtcctccctgcgcggcactcaaatatcccattccaccctggagaccacattcgactccacagtcacgacggaggtaaatggcagaaccatacctaatctgacctcccggccaacgccgatgacctggcgcttaggtcaggcttgcccccggctccaagcaggcgatgcaccatctttgggcgccggctatccacggagcggcacaagtcgattcatacataccgatccctcacgtttcatgtacaccacccctctccggagggctgccgtctcccgactcggcaatatgtcccagattgacatgtctgaaaaggcctcttctgacctggacatgtccagcgaagtcgacgtgggcggttatatgtcagacggcgacatcctgggaaagtccctacgtaccgacgacattaactccggttatatgacagatggtggactgaacctctataccaggagtctgaatagaattcccgacactgctaccagccgcgatatcatccaacgaggcgtacacgacgtcaccgtggatgctgactcctgggatgattccagctcagtaagtagcggcctaagcgacaccttggacaacatctcaactgatgacctgaatactacttcttcagtgagctcttactcgaacatcactgttcccagcagaaagaatacacagttgcgcactgacagtgagaaaagaagtaccacagacgaaacttgggactcgcccgaggaactgaagaaacccgaagaagatttcgacagccacggcgacgctggcggaaagtggaaaaccgtatcctcgggcctgccagaggatcccgagaaagccgggcagaaagctagcctttcagtgtctcagacgggctcctggagaaggggcatgtctgctcagggcggcgccccaagtagacagaaggccgggactagcgcactgaagacacctgggaaaacggatgatgcgaaagcttccgagaagggcaaggccccccttaaaggtagtagcctgcagcggtcgcctagtgatgccggtaagtccagcggagatgaagggaagaagcctccatccgggataggaaggtccacagccacatcctccttcggattcaagaagccatccggagtaggcagtagcgccatgattacgagcagcggcgcgacaatcacttccggtagcgctaccttggggaaaatccctaagtcagccgccatcggcggcaaatccaatgcagggcgcaaaacaagcctcgacggttcacagaatcaggatgatgtcgtgctgcacgttagctctaaaacaactcttcagtataggagcctgccacgaccatctaaaagctcaaccagcgggattcctggccggggcggtcataggtctagtacgagcagtatcgattccaacgtgtcttccaaatcggccggcgcaaccacaagcaaactgcgtgagcctaccaagattgggtcaggtcggagtagccccgttacagtcaaccagacagataaagagaaggaaaaagtagcagtttccgactccgagtcagtgagcctttctgggtctccaaagagctcccctacatcagccagcgcctgtggtgcacagggactgagacagccaggttcaaagtaccctgacatcgcgagcccaacatttcgcaggttgttcggtgcaaaagccggggggaagtccgccagcgccccaaatacagaaggtgtgaagtcttccagtgttatgccctcccctagcaccacattggctcgacagggatccctcgagtctccgtcatctggcactggcagcatgggctccgccgggggtctgagcggatcttcctcaccattgttcaacaaaccatctgacctgaccaccgatgtgatatcactgtcccatagcctggcgtcgtccccagcttcggtccattcgttcacatctggcggcttagtgtgggctgccaacatgtcgagctcttcagcgggctccaaagataccccatcctaccagtcaatgaccagcctgcacactagcagcgaatcgatcgatctgcccctttcccatcacgggtcactctccgggctcaccaccggaacgcacgaggttcagtctctcctgatgcgtaccgggagcgtacggtccacactctcggaaagcatgcagctcgaccggaacactctgcctaagaaagggttgcgctacacgccatctagtaggcaggccaatcaggaggaaggaaaagagtggctgaggagccactctaccggtgggctccaggacaccgggaaccaaagccctctcgtgtccccctccgccatgagcagttccgctgccggcaagtatcatttctctaatctggtgtcacccacaaacctatcccagtttaacctgcctggaccatctatgatgcgctcaaacagtatcccggcccaagattcctcatttgacctctatgatgactcacagctgtgtggatccgccacaagtctggaggaacgaccgcgagccatctcacatagtggcagtttcagggactcgatggaagaagtccatggatctagtctctcccttgtgtcctcaacaagtagtctatattcaacagctgaggccgggggcagcctggagcagattcacaagctccggcgggagctggttgcttcccaagagaaagtggcgactttgacatcccagctcagcgccaatgcgcacctcgtcgcagcctttgagaagagtttgggaaacatgactggccgcttgcagtccctgactatgacagccgagcagaaggaatctgaactgatagaactcagggaaacaattgaaatgctgaaggcacaaaactctgctgctcaggctgccatacagggggcactgaatgggccggaccatccaccgaaagacctaagaatacggcgccagcactctagtgaatccgtgagcagcattaactctgcgacctcacacagctcaatcggaagtggaaacgacgccgactctaaaaaaaagaaaaaaaagaattgggtgaatagccggggtagtgagcttcgcagttcatttaaacaggcattcggtaaaaaaaagtcgaccaagcccccaagctctcacagcgatattgaggagttaaccgatagcagcctccccgcgagcccaaaactgccacacaacgctggggattgcgggtcagcatctatgaagccatctcaaagtgcctctgccatttgtgagtgcaccgaagctgaagcagagatcattctgcagctcaagtccgaactcagagaaaaggaattaaaactgacagacatccgactggaggcgctctctagcgcgcatcacctggaccaaataagggaagccatgaaccgtatgcagaacgaaattgaaattttaaaagccgaaaatgaccgactgaaggccgagactggcaacactgccaaaccaactcgacctccgtccgagtcttctagcagtaccagcagcagttccagccgacaatctctcggcttaagcttaaacaacttgaacataaccgaggcggtgtcaagcgacattctgctagatgacgctggagatgctactgggcacaaggacggtcggagcgtgaagatcatcgtgtccattagcaaaggttatgggcgggctaaagatcaaaaaagtcaggcatacctcatcggatctatcggagtatctggcaagacaaaatgggatgtcctcgacggggttatacgacggctgtttaaggaatatgtatttagaatcgacacatctacctctctgggactgtcgagcgattgcatcgcctcttactgcatcggcgacctcatcagaagtcacaacctagaggtgccggaacttctgccttgcgggtatctggtaggggacaacaacatcattaccgttaatctaaaaggcgtcgaggagaacagccttgattcttttgtattcgacaccctgattccgaagccaattacacaaaggtatttcaatttactgatggagcaccataggatcatcctgagtgggccgtccggcactggtaagacttatttggcaaataagctcgctgagtatgttattactaaatccggccggaaaaaaaccgaagacgcgatagctacattcaacgtcgaccacaaaagcagcaaagaattgcagcagtatttggccaacctggccgagcagtgttcagcagataataatggcgtggaactgcctgtagtgatcatcttggataacctgcaccacgttgggtcactctccgatatctttaatgggtttctgaattgtaagtacaacaagtgcccttacattattgggaccatgaatcagggcgtgagcagcagccccaatcttgagctgcaccataattttagatgggtgctatgcgctaaccacaccgagccagtgaagggttttctcggcagataccttcggagaaagctgatagagatcgagatagaacgtaatattaggaacaacgatctagtcaagatcattgactggattcccaaaacgtggcatcatttaaattctttcttagagacgcactcctctagcgacgtgaccattggacctagattatttctcccttgtccaatggacgtggaggggagtcgagtctggtttatggatctctggaactattcccttgtaccttacatcctggaggccgtgcgcgaaggactacaaatgtacgggaaaaggactccctgggaggacccaagcaagtgggttttggatacctatccctggtcatcggcaacactcccacaggagtcgccagccctgctgcagcttcggcccgaagatgtagggtatgagtcctgtacctccaccaaggaggccacaacatcgaagcacatcccgcagactgataccgagggcgacccactcatgaatatgctcatgaaactgcaggaggccgctaattatagttccacccagagctgtgattctgagagcacaagccaccatgaggatattttagattctagtttggaatctacactgtag

SEQ ID NO: 183030 - DNA, 7092 bp, Artificial Sequence
  derived and/or modified sequence
atgcccgtgctgggcgtggccagcaagctgcggcagcccgccgtggggtcaaagccggtccataccgccctgcctatcccgaacctgggaacaaccgggagccagcactgcagtagccggccattagagctgacagaaacagaatcatccatgttatcttgtcagcttgctctaaagagcacttgcgaattcggagaaaaaaagccgttgcagggcaaggctaaagagaaagaggattcaaagatctataccgattgggccaatcattacctcgcaaagagcgggcacaagcggctgatcaaggacttacaacaggacatcgcagatggagtcctcctggccgagataattcagatcatcgcgaatgaaaaagtggaagacattaatggatgccctagaagccaatctcagatgatcgaaaacgttgacgtgtgcctatcctttttggctgcacggggagtgaacgttcagggactgtccgcggaagaaattagaaacggcaatcttaaggccattctggggctctttttcagcttgagcagatacaaacagcagcagcaccaccagcagcagtattaccagtctctggtcgagttacagcagagagttacccacgcctctcctcctagtgaggcctcccaggctaagactcagcaagacatgcaatccagccttgccgcaaggtatgccactcaaagtaaccacagcggtatcgcgacttcgcaaaaaaaacccacacgtttaccgggtccctcacgcgtgcccgcagctgggtctagctcgaaagttcaaggcgcttccaacttgaatcgtcggtcccagagtttcaactccattgataagaataaaccgcctaactacgctaatgggaacgagaaggactcctctaagggcccccagtcttcctccggggtgaatggaaacgtgcagcctccctccaccgctggccagcccccagccagtgccattccgtccccgagcgccagtaagccctggagaagtaagagtatgaatgtcaagcattctgccacctccacgatgctgaccgtcaaacagtcatccacagctactagtcctactcccagcagtgatcgtctcaagcctcctgtgtccgagggagtaaaaaccgctccaagcgggcagaagtcgatgttagaaaaattcaagcttgtcaacgctcgcaccgcccttaggcccccccagcctccgtccagtggacctagcgacgggggaaaagacgacgacgccttctctgagtccggggagatggagggtttcaattctggcctgaactccggcggctcaactaactcaagccctaaggtgtcacctaagctggcgccacctaaagccgggtccaaaaacttatccaacaaaaagagcctcctgcagcctaaggaaaaagaggaaaagaatcgggacaagaataaggtttgcaccgaaaagccagtcaaggaagagaaggaccaggtgacagagatggcgccaaaaaagactagcaaaatagcttctctgattccaaaaggtagtaaaaccaccgccgccaaaaaggagagcctcatcccgagcagctctggaataccgaaaccaggtagcaaagtgcctacggtcaaacaaactatctccccaggatcaacagcctccaaagagagcgaaaagtttagaaccactaaaggttccccgtcacaatccttatccaaacctatcaccatggagaaggcatccgcttcatcctgtcctgccccattagagggacgggaagcgggccaagccagtccatccggttcgtgcaccatgaccgtggctcagagctctggacagtcaacagggaatggggccgtccagctacctcaacagcagcaacattcccatcctaacacagcaaccgttgcgccatttatttatcgcgcacactccgaaaatgagggtacggcgctcccctccgccgacagttgcacctctcccaccaaaatggacttaagctattctaagactgctaaacagtgcctggaggaaatctctggtgaagatccagagacacggcggatgcgaacagtgaagaatatagctgatttgagacaaaatttggaagagaccatgagctcattacgagggactcagatatcacacagtacgctcgagacgaccttcgatagcactgtgaccactgaggtgaacggtaggaccatcccaaatttaactagcaggccaacccccatgacgtggagactggggcaggcttgccctcgactgcaggctggagatgcgcccagtctgggcgcgggatacccacggtcgggcacatctagattcatccacacggacccttcacgattcatgtataccacacctctccgccgggccgccgtgtctcgactgggcaacatgtcccagatcgacatgtcggagaaggcctcctctgatctcgacatgagctctgaggtcgacgtcggcgggtatatgagtgacggggatatccttgggaagagccttagaactgatgatataaattccgggtacatgactgatggcgggctgaatctatatactcgctctcttaatagaatacccgatactgctaccagccgagatattattcagaggggtgttcacgatgtcaccgttgatgctgattcgtgggacgactctagttccgtctcctcgggtttaagtgacaccctggataacatctccacagatgacctgaataccacgtcaagcgtgtcttcatactccaacatcaccgttccaagccgaaaaaatacgcagttaaggaccgatagtgagaagcgatccacaacagacgagacctgggactcacccgaggagctgaagaagccggaggaggacttcgactctcacggcgacgccggaggcaaatggaagaccgtgtcatcgggcctccccgaggatccagagaaggcaggacagaaagcgagcttgagcgtgtcacaaactggttcctggcgccgtggaatgtcagcacaggggggtgcgccatcgaggcagaaggccgggacatcagccctgaagacccccggaaagaccgatgatgcaaaagcctccgaaaaggggaaggctcccctgaaggggtcttccctccagcgctcccctagcgacgcaggtaagagcagcggggacgaggggaagaagcccccgtccggcataggtagatccacagccacgtctagcttcggcttcaagaagccgagtggggtcggctcatcggccatgataacgtcgagtggcgccacaataaccagtgggtccgccacgcttgggaaaattcctaagtctgcggctatcggaggtaaaagcaacgccggtcggaagactagcctggacggctcacaaaatcaagacgacgtggtgctccacgtcagctcgaagacgaccctgcagtacaggtctttgccacggcccagcaaatccagtactagcggcattcccgggagaggaggtcaccgtagtagcactagttcaattgattcgaatgtatccagtaagagcgcaggagccaccacatctaaacttcgtgaaccgactaagataggctctggtagatccagtccggtcacagtcaatcaaaccgataaggagaaagaaaaggtagccgtatccgacagtgagtctgtgtcccttagcggctcccccaagtcatctcccactagcgcctccgcttgcggtgcccagggcctgcgacagccagggagcaagtatcctgacattgctagtccgactttccggaggctcttcggcgcaaaggcgggagggaagtcggccagcgccccaaatactgaaggcgtcaagtcttcctctgtgatgcccagcccctctactacacttgccagacaggggtctctggagtctcccagttcaggcactggaagcatgggcagcgccggaggtctttctggaagcagctcgcccctctttaataagccctcagatctcactactgacgtgatctccctgtcacactcactggcatcctcgcctgcctctgttcacagttttaccagtggaggccttgtgtgggcagccaacatgagctccagtagtgccggaagtaaagacacaccaagctatcaatccatgaccagcctgcacactagcagtgaaagtatcgatctgccactgagccatcacgggagcttgtccggcttgactacaggcacacatgaagtgcagtcgctgttgatgcggactggaagcgtgcgcagtacattgtccgagagcatgcaactcgatcgcaacacactgccaaaaaagggactgcggtacactccatcttcacggcaggctaatcaggaagaaggcaaagaatggctgcgctctcattccaccggcggtcttcaagacaccggaaatcaatctcccctcgtctcaccatctgccatgtcttcaagcgccgctggtaaataccacttcagtaacctcgtctccccgaccaatctatcacagtttaacctgccagggccatctatgatgagatcaaattccatccccgcccaggattcatcgtttgatctgtatgacgattcacagctatgcgggtccgccacatccctagaagaaaggccaagggctatatctcactccggctcatttagggactcaatggaagaagtacacgggtcctctctctctcttgtgagtagcaccagcagcctctactccacagcagaagaaaaagcacacagtgaacagattcataagctgaggcgggagctggtggcatcccaggaaaaggttgccaccctgacttcacagctgtccgcgaatgcacatttggtggccgctttcgagaagtcactcggtaatatgaccggccgcttgcagagtctgacaatgactgccgagcagaaggaatctgagctgatcgagcttcgcgagactatcgagatgctgaaagcacagaatagcgccgctcaggccgctatccagggtgccctcaatggaccggaccaccctcccaaagacctccgcattcgacgccagcactcgagtgagtcagtctcatctattaacagtgccaccagtcacagtagtattggctccgggaatgacgctgatagcaaaaaaaagaaaaaaaaaaactgggttaacagtcggggctctgaacttagatcctcctttaaacaggcattcgggaaaaaaaaatcaacgaagcctcctagcagtcactccgacatagaggagttgacagatagctcactcccagctagccccaagttgcctcataatgcaggggattgtggttctgcatccatgaagccatcccagtccgccagtgctatctgtgagtgcaccgaggccgaagccgagattatcctgcagctgaagagcgagctccgagaaaaagaactgaagttgaccgacatccgcctggaggcgctgtcgtctgcgcaccatttagaccagattcgcgaggctatgaaccgcatgcagaacgagatcgagattttgaaggccgaaaatgacaggctcaaggctgagacagggaacactgcaaagcccacccgcccgccctctgagtcttcatcatccaccagtagtagcagcagcagacagtccctgggcctgtccctcaataatctgaacatcactgaagcagtgagctctgacattctgctggacgacgcaggcgacgccacgggccacaaggatgggcggagtgtgaaaattatagtgtctatcagcaaagggtatgggagagctaaagatcaaaaaagccaagcctatctgataggctcaatcggcgtgtccggcaaaacaaaatgggacgtgcttgacggagtgatccgtcgtttgtttaaagagtatgtgttccgtattgacacttctacgtctctgggtctctcttctgattgtatagctagctattgtattggggaccttattagatcacacaacctagaggtgcctgagttgctgccatgtgggtacttggttggcgacaacaacattatcaccgtcaacctgaaaggggtggaggagaattccctggattcttttgtcttcgatactctgatacccaagcccattactcaacgttattttaatctgctcatggagcaccacagaataatcctgtcggggccttccgggaccggcaagacgtacctcgcaaacaagttggctgaatacgtgatcaccaagagcgggcggaagaaaacagaggatgctatagctaccttcaatgtggatcataagtcaagtaaggaactgcagcaatacttggccaacttagctgaacaatgtagcgcggacaacaacggcgtggagctgccagtcgtaattattctcgacaaccttcatcatgtgggctcactgtcagatatttttaatggtttcctgaactgcaagtacaataaatgtccatatatcataggaacgatgaatcagggcgtaagttcctctccaaaccttgagctgcaccataacttcagatgggttctgtgcgctaatcataccgaaccagtaaagggcttcctcgggaggtacttgagacggaaactaattgaaatcgagattgaaagaaacataaggaataatgatttagtcaagataatcgactggattcccaagacatggcatcacctgaattcttttctggagacccattctagctctgatgtgaccatcggcccacgcttatttcttccatgtcctatggacgttgaggggtcccgcgtctggtttatggatttgtggaattactccctcgtgccttatatcctggaggccgtacgagagggactgcagatgtatgggaaacgcaccccatgggaggatccatctaagtgggtgctggatacgtatccctggagctccgccacattgccacaggaaagccccgccttgctccagctgcggcctgaagacgttggctatgagtcctgcacgtcaacaaaagaagctacaactagcaaacacatcccacagaccgatacagagggagatccattgatgaatatgctcatgaagcttcaagaggccgcaaactatagcagcactcagtcttgcgactctgagtcaacaagccatcatgaggatattctggactccagtctcgagtccaccctgtag

SEQ ID NO: 183031 - DNA, 9758 bp, Artificial Sequence
  derived and/or modified sequence
agatgcagggaagttttgcctcttcctgaaaattatattattagctttttaaaaatcaggatgactgctagttttgtttaaagtatttgttctggaaatactaaagttggagtctaccagactgaggttagaagcattttctttggcagcaagaagataattttatagaagccatgcctgttcttggggttgcctcaaaactgaggcagccagctgttgggtcaaagcctgtgcatactgctcttccgataccaaatcttggcactactgggtcacagcactgttcttcaagacctttggaacttactgaaacagagagctccatgctttcttgtcagcttgcgttaaaatcaacctgtgaatttggagagaagaaacccctccaaggaaaagccaaggagaaagaagacagcaagatttacactgactgggccaaccactacctagcaaaatcaggccacaagcggctgatcaaggacttgcaacaagacattgcagatggagtactcctagcagaaatcatccagattattgcaaatgaaaaagttgaagatatcaatggatgtcctagaagtcagtctcagatgattgaaaatgttgatgtctgccttagttttctagcagccagaggggtaaatgttcaaggtctatctgctgaagaaataagaaatggaaacttaaaagccattctagggctgtttttcagtttatctcgctacaagcagcaacaacaccatcaacaacagtactatcagtccttggtggaacttcagcagcgagttactcacgcttcccctccatcggaagccagccaggccaaaacccagcaagatatgcagtccagtctggcagccagatatgcaactcagtctaatcacagtggaattgcaaccagtcaaaaaaagcctactaggcttccagggccctctagggtgcctgctgcaggaagcagcagcaaggtccagggagcctctaatttaaataggagaagtcagagctttaacagcattgacaaaaacaagcctccaaattatgcaaatggaaacgaaaaagattcctccaaaggacctcaatcgtcttcaggtgtaaatggtaacgtgcagcctcccagtactgctgggcagcctcctgcctctgccatcccttctccaagtgccagcaagccctggcgcagcaagtccatgaatgtcaaacacagtgccacctccaccatgttgactgtaaagcagtcaagtacagccacctcccccacaccatcttcagacagactgaagccacctgtctcagaaggggtcaaaactgctccctcaggacagaaatccatgcttgagaaattcaagctagtcaatgcccggactgctttacgccccccgcagcctcccagttcaggacctagtgatggtgggaaggatgatgatgccttttctgaatctggtgaaatggaaggttttaacagtggtctgaatagtggtggctcaacaaatagcagtcccaaagtgtcacctaagttggcccctccaaaagctggaagcaaaaatctcagcaataaaaagtctttgctacagccaaaggaaaaagaagaaaagaacagggacaaaaataaagtttgcactgaaaaaccagtcaaagaagagaaggatcaggtgacagagatggctccaaaaaagacctccaaaattgcaagcttgatccctaagggcagcaagacaacagcagctaagaaggaaagcttaattccgtcttccagtggtattccaaaaccaggctctaaagttccaacagtaaagcaaaccatttcacctggcagcacagcaagcaaagagtctgagaaattcaggactaccaaggggagcccttcccagtccttatctaagcctataaccatggagaaagcaagtgcttctagttgtcctgcccctttggaaggaagggaagctggccaagcttctccttctggttcctgtaccatgacagtggcacaaagcagtgggcagagcacaggaaatggtgctgtccaactccctcaacagcagcaacatagccacccgaataccgcgacagtggcaccattcatttacagggcacattcagaaaatgaaggtaccgctttaccatcggctgactcctgtaccagtcctacaaagatggacttatcatatagtaagactgctaagcagtgcctggaggagatatctggtgaagaccctgaaacaagaagaatgagaacagttaaaaacatagcagacttgaggcagaatttagaagagactatgtccagtcttcgtgggactcagataagccacagcaccctggagacaacatttgacagcactgtgacaacagaagttaatggaaggaccatacccaacttgacaagtcgacccacccccatgacctggaggttgggccaggcatgtccgcgacttcaggcgggagatgctccctccctgggtgctggctatcctcgcagtggtaccagtcgattcatccacacagacccctcgaggttcatgtataccacgcctctccgtcgagctgctgtctctaggctgggaaacatgtcacagattgacatgagtgagaaagcaagcagtgacctggacatgtcttctgaggtcgatgtgggtggatatatgagtgatggtgatatccttgggaaaagtctcaggactgatgacatcaacagtgggtacatgacagatggaggacttaacctatatactagaagtctgaaccgaataccagacacagcaacttcccgggacatcatccagagaggggttcacgatgtgacagtggatgcagacagctgggatgacagcagttcagtgagcagtggtctcagtgacacccttgataacatcagcactgatgacctgaacaccacatcctctgtcagctcttactccaacatcaccgtcccctctaggaagaatactcagctgaggacagattcagagaaacgctccaccacagacgagacctgggatagtcctgaggaactgaaaaaaccagaagaagattttgacagccatggggatgctggtggcaagtggaagactgtgtcctctggacttcctgaagaccccgagaaggcagggcagaaagcttccctgtctgtttcacagacaggttcctggagaagaggcatgtctgcccaaggaggggcgccatctaggcagaaagctggaacaagtgcactcaaaacacccgggaaaaccgatgatgccaaagcttctgagaaaggaaaagctcccctaaaaggatcatctctacaaagatctccttcagatgcaggaaaaagcagtggagatgaagggaaaaagcccccctcaggcattggaagatcgactgccaccagctcctttggctttaagaaaccaagtggagtagggtcatctgccatgatcaccagcagtggagcaaccataacaagtggctctgcaacactgggtaaaattccaaaatctgctgccattggcgggaagtcaaatgcagggagaaaaaccagtttggacggttcacagaatcaggatgatgttgtgctgcatgttagctcaaagactaccctacaatatcgcagcttgccccgcccttcaaaatccagcaccagtggcattcctggccgaggaggccacagatccagtaccagcagtattgattccaacgtcagcagcaagtctgctggggccaccacctcgaaactgagagaaccaactaaaattgggtcagggcgctcgagtcctgtcaccgtcaaccaaacagacaaggaaaaggaaaaagtagcagtctcagattcagaaagtgtttctttgtcaggttcccccaaatccagccccacctctgccagcgcctgtggtgcacaaggtctcaggcagccaggatccaagtatccagatattgcctcacccacatttcgaaggttgtttggtgccaaggcaggtggcaaatctgcctctgcacctaatactgagggtgtgaaatcttcctcagtaatgcccagccctagtaccacattagcgcggcaaggcagtctggagtcaccgtcgtccggtacgggcagcatgggcagtgctggtgggctaagcggcagcagcagccctctcttcaataaaccctcagacttaactacagatgttataagcttaagtcactcgttggcctccagcccagcatcggttcactctttcacatcaggtggtctcgtgtgggctgccaatatgagcagttcctctgcaggcagcaaggatactccgagctaccagtccatgactagcctccacacgagctctgagtccattgacctccccctcagccatcatggctccttgtctggactgaccacaggcactcacgaggtccagagcctgctcatgagaacgggtagtgtgagatctactctctcagaaagcatgcagcttgacagaaatacactacccaaaaagggactaagatataccccatcatctcggcaggccaaccaagaagagggcaaagagtggttgcgttctcattctactggagggcttcaggacactggcaaccagtcacctctggtttccccttctgccatgtcatcttctgcagctggaaaataccacttttctaacttggtgagcccaacaaatttgtctcagtttaaccttcccgggcccagcatgatgcgctcaaacagcatcccagcccaagactcttccttcgatctctatgatgactcccagctttgtgggagtgccacttctctggaggaaagacctcgtgccatcagtcattcgggctcattcagagacagcatggaagaagttcatggctcttcattatcactggtgtccagcacttcttctctttactctacagctgaggcgggtggatcacttgagcaaatccataaactgcggagagagctggttgcatcacaagaaaaagttgctaccctcacatctcagctttcagcaaatgctcaccttgtagcagcttttgaaaagagcttagggaatatgactggccgattgcaaagtctaactatgacagcggaacaaaaggaatctgaacttatagaactaagagaaaccattgaaatgctgaaggctcagaattctgctgcccaggcggctattcagggagcactgaatggtccagaccatcctcccaaagatcttcgcatcagaagacagcattcctctgaaagtgtttctagtatcaacagtgccacaagccattccagtattggcagtggtaatgatgccgactccaagaagaagaaaaagaaaaactgggtgaactctagaggaagtgagctgagaagttctttcaaacaagcctttgggaagaaaaagtccaccaagcctccttcatcacattctgacattgaagagcttactgattcatcccttccggcatcccccaagttaccccataatgctggtgactgtggctcagcatccatgaagccctcacaatctgcttcagcgatctgtgaatgcacagaagctgaggcagagataattctgcagctgaagagcgagctcagagaaaaggaattaaaattaacggatattcggctggaggccctcagctctgctcatcatcttgatcagatccgggaagccatgaaccggatgcagaatgaaattgaaatactgaaagctgaaaatgaccggttgaaggcagaaactggtaacacagctaagcctactcggccaccgtcagaatcctcaagcagcacctcctcttcatcttccaggcagtcattaggactttctctaaacaatttgaacatcacagaggctgttagctcagatattttgctagatgatgctggtgatgcaactggacataaagatggccgcagtgtgaaaattatagtctccataagcaagggctatggtcgagcaaaggaccaaaaatctcaggcatatttgataggatccattggtgttagtggaaaaaccaagtgggatgtcttagatggtgtaataagacgtctctttaaggaatatgtattccgaattgatacatccactagccttggtctgagctctgactgcattgctagctactgtataggagacttaattagatcccataacctagaagtgcctgaattgctgccttgtggataccttgttggagataataacatcatcactgtgaacctcaaaggggtagaagaaaatagtttggacagttttgtttttgatacgctgattcctaaaccaattacccaaaggtactttaacttgttgatggagcatcacagaattatactctcaggaccgagtggtactggaaagacctatttggcaaacaaacttgctgaatatgtaataaccaaatctggaaggaaaaaaacagaggatgcaattgccacttttaatgtggaccacaagtcaagtaaggaattgcaacaatatctagctaacctggctgaacagtgcagtgctgataataatggagtggagctcccagttgtaataattcttgataatcttcatcatgtgggctctctgagtgatatcttcaatggttttctcaattgtaaatacaacaaatgtccatatattattggaacaatgaatcagggagtttcttcatcaccaaatctagagctgcatcacaatttcaggtgggtattatgtgcaaatcatacagaaccagtgaaaggctttttaggcagatatcttcgaagaaaactcatagagatagaaattgaaaggaacattcgcaataatgacctagtcaaaattatagattggattccgaagacgtggcatcatctcaacagttttttggaaacacacagttcttctgacgttaccattggtccccgactattccttccttgccccatggatgtagaaggttctagagtatggttcatggatctctggaactattctttagtaccttatattctggaggcagtgagagagggtcttcagatgtatgggaaacgcacaccatgggaagatccttcaaagtgggtgcttgacacatatccatggagctcagcaactctgcctcaggagagcccagccttacttcagctgcgaccagaagatgttgggtatgaaagctgcacatccactaaggaagccacaacctcaaagcacattccgcaaactgacacagaaggagatcccctgatgaatatgctaatgaaactccaagaagcagccaattactcgagcacacaaagctgcgacagcgaaagcaccagccaccatgaagacattttggattcatctcttgaatctaccctctagagggtgaaaaaagttaagggaaaagactttgcttttaaaaaaatgtttcaaaagaaaggtattttcactaaaccactgccagtataaaagcaccctgtcaagggccctgacccagagttgtggtctccaaggaggcagcagaactaagtctgaaccgccaagatgctaaattgcaatggaagcttaactttagtttatttctaagcattttttatatctgtggagtaatagaaagctccattactcaactggaaaggaccctaatgacagggcaactgaacagattgcacatgggatagccaaactggactttctttgtttcctctttaaaagtttacaatgcagaccattttttgtcccttccttttgtttcctctgaggggctgttcgccccaggcagggtccatctttctgatctgtccaacctcctttgtgccacacggtgctggtcacagggcttcagtagtgtttgtgttgtgcgctcaccccattccagaacaaatccaagaggccagtcctccataagcacaaatggaattgtgcaaccaccagaaaaacactactgtggcaaactggagaagtgccaatttaattctaactgccacgttctcatgatgtgctccaccaactttttagtatatgagtcactggttttataaggttgtttttaccacagtggtctttttaaaccacctgcccactcccttaacaagagttttataccaattattagtcaacactgataaaaggcttttttagggctttatttgtttgagccttttcagtgaaagaaggaacatttcctatggtgctgtctcactgccttaaaacagatttctatgacagtttaacagttggtttaaatcctaaaccattggtaatttccactgtcttttcatttacaaccaagcaacaccagttaacatagtagcctcatctctatatatctttctcttttttttttttttgaagaaatggataggagaaagatcagtatttttagccttgtgaatagatcgctttgcctatcctccaaaatattaaaataacccagaaatgctctttgaccgtcacttaaaacctaagacatgtggcgaaattccatccagttctaagtgaaagagtttcagaaggcagaagattttgaattattatccagcagggctggaagcactagatgcagcatgagcacaactattcggctttccttccctattgtttttgtttttttaatgagttttgacgcatgttgttttgattgctattgttgtacatgagaaattcagcattaaagaacactgaagcggtaaggtcactgtggaagaggaagcgtttatactgtaaaagaaggttagatttgcacagtctactgggtaggtattgtaaataataatttttaaaacttgcacaaatcaaaacaaacacaaacaaaattgtattttatcctgttggtgttaagaggtgtttcacttgctgagatttcctgtacattgcaaacaaatacagaatgcaaaccctcaaagctgtattatctggtgtgtttgtcctgtatttacagttgtttttgactatgcaggagctatcagtgctagagtgagcatgcttcaaaactgtacatgaagccaatatatttttggataagtaaaactgtctgaaagtacatctgtcatggcaggctttaaagagagtgcatgaaaactgatcagtcattggagaagttaccaccacacacaaaggacaggttttaagtttatgaaacccaagggctaggccatggtatagacttcttctatgagtgtgtgaaaatgtgttacttttaggacgtgtatttggtgctactctctgtgaccaccaatgggtcagttgctatagaacaacaacaccacgaaacatctgtgcagttttcagagtgtcacaaagtcaataggtccttacacggtgctattgccctaagggaaatccgaactgaatttatgcacatagaattgtcaccctgactttgaagcctcaaacatggatcaaatctgttgtgaaacatcaatatatgtagctggatgagtgactagtttcccttgtataatatgtgatctaagaaaattgctaatctttccctgccattttgagaaacacagtccaaacatgagcataaacagaatttcctgcaatacatcccagtaggtccacctagtttacaacttaaactagtttgtgaaacatttgtctgtatacattttatattttgtacattttgatgtaacatatcatgtaaataggcagaaacagtgaaataaatcatctgaaaagttttgtagtctttgtaaagccccaacaataagtacttggtgtcaatggacttaactggatgatgtattttctattggtttattgttcctctagcttgtaaaccagcttgcatatatttttttgcaaatgtgcaccctgtatctgtctaaattattactttgccattaaagtggaattatttattgacaa

SEQ ID NO: 183032 - DNA, 7386 bp, Artificial Sequence
  derived and/or modified sequence
agatgcagggaagttttgcctcttcctgaaaattatattattagctttttaaaaatcaggatgactgctagttttgtttaaagtatttgttctggaaatactaaagttggagtctaccagactgaggttagaagcattttctttggcagcaagaagataattttatagaagccatgcctgttcttggggttgcctcaaaactgaggcagccagctgttgggtcaaagcctgtgcatactgctcttccgataccaaatcttggcactactgggtcacagcactgttcttcaagacctttggaacttactgaaacagagagctccatgctttcttgtcagcttgcgttaaaatcaacctgtgaatttggagagaagaaacccctccaaggaaaagccaaggagaaagaagacagcaagatttacactgactgggccaaccactacctagcaaaatcaggccacaagcggctgatcaaggacttgcaacaagacattgcagatggagtactcctagcagaaatcatccagattattgcaaatgaaaaagttgaagatatcaatggatgtcctagaagtcagtctcagatgattgaaaatgttgatgtctgccttagttttctagcagccagaggggtaaatgttcaaggtctatctgctgaagaaataagaaatggaaacttaaaagccattctagggctgtttttcagtttatctcgctacaagcagcaacaacaccatcaacaacagtactatcagtccttggtggaacttcagcagcgagttactcacgcttcccctccatcggaagccagccaggccaaaacccagcaagatatgcagtccagtctggcagccagatatgcaactcagtctaatcacagtggaattgcaaccagtcaaaaaaagcctactaggcttccagggccctctagggtgcctgctgcaggaagcagcagcaaggtccagggagcctctaatttaaataggagaagtcagagctttaacagcattgacaaaaacaagcctccaaattatgcaaatggaaacgaaaaagattcctccaaaggacctcaatcgtcttcaggtgtaaatggtaacgtgcagcctcccagtactgctgggcagcctcctgcctctgccatcccttctccaagtgccagcaagccctggcgcagcaagtccatgaatgtcaaacacagtgccacctccaccatgttgactgtaaagcagtcaagtacagccacctcccccacaccatcttcagacagactgaagccacctgtctcagaaggggtcaaaactgctccctcaggacagaaatccatgcttgagaaattcaagctagtcaatgcccggactgctttacgccccccgcagcctcccagttcaggacctagtgatggtgggaaggatgatgatgccttttctgaatctggtgaaatggaaggttttaacagtggtctgaatagtggtggctcaacaaatagcagtcccaaagtgtcacctaagttggcccctccaaaagctggaagcaaaaatctcagcaataaaaagtctttgctacagccaaaggaaaaagaagaaaagaacagggacaaaaataaagtttgcactgaaaaaccagtcaaagaagagaaggatcaggtgacagagatggctccaaaaaagacctccaaaattgcaagcttgatccctaagggcagcaagacaacagcagctaagaaggaaagcttaattccgtcttccagtggtattccaaaaccaggctctaaagttccaacagtaaagcaaaccatttcacctggcagcacagcaagcaaagagtctgagaaattcaggactaccaaggggagcccttcccagtccttatctaagcctataaccatggagaaagcaagtgcttctagttgtcctgcccctttggaaggaagggaagctggccaagcttctccttctggttcctgtaccatgacagtggcacaaagcagtgggcagagcacaggaaatggtgctgtccaactccctcaacagcagcaacatagccacccgaataccgcgacagtggcaccattcatttacagggcacattcagaaaatgaaggtaccgctttaccatcggctgactcctgtaccagtcctacaaagatggacttatcatatagtaagactgctaagcagtgcctggaggagatatctggtgaagaccctgaaacaagaagaatgagaacagttaaaaacatagcagacttgaggcagaatttagaagagactatgtccagtcttcgtgggactcagataagccacagcaccctggagacaacatttgacagcactgtgacaacagaagttaatggaaggaccatacccaacttgacaagtcgacccacccccatgacctggaggttgggccaggcatgtccgcgacttcaggcgggagatgctccctccctgggtgctggctatcctcgcagtggtaccagtcgattcatccacacagacccctcgaggttcatgtataccacgcctctccgtcgagctgctgtctctaggctgggaaacatgtcacagattgacatgagtgagaaagcaagcagtgacctggacatgtcttctgaggtcgatgtgggtggatatatgagtgatggtgatatccttgggaaaagtctcaggactgatgacatcaacagtgggtacatgacagatggaggacttaacctatatactagaagtctgaaccgaataccagacacagcaacttcccgggacatcatccagagaggggttcacgatgtgacagtggatgcagacagctgggatgacagcagttcagtgagcagtggtctcagtgacacccttgataacatcagcactgatgacctgaacaccacatcctctgtcagctcttactccaacatcaccgtcccctctaggaagaatactcagctgaggacagattcagagaaacgctccaccacagacgagacctgggatagtcctgaggaactgaaaaaaccagaagaagattttgacagccatggggatgctggtggcaagtggaagactgtgtcctctggacttcctgaagaccccgagaaggcagggcagaaagcttccctgtctgtttcacagacaggttcctggagaagaggcatgtctgcccaaggaggggcgccatctaggcagaaagctggaacaagtgcactcaaaacacccgggaaaaccgatgatgccaaagcttctgagaaaggaaaagctcccctaaaaggatcatctctacaaagatctccttcagatgcaggaaaaagcagtggagatgaagggaaaaagcccccctcaggcattggaagatcgactgccaccagctcctttggctttaagaaaccaagtggagtagggtcatctgccatgatcaccagcagtggagcaaccataacaagtggctctgcaacactgggtaaaattccaaaatctgctgccattggcgggaagtcaaatgcagggagaaaaaccagtttggacggttcacagaatcaggatgatgttgtgctgcatgttagctcaaagactaccctacaatatcgcagcttgccccgcccttcaaaatccagcaccagtggcattcctggccgaggaggccacagatccagtaccagcagtattgattccaacgtcagcagcaagtctgctggggccaccacctcgaaactgagagaaccaactaaaattgggtcagggcgctcgagtcctgtcaccgtcaaccaaacagacaaggaaaaggaaaaagtagcagtctcagattcagaaagtgtttctttgtcaggttcccccaaatccagccccacctctgccagcgcctgtggtgcacaaggtctcaggcagccaggatccaagtatccagatattgcctcacccacatttcgaaggttgtttggtgccaaggcaggtggcaaatctgcctctgcacctaatactgagggtgtgaaatcttcctcagtaatgcccagccctagtaccacattagcgcggcaaggcagtctggagtcaccgtcgtccggtacgggcagcatgggcagtgctggtgggctaagcggcagcagcagccctctcttcaataaaccctcagacttaactacagatgttataagcttaagtcactcgttggcctccagcccagcatcggttcactctttcacatcaggtggtctcgtgtgggctgccaatatgagcagttcctctgcaggcagcaaggatactccgagctaccagtccatgactagcctccacacgagctctgagtccattgacctccccctcagccatcatggctccttgtctggactgaccacaggcactcacgaggtccagagcctgctcatgagaacgggtagtgtgagatctactctctcagaaagcatgcagcttgacagaaatacactacccaaaaagggactaagatataccccatcatctcggcaggccaaccaagaagagggcaaagagtggttgcgttctcattctactggagggcttcaggacactggcaaccagtcacctctggtttccccttctgccatgtcatcttctgcagctggaaaataccacttttctaacttggtgagcccaacaaatttgtctcagtttaaccttcccgggcccagcatgatgcgctcaaacagcatcccagcccaagactcttccttcgatctctatgatgactcccagctttgtgggagtgccacttctctggaggaaagacctcgtgccatcagtcattcgggctcattcagagacagcatggaagaagttcatggctcttcattatcactggtgtccagcacttcttctctttactctacagctgaagaaaaggctcattcagagcaaatccataaactgcggagagagctggttgcatcacaagaaaaagttgctaccctcacatctcagctttcagcaaatgctcaccttgtagcagcttttgaaaagagcttagggaatatgactggccgattgcaaagtctaactatgacagcggaacaaaaggaatctgaacttatagaactaagagaaaccattgaaatgctgaaggctcagaattctgctgcccaggcggctattcagggagcactgaatggtccagaccatcctcccaaagatcttcgcatcagaagacagcattcctctgaaagtgtttctagtatcaacagtgccacaagccattccagtattggcagtggtaatgatgccgactccaagaagaagaaaaagaaaaactgggtgaactctagaggaagtgagctgagaagttctttcaaacaagcctttgggaagaaaaagtccaccaagcctccttcatcacattctgacattgaagagcttactgattcatcccttccggcatcccccaagttaccccataatgctggtgactgtggctcagcatccatgaagccctcacaatctgcttcagcgatctgtgaatgcacagaagctgaggcagagataattctgcagctgaagagcgagctcagagaaaaggaattaaaattaacggatattcggctggaggccctcagctctgctcatcatcttgatcagatccgggaagccatgaaccggatgcagaatgaaattgaaatactgaaagctgaaaatgaccggttgaaggcagaaactggtaacacagctaagcctactcggccaccgtcagaatcctcaagcagcacctcctcttcatcttccaggcagtcattaggactttctctaaacaatttgaacatcacagaggctgttagctcagatattttgctagatgatgctggtgatgcaactggacataaagatggccgcagtgtgaaaattatagtctccataagcaagggctatggtcgagcaaaggaccaaaaatctcaggcatatttgataggatccattggtgttagtggaaaaaccaagtgggatgtcttagatggtgtaataagacgtctctttaaggaatatgtattccgaattgatacatccactagccttggtctgagctctgactgcattgctagctactgtataggagacttaattagatcccataacctagaagtgcctgaattgctgccttgtggataccttgttggagataataacatcatcactgtgaacctcaaaggggtagaagaaaatagtttggacagttttgtttttgatacgctgattcctaaaccaattacccaaaggtactttaacttgttgatggagcatcacagaattatactctcaggaccgagtggtactggaaagacctatttggcaaacaaacttgctgaatatgtaataaccaaatctggaaggaaaaaaacagaggatgcaattgccacttttaatgtggaccacaagtcaagtaaggaattgcaacaatatctagctaacctggctgaacagtgcagtgctgataataatggagtggagctcccagttgtaataattcttgataatcttcatcatgtgggctctctgagtgatatcttcaatggttttctcaattgtaaatacaacaaatgtccatatattattggaacaatgaatcagggagtttcttcatcaccaaatctagagctgcatcacaatttcaggtgggtattatgtgcaaatcatacagaaccagtgaaaggctttttaggcagatatcttcgaagaaaactcatagagatagaaattgaaaggaacattcgcaataatgacctagtcaaaattatagattggattccgaagacgtggcatcatctcaacagttttttggaaacacacagttcttctgacgttaccattggtccccgactattccttccttgccccatggatgtagaaggttctagagtatggttcatggatctctggaactattctttagtaccttatattctggaggcagtgagagagggtcttcagatgtatgggaaacgcacaccatgggaagatccttcaaagtgggtgcttgacacatatccatggagctcagcaactctgcctcaggagagcccagccttacttcagctgcgaccagaagatgttgggtatgaaagctgcacatccactaaggaagccacaacctcaaagcacattccgcaaactgacacagaaggagatcccctgatgaatatgctaatgaaactccaagaagcagccaattactcgagcacacaaagctgcgacagcgaaagcaccagccaccatgaagacattttggattcatctcttgaatctaccctctagagggtgaaaaaagttaagggaaaagactttgcttttaaaaaaatgtttcaaaagaaaggtattttcactaaaccactgccagtataaaagcaccctgtcaagggccctgacccagagttgt

SEQ ID NO: 183033 - DNA, 7092 bp, Artificial Sequence
  derived and/or modified sequence
atgccagtgctgggcgttgcctctaaattgcgccagcctgcggtaggctcaaaaccagttcatacagcactgccaatcccaaatctggggaccactgggtcgcagcactgctcatcacgacctctggaattaaccgaaacagagagctcaatgctgagctgtcagctggcccttaagagcacctgtgaattcggtgagaagaaacccctacaaggtaaagccaaggagaaggaggatagtaagatctacactgactgggcaaaccactacttggctaagtccggacataaaaggctcattaaagatctccagcaggatattgccgatggtgttttattggcagagatcatacagattattgccaacgaaaaggttgaggatattaacgggtgtcctaggtcacagtctcaaatgatcgaaaacgtggatgtgtgtttgagcttcctggccgcaagaggggtgaacgtgcaggggctatctgccgaagagataagaaacggaaatctcaaggcaattcttgggttatttttctctctttcccgctataaacagcaacagcatcaccagcagcagtattaccaatcattggtagagctgcaacagagagttacacatgctagccccccatcagaagcatcacaagcgaagacacagcaggacatgcagtcttccctggctgcacggtacgcgacacagtccaatcatagcggcattgctacatcgcagaagaaacccaccaggctccctggcccaagcagagtgccagccgcagggtccagttcaaaagtgcagggcgcttccaacctgaatcgtaggtctcaaagctttaactccattgacaagaacaaaccgcctaactatgctaatggaaacgaaaaggacagctccaaaggacctcagagctcttccggggttaacggcaacgtccagccacctagcacggccggtcagccacccgcatctgccatcccctcgccttcagctagcaagccctggagatccaaatccatgaacgtcaaacacagcgctacttcaactatgctaacagtaaagcagtcatccacagccacgagtcctaccccttcctcagaccgactgaaaccacccgtgtccgaaggggttaagacggcacccagcggccagaaaagcatgctcgaaaagttcaagctcgtcaacgcccgtactgcattacgccctccacagccgccaagttccggcccttcggatgggggaaaagatgacgacgccttctccgagtccggggaaatggaaggtttcaactctggccttaactcaggcggaagcaccaactcaagcccaaaagtttctccgaaactggctccacctaaggcgggtagtaagaacttgtctaataaaaaatccctgctgcagcccaaggagaaagaagagaagaacagggacaaaaataaggtgtgcacagagaaaccagttaaggaggaaaaagaccaggttacagagatggcacccaaaaaaacttctaaaattgcctcactgatccccaaggggagtaagaccacggcagcgaaaaaagaatccctgattccttccagcagtgggatcccaaagcctgggtctaaagtccccactgttaaacagaccatcagcccagggtctacggcctccaaagaaagcgagaaatttcgtactaccaagggttcgcctagtcagtccctcagcaagccaatcacaatggaaaaggcatccgcatcatcttgccctgcccctttggaaggaagggaagctggccaggcctcacctagcggatcctgtacaatgactgtcgcacagtcttctgggcagagtaccggtaatggcgctgtccaactgccccagcagcaacaacactctcaccccaatacggcgacagtagcaccgttcatctaccgtgcacactctgagaacgagggaacagccctgcccagcgccgattcctgcacgtctcccactaaaatggatctgagctacagcaagacggccaagcagtgcttggaggaaattagcggcgaagaccctgaaacccgccgtatgcggactgtcaagaacattgctgacttgcggcagaacttagaagagacaatgagttcactccgtgggacacagatttcgcattctacactggagaccactttcgatagcaccgtgactaccgaggtaaacggacgcaccatcccaaacctaacttcgcggccaactccaatgacatggcgcctcgggcaggcttgcccaagactgcaagccggagacgcaccatctctcggggctggttatccaagaagcggcactagcagattcattcacacggacccttcccggtttatgtacacaactccactgagacgcgctgctgtgtctcgcctgggcaacatgtcccagattgacatgtctgaaaaggctagctctgatttggacatgagctctgaggtagacgttggaggctacatgtccgacggagatatcctggggaagtcattaaggaccgatgacattaattccgggtacatgaccgatggaggactaaacctttatacacgaagtcttaaccgtattccagacaccgctacttcaagagatattattcagcgcggagtgcacgatgtgacagtggacgcagactcctgggacgactcttcttccgtctcatccggcttaagcgacacactggacaacatctcaaccgatgaccttaacacgacgagttcggtgagcagctacagcaacatcactgtccctagcagaaagaatacccagctgagaacagactcagagaaacggagtacaaccgatgaaacatgggactccccagaggagctaaagaaacctgaggaagatttcgatagtcacggcgacgctggcggaaaatggaaaaccgtcagctctggcctccctgaagacccagagaaagctggtcagaaggcttctctgagtgtgtcacagacaggctcatggagaaggggtatgagcgcacagggaggcgctccttcacgtcaaaaagcgggaacgtctgctctcaaaacgccaggcaaaaccgatgacgcgaaggcaagcgagaagggcaaagcgccactcaagggatcatccttgcagagaagcccttctgacgccggaaaaagctcgggagatgaagggaagaagcctccaagtggaatcgggaggtcaacagccacaagtagctttgggttcaaaaaaccctcgggagttggctccagtgccatgatcactagcagtggggcaacaatcacatccggaagtgcaaccctgggtaaaataccgaagagcgctgcaattggtgggaagagtaacgccggacgcaaaactagcttagacggaagccagaaccaggatgatgtagtactacacgtaagcagtaaaaccactctccagtaccgcagccttcctcggccatcaaagtcgagtaccagtgggattccgggacggggaggccataggagttcgacctccagtatagactctaacgtgagttcaaagagcgcaggagccaccaccagtaaattaagagagccaactaagataggtagtggacgatcgtcaccggtgaccgttaatcaaaccgataaagagaaagagaaggtcgccgtgagcgactcggaaagcgtatcactcagtggctcacccaaaagttcccctactagcgcctcagcctgcggcgctcagggtctccgacaacccggttccaagtaccctgacatcgcttcccccacttttcgcaggctattcggtgctaaggctggaggaaagtcagccagcgcccctaatacggagggcgtaaaatctagtagcgttatgccctcacctagtacgacactggcacggcaggggtctctggagagcccctcgagcggcacgggatcaatgggctccgccggagggctgagcggaagctccagcccattgttcaataagccctccgatttaaccaccgatgttatctcactcagccactctctggcaagcagtcccgcttctgttcatagcttcacgtctggcggtctggtctgggccgctaatatgtcatcctcctccgcgggatctaaagacactcctagttaccagtccatgacaagcctgcatacctcatctgaatcaattgatttgccactgtcgcaccacggatcacttagtggtcttactacgggaacacatgaggtgcagagtcttctaatgaggaccggaagtgtgcgctctaccctgagcgagagcatgcagctcgataggaatacactgcccaaaaagggtctgcgctatacaccttcttcaagacaggctaatcaagaggaaggcaaagaatggttacgcagtcactcaactggcggactgcaggacacagggaaccagtcgccactggtctcaccttcagcaatgagtagttcagctgccggtaaataccatttttctaacctcgtttctcctaccaatctgtctcaattcaatctcccaggaccatccatgatgcggagtaattcaatcccagcccaggatagtagcttcgatctctatgacgactcccagttatgcgggtccgccactagtctggaagagcggcctcgtgcaatttcacattcaggatctttcagggacagcatggaagaagtccatggaagttctctgagcctcgtgtcctcaacttcctctttatactctactgctgaggcaggcggatctctagagcagatccacaagctgcggagagaactggtggcctcgcaggagaaggtcgcaaccctcacatctcagctgtctgccaacgcccatttagtggcggcatttgaaaagtctctaggaaacatgactggaaggctgcaatctctcaccatgactgctgaacagaaggagtcagaactgatcgaactaagggagacaatcgagatgcttaaagcacagaactccgccgctcaggctgccattcagggggcactgaatggccctgaccaccccccaaaagacctgagaattcggaggcaacactcttcagaaagcgtttcgtcgatcaattcagctacctctcactcctccataggttcgggaaacgacgccgatagtaagaaaaaaaaaaagaagaattgggtgaactcgaggggcagtgagttgagatcttctttcaagcaggctttcggcaagaagaaatctacaaaaccaccttccagccattcagacatagaggagctgaccgacagtagcttgccagcgtctcctaagctaccacataatgccggagattgtgggtccgcatccatgaaaccctcccaaagcgccagcgccatttgcgaatgcaccgaggccgaagccgaaatcattctgcagctcaagtcagagctacgcgagaaggaactgaaacttaccgacatccgtctggaggctctgtcatccgcacaccatctggatcagatcagagaggctatgaaccggatgcagaacgaaatcgaaattttgaaggctgaaaacgatagactcaaggccgagactgggaacactgcaaaaccaaccaggccgccatcagagtctagctcctccacttcatccagcagctcacgccaaagcctcggtctttccctcaataatctcaacatcacagaggcagtgtcgagcgatatcctccttgacgacgcgggagatgcaaccgggcataaagatggacgatctgttaaaatcatcgtgtccatctccaagggttacggtagggctaaggaccagaaatcacaagcctatctgattggaagcatcggcgtgtccgggaagactaagtgggatgtgttggacggggtcatcagaaggctgtttaaagaatacgtgtttaggatagacacgagtacctcactcgggctctcttcggattgcattgcctcctattgcatcggggacttgattaggagtcataatctagaggtgcccgagctgcttccctgcggttatctcgttggcgataataatatcattacagtgaaccttaaaggcgtggaagagaactcactggactccttcgtgtttgataccctgatacccaaaccaatcacccagagatacttcaatctactgatggaacatcaccggatcatcctttcagggccatctggaacaggtaaaacgtacttggctaataagctggctgagtacgtgatcacgaagagtggtaggaaaaaaacagaagacgctatcgctacattcaacgttgaccataagagtagcaaggaactgcaacagtatttagcgaaccttgctgaacagtgttcggctgataataacggagtggaactgcccgtcgtcattatcctggacaacctgcaccatgttggaagcctgtctgacatctttaatggatttctcaactgtaaatataataagtgcccctacattattggcactatgaatcagggcgtgtcatcctctcccaacttggagctgcatcacaatttccgctgggtgctttgtgccaatcataccgagccggtcaagggattcttggggagatatcttcgcagaaagctgatcgaaatcgaaatcgagcgaaatattcgcaacaatgatctggtgaagataatcgattggatacccaaaacgtggcatcacctgaactccttccttgaaacacacagcagttcagacgtaaccattggccctcgccttttcctcccatgccctatggacgttgaaggaagcagagtgtggtttatggatctctggaactactcccttgtgccctacatcctggaggctgtgcgggaggggttacagatgtatgggaagcgaaccccttgggaggatccttctaaatgggtgcttgatacctacccttggtcaagcgccactctgccccaggagtcccccgctctcctgcaactaagacccgaagatgttggctatgaatcctgtaccagcaccaaagaagcaacaacgagcaaacacatcccgcagaccgacacagaaggtgatcccctaatgaacatgctaatgaagctgcaagaggcagctaattattcctctactcaatcttgcgattcagaaagtactagccatcacgaggacatactcgactcatcgttagagtctaccctctac

SEQ ID NO: 183034 - DNA, 7091 bp, Artificial Sequence
  derived and/or modified sequence
atgcccgtgttgggcgttgcttcaaaattgagacaacctgcagttgggagtaaacccgtccatacagcgttgcccatccccaacctggggaccaccggaagccagcactgcagcagtcgacccctggaactgacagaaacggagtcaagcatgctttcctgtcagctcgccctgaaaagcacctgcgaattcggggagaagaagcccctgcaaggaaaagctaaggaaaaggaagactctaagatttacaccgactgggcaaatcattacttggcaaaatccggtcacaaacgattgattaaggacctgcaacaggatattgctgacggggtgttacttgccgagattatccagatcatagctaatgaaaaggttgaggatataaatggatgtcctcgctctcaaagccaaatgattgaaaacgtagacgtgtgcctgtcgtttctggctgctagaggcgtgaatgtccagggtctaagcgccgaagaaatacgcaacgggaatctgaaggccattctggggctctttttctcgctgagccgttataagcagcagcagcaccatcagcaacaatactaccagagcctggtggagctgcagcagagagtgacccacgctagcccaccttctgaggcctcccaggcgaagactcagcaagatatgcaaagctcgctggctgctaggtacgcgactcagagcaaccacagcggaattgccacatctcagaaaaagcccacacgcctgccaggccctagccgagtaccagcagctggatcatcttcgaaagtgcagggcgcaagcaacttaaacagacgcagccagagttttaactcaattgacaagaataagcctcctaattatgccaacgggaatgaaaaggactcttctaagggaccccagtcaagctccggagtgaacggaaatgtgcagcctcctagtacagcgggtcagcctccagcatctgcgatcccgtccccatcagcaagcaagccatggcggtccaaatcaatgaacgtcaaacattctgcgacctcaaccatgctgacagtaaagcaatcaagcacggcgacctcacccacacccagctccgacagattaaagccccctgtgtctgagggggtgaaaacggctccctctggccagaaatccatgctcgagaagttcaaactcgtcaatgctaggaccgctctgaggccccctcagccaccgtcgagtggcccttccgacggaggtaaagacgacgatgcattttctgaatcaggcgaaatggaggggttcaatagcggactcaactcaggcggaagcaccaacagtagcccaaaggtgtccccaaaactggctccaccaaaggcaggaagcaagaacctgtccaacaaaaaatccctactgcagcccaaggaaaaagaggagaagaaccgggataagaataaggtctgtaccgagaagcccgtcaaggaggagaaagatcaggtaacagaaatggcaccaaagaaaacgagtaagattgcctcattgatcccaaaaggctcgaagacaaccgcagcaaaaaaggagagcctcataccgtccagttccggaattccaaaacctgggtccaaggttccaaccgtgaaacagacaatttctcctggcagtaccgcaagtaaggaatcagaaaagtttcggacaacaaaggggtccccatcccagtcactgtccaagcctataaccatggaaaaggcctcagccagtagttgccctgcccctctcgagggaagagaggctggtcaggcgtccccctccggatcctgtactatgacagtggcccagtcaagtgggcagtctaccggaaatggcgctgttcaactcccccagcaacagcagcacagtcatccaaatacggccacagttgctccgttcatctatagagcacatagtgaaaatgaaggaactgctctcccatccgctgactcatgtacctctccaacgaagatggacctgtcctactcaaagaccgcaaaacagtgtttggaagagattagtggagaggacccagagacacgacgcatgaggactgtgaagaatatcgccgatctgcgccagaaccttgaagagacaatgagttcccttaggggaactcagatatctcacagtacactcgagacgacatttgatagcacggtcactaccgaggtcaatgggagaaccatccctaacctgacctccagacccacgcctatgacgtggcggctaggccaggcatgcccgagattgcaggctggcgacgccccttctctgggcgcaggctaccctcgatccgggacgagccggttcatccacaccgatccctcaagattcatgtatacaactcctctgcggagggccgctgtgtctcggctggggaatatgagccagatcgatatgagtgaaaaagccagcagcgatctggatatgtccagtgaggtggatgttggaggttatatgagcgatggcgacattctgggaaagtccctccgaacagatgacatcaattctggctatatgacggacggtggcctgaacttgtatactcggagtctgaaccgtatccccgacaccgcaacaagccgggatatcatccagcgcggtgtgcacgacgtgaccgtggatgcggactcatgggacgattcctcatccgtgtcgtctggattatccgacaccttggataacatttcaaccgacgacctgaacaccaccagtagtgtgagctcctattcaaacataaccgtgccctctcgaaagaatactcagctaaggactgacagcgagaaaagatccacgaccgatgaaacgtgggatagccccgaggaactgaagaagccggaggaagattttgactcccacggcgatgcaggtggcaagtggaaaaccgtaagctctgggctgccagaagatcctgaaaaagccggtcagaaagcatctctctcagtgagccagacaggctcctggcgtaggggcatgtctgcgcaggggggagcccctagccgtcagaaagcaggcacatccgccttgaaaacacccggaaaaacggacgacgctaaggccagcgaaaagggaaaggcaccgctgaaaggttctagtttgcaaagaagtccttctgatgcaggaaagtcatctggggacgaaggcaagaagcctcctagtggtattggcaggtccaccgcaacgtcaagtttcgggtttaaaaagccatctggtgtgggctcatcagcaatgataacctctagcggcgcaactattacatcagggagcgcaaccctgggaaagataccgaaatctgcggctataggaggaaaaagtaacgccggacggaagacctcacttgacggaagtcaaaaccaggatgatgtcgttttacacgttagcagtaagacgacacttcagtataggtctttacccaggccctcaaaatccagcacaagcggaataccgggaagagggggtcaccgcagcagtacctctagcatcgactcaaacgtgtcaagcaagtccgcaggagctacaacctcaaaactgagagaacccacgaagattggtagtgggaggtcctcccctgtgacagtgaatcagactgataaggagaaggagaaggtggcggtatctgatagcgagagcgtaagtctgtcaggaagccccaagtcgagccccacttccgcaagtgcctgcggtgcccagggccttcgtcagccgggaagtaagtacccagacatcgcctctccaacctttaggcgacttttcggcgctaaggccggtgggaagtctgcatctgccccaaataccgaaggtgtcaaatctagcagtgtcatgcccagtccgtctacaactctggcaagacagggcagcctggaatctccctcatccggcactggctctatgggatctgctgggggactctccgggagctcgtcgcctttgtttaacaagcctagcgatctaacgactgatgtcatcagcctcagccactctctcgcttcgtccccagcgagcgtccacagctttacttcgggtggactggtatgggcagccaacatgtccagttcttctgcgggatctaaggatactccttcctatcagtcaatgactagcctacacactagtagcgagtctattgatctccctctttcgcatcatggaagtttgtctggtctgaccactggcacccatgaggtgcagtctctcttaatgcgtacagggagcgtccgaagtacactctccgagagcatgcagctagaccggaataccttaccaaaaaaggggctaaggtacacaccttcctcgaggcaggcgaatcaggaggagggcaaggagtggctgcgaagtcacagtactggaggcctgcaggacacagggaaccagtcccctctggtgtccccaagtgccatgtccagctccgccgctggcaaataccatttcagcaaccttgtttcccctacgaaccttagccaatttaaccttcccggtccctccatgatgaggtcgaacagtatccccgctcaggactccagcttcgacctgtacgatgacagccagttgtgtggcagcgctacatccctggaggaacgccctcgagctatttctcattccggcagttttagggattctatggaggaagtgcatggaagctcactgtccctagtttccagcacgtcatccctctactcaactgcggaggaaaaagctcactctgaacagatccacaaactccgcagggagctggtggcaagccaggaaaaggtggctaccctgacaagtcaactgtctgctaatgcacatctcgtggcagccttcgaaaagtcattgggtaatatgacgggccgtctacaaagcctgacaatgacggcagaacagaaggagagcgaactaattgagcttagagagacgattgaaatgctcaaggcacagaattccgctgcacaggctgcgatccagggtgccctaaatggacccgatcatcccccaaaagatctgagaattaggaggcagcatagctctgaatctgtttccagtatcaacagcgccacctcacatagcagtatcggatctggcaacgatgctgacagcaaaaagaaaaaaaagaagaactgggtgaacagtcgtgggtctgagctcaggagttcctttaagcaggccttcggaaagaagaagtccacgaaacccccaagctctcatagtgatatcgaggagttgaccgatagcagcctcccagccagccccaagctgccacataacgccggtgattgcgggtctgcttctatgaaaccaagccaatccgctagcgctatctgtgaatgtactgaagcagaggccgagatcatactgcaactaaaaagcgaactcagggagaaagagctgaaattgactgacatcaggctcgaggcactgagttccgcccatcacctcgaccagatccgggaggccatgaatagaatgcagaatgagattgagattctcaaagcagaaaacgacaggcttaaggccgaaacaggcaacaccgccaaacccactaggcctcccagcgaaagttctagcagcaccagctctagctcctcacgtcaaagtctgggccttagccttaataatctgaatataacagaggctgtgtcctcagacatccttttggacgatgccggagatgccaccggacacaaggatggccgttccgtcaaaattatcgttagcatttctaagggttacggccgagccaaggatcagaaaagccaggcttacctgatcggcagcatcggcgtatcagggaaaactaagtgggatgtgctagacggagtgatcaggcgcctgtttaaggaatatgtgtttcgtattgatacatcaacttccctcgggttgtcttcagattgtatcgcttcttattgcataggcgatctgatccgatcccataatctggaggtgccagaacttctgccctgtggctatcttgttggggacaataatattatcaccgtgaatctgaaaggggtcgaggagaacagtctggatagctttgtgttcgacaccctgattcccaagcctataacccagcgatactttaatctgctgatggagcatcatagaattatcctgtccggcccttccggaaccgggaaaacatacttggcaaacaagctcgcggagtatgttattaccaaaagtggacggaagaagacagaggacgcgattgccacatttaacgtggatcacaaaagttcaaaagagctccagcagtacttagcaaaccttgcagagcagtgttccgctgataacaatggcgttgagttgcccgtggtgattatcctggacaatcttcatcacgtcggtagtttgtctgatatcttcaatggctttcttaattgtaagtacaacaaatgtccatacataatcgggactatgaaccagggtgtgagtagttcaccgaatctggaactgcaccacaacttccgttgggtgctttgtgcaaaccatacagagccagttaagggcttcttgggtagatacctgagacgtaaactgatcgaaatcgagattgaacgtaacatcaggaacaatgatctggtgaaaataatcgattggattccgaagacgtggcaccatttaaactcttttctggaaacacacagtagtagcgacgtgaccatcggcccacgattattcctgccatgcccaatggacgtggaggggtctagagtgtggttcatggacctgtggaactatagtctggtgccttatattctggaggcagttcgcgaaggactccagatgtacggcaagaggaccccttgggaagacccatccaaatgggttctcgacacatacccctggtcctccgcaaccttgccccaggaatccccggcactactccagttgcggccagaggatgtcggctatgagtcctgcacttcaaccaaagaagccaccactagcaaacatattccacagaccgacactgaaggcgacccccttatgaacatgctaatgaaactgcaggaggccgctaattatagtagcacgcagtcttgcgattctgagtccacaagtcaccacgaggacatcctggactcaagtttggaaagcaccttgta

SEQ ID NO: 183035 - DNA, 7092 bp, Artificial Sequence
  derived and/or modified sequence
atgcccgtgctgggcgtggccagcaagctgagacagcccgccgtgggcagcaagcccgtgcacaccgccctgcccatccccaacctgggcaccaccggcagccagcactgcagcagcagacccctggagctgaccgagaccgagagcagcatgctgagctgccagctggccctgaagagcacctgcgagttcggcgagaagaagcccctgcagggcaaggccaaggagaaggaggacagcaagatctacaccgactgggccaaccactacctggccaagagcggccacaagagactgatcaaggacctgcagcaggacatcgccgacggcgtgctgctggccgagatcatccagatcatcgccaacgagaaggtggaggacatcaacggctgccccagaagccagagccagatgatcgagaacgtggacgtgtgcctgagcttcctggccgccagaggcgtgaacgtgcagggcctgagcgccgaggagatcagaaacggcaacctgaaggccatcctgggcctgttcttcagcctgagcagatacaagcagcagcagcaccaccagcagcagtactaccagagcctggtggagctgcagcagagagtgacccacgccagcccccccagcgaggccagccaggccaagacccagcaggacatgcagagcagcctggccgccagatacgccacccagagcaaccacagcggcatcgccaccagccagaagaagcccaccagactgcccggccccagcagagtgcccgccgccggcagcagcagcaaggtgcagggcgccagcaacctgaacagaagaagccagagcttcaacagcatcgacaagaacaagccccccaactacgccaacggcaacgagaaggacagcagcaagggcccccagagcagcagcggcgtgaacggcaacgtgcagccccccagcaccgccggccagccccccgccagcgccatccccagccccagcgccagcaagccctggagaagcaagagcatgaacgtgaagcacagcgccaccagcaccatgctgaccgtgaagcagagcagcaccgccaccagccccacccccagcagcgacagactgaagccccccgtgagcgagggcgtgaagaccgcccccagcggccagaagagcatgctggagaagttcaagctggtgaacgccagaaccgccctgagacccccccagccccccagcagcggccccagcgacggcggcaaggacgacgacgccttcagcgagagcggcgagatggagggcttcaacagcggcctgaacagcggcggcagcaccaacagcagccccaaggtgagccccaagctggccccccccaaggccggcagcaagaacctgagcaacaagaagagcctgctgcagcccaaggagaaggaggagaagaacagagacaagaacaaggtgtgcaccgagaagcccgtgaaggaggagaaggaccaggtgaccgagatggcccccaagaagaccagcaagatcgccagcctgatccccaagggcagcaagaccaccgccgccaagaaggagagcctgatccccagcagcagcggcatccccaagcccggcagcaaggtgcccaccgtgaagcagaccatcagccccggcagcaccgccagcaaggagagcgagaagttcagaaccaccaagggcagccccagccagagcctgagcaagcccatcaccatggagaaggccagcgccagcagctgccccgcccccctggagggcagagaggccggccaggccagccccagcggcagctgcaccatgaccgtggcccagagcagcggccagagcaccggcaacggcgccgtgcagctgccccagcagcagcagcacagccaccccaacaccgccaccgtggcccccttcatctacagagcccacagcgagaacgagggcaccgccctgcccagcgccgacagctgcaccagccccaccaagatggacctgagctacagcaagaccgccaagcagtgcctggaggagatcagcggcgaggaccccgagaccagaagaatgagaaccgtgaagaacatcgccgacctgagacagaacctggaggagaccatgagcagcctgagaggcacccagatcagccacagcaccctggagaccaccttcgacagcaccgtgaccaccgaggtgaacggcagaaccatccccaacctgaccagcagacccacccccatgacctggagactgggccaggcctgccccagactgcaggccggcgacgcccccagcctgggcgccggctaccccagaagcggcaccagcagattcatccacaccgaccccagcagattcatgtacaccacccccctgagaagagccgccgtgagcagactgggcaacatgagccagatcgacatgagcgagaaggccagcagcgacctggacatgagcagcgaggtggacgtgggcggctacatgagcgacggcgacatcctgggcaagagcctgagaaccgacgacatcaacagcggctacatgaccgacggcggcctgaacctgtacaccagaagcctgaacagaatccccgacaccgccaccagcagagacatcatccagagaggcgtgcacgacgtgaccgtggacgccgacagctgggacgacagcagcagcgtgagcagcggcctgagcgacaccctggacaacatcagcaccgacgacctgaacaccaccagcagcgtgagcagctacagcaacatcaccgtgcccagcagaaagaacacccagctgagaaccgacagcgagaagagaagcaccaccgacgagacctgggacagccccgaggagctgaagaagcccgaggaggacttcgacagccacggcgacgccggcggcaagtggaagaccgtgagcagcggcctgcccgaggaccccgagaaggccggccagaaggccagcctgagcgtgagccagaccggcagctggagaagaggcatgagcgcccagggcggcgcccccagcagacagaaggccggcaccagcgccctgaagacccccggcaagaccgacgacgccaaggccagcgagaagggcaaggcccccctgaagggcagcagcctgcagagaagccccagcgacgccggcaagagcagcggcgacgagggcaagaagccccccagcggcatcggcagaagcaccgccaccagcagcttcggcttcaagaagcccagcggcgtgggcagcagcgccatgatcaccagcagcggcgccaccatcaccagcggcagcgccaccctgggcaagatccccaagagcgccgccatcggcggcaagagcaacgccggcagaaagaccagcctggacggcagccagaaccaggacgacgtggtgctgcacgtgagcagcaagaccaccctgcagtacagaagcctgcccagacccagcaagagcagcaccagcggcatccccggcagaggcggccacagaagcagcaccagcagcatcgacagcaacgtgagcagcaagagcgccggcgccaccaccagcaagctgagagagcccaccaagatcggcagcggcagaagcagccccgtgaccgtgaaccagaccgacaaggagaaggagaaggtggccgtgagcgacagcgagagcgtgagcctgagcggcagccccaagagcagccccaccagcgccagcgcctgcggcgcccagggcctgagacagcccggcagcaagtaccccgacatcgccagccccaccttcagaagactgttcggcgccaaggccggcggcaagagcgccagcgcccccaacaccgagggcgtgaagagcagcagcgtgatgcccagccccagcaccaccctggccagacagggcagcctggagagccccagcagcggcaccggcagcatgggcagcgccggcggcctgagcggcagcagcagccccctgttcaacaagcccagcgacctgaccaccgacgtgatcagcctgagccacagcctggccagcagccccgccagcgtgcacagcttcaccagcggcggcctggtgtgggccgccaacatgagcagcagcagcgccggcagcaaggacacccccagctaccagagcatgaccagcctgcacaccagcagcgagagcatcgacctgcccctgagccaccacggcagcctgagcggcctgaccaccggcacccacgaggtgcagagcctgctgatgagaaccggcagcgtgagaagcaccctgagcgagagcatgcagctggacagaaacaccctgcccaagaagggcctgagatacacccccagcagcagacaggccaaccaggaggagggcaaggagtggctgagaagccacagcaccggcggcctgcaggacaccggcaaccagagccccctggtgagccccagcgccatgagcagcagcgccgccggcaagtaccacttcagcaacctggtgagccccaccaacctgagccagttcaacctgcccggccccagcatgatgagaagcaacagcatccccgcccaggacagcagcttcgacctgtacgacgacagccagctgtgcggcagcgccaccagcctggaggagagacccagagccatcagccacagcggcagcttcagagacagcatggaggaggtgcacggcagcagcctgagcctggtgagcagcaccagcagcctgtacagcaccgccgaggccggcggcagcctggagcagatccacaagctgagaagagagctggtggccagccaggagaaggtggccaccctgaccagccagctgagcgccaacgcccacctggtggccgccttcgagaagagcctgggcaacatgaccggcagactgcagagcctgaccatgaccgccgagcagaaggagagcgagctgatcgagctgagagagaccatcgagatgctgaaggcccagaacagcgccgcccaggccgccatccagggcgccctgaacggccccgaccacccccccaaggacctgagaatcagaagacagcacagcagcgagagcgtgagcagcatcaacagcgccaccagccacagcagcatcggcagcggcaacgacgccgacagcaagaagaagaagaagaagaactgggtgaacagcagaggcagcgagctgagaagcagcttcaagcaggccttcggcaagaagaagagcaccaagccccccagcagccacagcgacatcgaggagctgaccgacagcagcctgcccgccagccccaagctgccccacaacgccggcgactgcggcagcgccagcatgaagcccagccagagcgccagcgccatctgcgagtgcaccgaggccgaggccgagatcatcctgcagctgaagagcgagctgagagagaaggagctgaagctgaccgacatcagactggaggccctgagcagcgcccaccacctggaccagatcagagaggccatgaacagaatgcagaacgagatcgagatcctgaaggccgagaacgacagactgaaggccgagaccggcaacaccgccaagcccaccagaccccccagcgagagcagcagcagcaccagcagcagcagcagcagacagagcctgggcctgagcctgaacaacctgaacatcaccgaggccgtgagcagcgacatcctgctggacgacgccggcgacgccaccggccacaaggacggcagaagcgtgaagatcatcgtgagcatcagcaagggctacggcagagccaaggaccagaagagccaggcctacctgatcggcagcatcggcgtgagcggcaagaccaagtgggacgtgctggacggcgtgatcagaagactgttcaaggagtacgtgttcagaatcgacaccagcaccagcctgggcctgagcagcgactgcatcgccagctactgcatcggcgacctgatcagaagccacaacctggaggtgcccgagctgctgccctgcggctacctggtgggcgacaacaacatcatcaccgtgaacctgaagggcgtggaggagaacagcctggacagcttcgtgttcgacaccctgatccccaagcccatcacccagagatacttcaacctgctgatggagcaccacagaatcatcctgagcggccccagcggcaccggcaagacctacctggccaacaagctggccgagtacgtgatcaccaagagcggcagaaagaagaccgaggacgccatcgccaccttcaacgtggaccacaagagcagcaaggagctgcagcagtacctggccaacctggccgagcagtgcagcgccgacaacaacggcgtggagctgcccgtggtgatcatcctggacaacctgcaccacgtgggcagcctgagcgacatcttcaacggcttcctgaactgcaagtacaacaagtgcccctacatcatcggcaccatgaaccagggcgtgagcagcagccccaacctggagctgcaccacaacttcagatgggtgctgtgcgccaaccacaccgagcccgtgaagggcttcctgggcagatacctgagaagaaagctgatcgagatcgagatcgagagaaacatcagaaacaacgacctggtgaagatcatcgactggatccccaagacctggcaccacctgaacagcttcctggagacccacagcagcagcgacgtgaccatcggccccagactgttcctgccctgccccatggacgtggagggcagcagagtgtggttcatggacctgtggaactacagcctggtgccctacatcctggaggccgtgagagagggcctgcagatgtacggcaagagaaccccctgggaggaccccagcaagtgggtgctggacacctacccctggagcagcgccaccctgccccaggagagccccgccctgctgcagctgagacccgaggacgtgggctacgagagctgcaccagcaccaaggaggccaccaccagcaagcacatcccccagaccgacaccgagggcgaccccctgatgaacatgctgatgaagctgcaggaggccgccaactacagcagcacccagagctgcgacagcgagagcaccagccaccacgaggacatcctggacagcagcctggagagcaccctgtag

SEQ ID NO: 183036 - DNA, 7092 bp, Artificial Sequence
  derived and/or modified sequence
atgcccgtgctgggcgtggccagcaagctgagacagcccgccgtgggcagcaagcccgtgcacaccgccctgcccatccccaacctgggcaccaccggcagccagcactgcagcagcagacccctggagctgaccgagaccgagagcagcatgctgagctgccagctggccctgaagagcacctgcgagttcggcgagaagaagcccctgcagggcaaggccaaggagaaggaggacagcaagatctacaccgactgggccaaccactacctggccaagagcggccacaagagactgatcaaggacctgcagcaggacatcgccgacggcgtgctgctggccgagatcatccagatcatcgccaacgagaaggtggaggacatcaacggctgccccagaagccagagccagatgatcgagaacgtggacgtgtgcctgagcttcctggccgccagaggcgtgaacgtgcagggcctgagcgccgaggagatcagaaacggcaacctgaaggccatcctgggcctgttcttcagcctgagcagatacaagcagcagcagcaccaccagcagcagtactaccagagcctggtggagctgcagcagagagtgacccacgccagcccccccagcgaggccagccaggccaagacccagcaggacatgcagagcagcctggccgccagatacgccacccagagcaaccacagcggcatcgccaccagccagaagaagcccaccagactgcccggccccagcagagtgcccgccgccggcagcagcagcaaggtgcagggcgccagcaacctgaacagaagaagccagagcttcaacagcatcgacaagaacaagccccccaactacgccaacggcaacgagaaggacagcagcaagggcccccagagcagcagcggcgtgaacggcaacgtgcagccccccagcaccgccggccagccccccgccagcgccatccccagccccagcgccagcaagccctggagaagcaagagcatgaacgtgaagcacagcgccaccagcaccatgctgaccgtgaagcagagcagcaccgccaccagccccacccccagcagcgacagactgaagccccccgtgagcgagggcgtgaagaccgcccccagcggccagaagagcatgctggagaagttcaagctggtgaacgccagaaccgccctgagacccccccagccccccagcagcggccccagcgacggcggcaaggacgacgacgccttcagcgagagcggcgagatggagggcttcaacagcggcctgaacagcggcggcagcaccaacagcagccccaaggtgagccccaagctggccccccccaaggccggcagcaagaacctgagcaacaagaagagcctgctgcagcccaaggagaaggaggagaagaacagagacaagaacaaggtgtgcaccgagaagcccgtgaaggaggagaaggaccaggtgaccgagatggcccccaagaagaccagcaagatcgccagcctgatccccaagggcagcaagaccaccgccgccaagaaggagagcctgatccccagcagcagcggcatccccaagcccggcagcaaggtgcccaccgtgaagcagaccatcagccccggcagcaccgccagcaaggagagcgagaagttcagaaccaccaagggcagccccagccagagcctgagcaagcccatcaccatggagaaggccagcgccagcagctgccccgcccccctggagggcagagaggccggccaggccagccccagcggcagctgcaccatgaccgtggcccagagcagcggccagagcaccggcaacggcgccgtgcagctgccccagcagcagcagcacagccaccccaacaccgccaccgtggcccccttcatctacagagcccacagcgagaacgagggcaccgccctgcccagcgccgacagctgcaccagccccaccaagatggacctgagctacagcaagaccgccaagcagtgcctggaggagatcagcggcgaggaccccgagaccagaagaatgagaaccgtgaagaacatcgccgacctgagacagaacctggaggagaccatgagcagcctgagaggcacccagatcagccacagcaccctggagaccaccttcgacagcaccgtgaccaccgaggtgaacggcagaaccatccccaacctgaccagcagacccacccccatgacctggagactgggccaggcctgccccagactgcaggccggcgacgcccccagcctgggcgccggctaccccagaagcggcaccagcagattcatccacaccgaccccagcagattcatgtacaccacccccctgagaagagccgccgtgagcagactgggcaacatgagccagatcgacatgagcgagaaggccagcagcgacctggacatgagcagcgaggtggacgtgggcggctacatgagcgacggcgacatcctgggcaagagcctgagaaccgacgacatcaacagcggctacatgaccgacggcggcctgaacctgtacaccagaagcctgaacagaatccccgacaccgccaccagcagagacatcatccagagaggcgtgcacgacgtgaccgtggacgccgacagctgggacgacagcagcagcgtgagcagcggcctgagcgacaccctggacaacatcagcaccgacgacctgaacaccaccagcagcgtgagcagctacagcaacatcaccgtgcccagcagaaagaacacccagctgagaaccgacagcgagaagagaagcaccaccgacgagacctgggacagccccgaggagctgaagaagcccgaggaggacttcgacagccacggcgacgccggcggcaagtggaagaccgtgagcagcggcctgcccgaggaccccgagaaggccggccagaaggccagcctgagcgtgagccagaccggcagctggagaagaggcatgagcgcccagggcggcgcccccagcagacagaaggccggcaccagcgccctgaagacccccggcaagaccgacgacgccaaggccagcgagaagggcaaggcccccctgaagggcagcagcctgcagagaagccccagcgacgccggcaagagcagcggcgacgagggcaagaagccccccagcggcatcggcagaagcaccgccaccagcagcttcggcttcaagaagcccagcggcgtgggcagcagcgccatgatcaccagcagcggcgccaccatcaccagcggcagcgccaccctgggcaagatccccaagagcgccgccatcggcggcaagagcaacgccggcagaaagaccagcctggacggcagccagaaccaggacgacgtggtgctgcacgtgagcagcaagaccaccctgcagtacagaagcctgcccagacccagcaagagcagcaccagcggcatccccggcagaggcggccacagaagcagcaccagcagcatcgacagcaacgtgagcagcaagagcgccggcgccaccaccagcaagctgagagagcccaccaagatcggcagcggcagaagcagccccgtgaccgtgaaccagaccgacaaggagaaggagaaggtggccgtgagcgacagcgagagcgtgagcctgagcggcagccccaagagcagccccaccagcgccagcgcctgcggcgcccagggcctgagacagcccggcagcaagtaccccgacatcgccagccccaccttcagaagactgttcggcgccaaggccggcggcaagagcgccagcgcccccaacaccgagggcgtgaagagcagcagcgtgatgcccagccccagcaccaccctggccagacagggcagcctggagagccccagcagcggcaccggcagcatgggcagcgccggcggcctgagcggcagcagcagccccctgttcaacaagcccagcgacctgaccaccgacgtgatcagcctgagccacagcctggccagcagccccgccagcgtgcacagcttcaccagcggcggcctggtgtgggccgccaacatgagcagcagcagcgccggcagcaaggacacccccagctaccagagcatgaccagcctgcacaccagcagcgagagcatcgacctgcccctgagccaccacggcagcctgagcggcctgaccaccggcacccacgaggtgcagagcctgctgatgagaaccggcagcgtgagaagcaccctgagcgagagcatgcagctggacagaaacaccctgcccaagaagggcctgagatacacccccagcagcagacaggccaaccaggaggagggcaaggagtggctgagaagccacagcaccggcggcctgcaggacaccggcaaccagagccccctggtgagccccagcgccatgagcagcagcgccgccggcaagtaccacttcagcaacctggtgagccccaccaacctgagccagttcaacctgcccggccccagcatgatgagaagcaacagcatccccgcccaggacagcagcttcgacctgtacgacgacagccagctgtgcggcagcgccaccagcctggaggagagacccagagccatcagccacagcggcagcttcagagacagcatggaggaggtgcacggcagcagcctgagcctggtgagcagcaccagcagcctgtacagcaccgccgaggagaaggcccacagcgagcagatccacaagctgagaagagagctggtggccagccaggagaaggtggccaccctgaccagccagctgagcgccaacgcccacctggtggccgccttcgagaagagcctgggcaacatgaccggcagactgcagagcctgaccatgaccgccgagcagaaggagagcgagctgatcgagctgagagagaccatcgagatgctgaaggcccagaacagcgccgcccaggccgccatccagggcgccctgaacggccccgaccacccccccaaggacctgagaatcagaagacagcacagcagcgagagcgtgagcagcatcaacagcgccaccagccacagcagcatcggcagcggcaacgacgccgacagcaagaagaagaagaagaagaactgggtgaacagcagaggcagcgagctgagaagcagcttcaagcaggccttcggcaagaagaagagcaccaagccccccagcagccacagcgacatcgaggagctgaccgacagcagcctgcccgccagccccaagctgccccacaacgccggcgactgcggcagcgccagcatgaagcccagccagagcgccagcgccatctgcgagtgcaccgaggccgaggccgagatcatcctgcagctgaagagcgagctgagagagaaggagctgaagctgaccgacatcagactggaggccctgagcagcgcccaccacctggaccagatcagagaggccatgaacagaatgcagaacgagatcgagatcctgaaggccgagaacgacagactgaaggccgagaccggcaacaccgccaagcccaccagaccccccagcgagagcagcagcagcaccagcagcagcagcagcagacagagcctgggcctgagcctgaacaacctgaacatcaccgaggccgtgagcagcgacatcctgctggacgacgccggcgacgccaccggccacaaggacggcagaagcgtgaagatcatcgtgagcatcagcaagggctacggcagagccaaggaccagaagagccaggcctacctgatcggcagcatcggcgtgagcggcaagaccaagtgggacgtgctggacggcgtgatcagaagactgttcaaggagtacgtgttcagaatcgacaccagcaccagcctgggcctgagcagcgactgcatcgccagctactgcatcggcgacctgatcagaagccacaacctggaggtgcccgagctgctgccctgcggctacctggtgggcgacaacaacatcatcaccgtgaacctgaagggcgtggaggagaacagcctggacagcttcgtgttcgacaccctgatccccaagcccatcacccagagatacttcaacctgctgatggagcaccacagaatcatcctgagcggccccagcggcaccggcaagacctacctggccaacaagctggccgagtacgtgatcaccaagagcggcagaaagaagaccgaggacgccatcgccaccttcaacgtggaccacaagagcagcaaggagctgcagcagtacctggccaacctggccgagcagtgcagcgccgacaacaacggcgtggagctgcccgtggtgatcatcctggacaacctgcaccacgtgggcagcctgagcgacatcttcaacggcttcctgaactgcaagtacaacaagtgcccctacatcatcggcaccatgaaccagggcgtgagcagcagccccaacctggagctgcaccacaacttcagatgggtgctgtgcgccaaccacaccgagcccgtgaagggcttcctgggcagatacctgagaagaaagctgatcgagatcgagatcgagagaaacatcagaaacaacgacctggtgaagatcatcgactggatccccaagacctggcaccacctgaacagcttcctggagacccacagcagcagcgacgtgaccatcggccccagactgttcctgccctgccccatggacgtggagggcagcagagtgtggttcatggacctgtggaactacagcctggtgccctacatcctggaggccgtgagagagggcctgcagatgtacggcaagagaaccccctgggaggaccccagcaagtgggtgctggacacctacccctggagcagcgccaccctgccccaggagagccccgccctgctgcagctgagacccgaggacgtgggctacgagagctgcaccagcaccaaggaggccaccaccagcaagcacatcccccagaccgacaccgagggcgaccccctgatgaacatgctgatgaagctgcaggaggccgccaactacagcagcacccagagctgcgacagcgagagcaccagccaccacgaggacatcctggacagcagcctggagagcaccctgtag

SEQ ID NO: 183037 - protein, 512 aa, Artificial Sequence
  derived and/or modified sequence
MMLSEQAQKWFPTHVQVTVLQAKDLKPKGKSGTNDTYTIIQLGKEKYSTSVAEKTLEPVWKEEASFELPGLLIQGSPEKYILFLIVMHRSLVGLDKFLGQVAINLNDIFEDKQRRKTEWFRLESKQGKRIKNRGEIKVNIQFMRNNMTASMFDLSMKDKTRSPFAKLKDKMKGRKNDGTFSDTSSAIIPSTHMPDANSEFSSGEIQMKSKPKKPFLLGPQRLSSAHSMSDLSGSHMSSEKLKAGTIGQTHLLGHQLDSFGTVPESGSLKSPHRRTLSFDTSKMNQPDSIVDEGELCFGRQNDPFTNVTASLPQKFATLPRKKNPFEESSETWDSSMNLFSKPIEIRKENKREKREKVSLFERVTGKKDSRRSDKLNNGGSDSPCDLKSPNAFSENRQDYFDYESTNPFTAKFRASNIMPSSSFHMSPTSNEDLRKIPDSNPFDATAGYRSLTYEEVLQELVKHKELLRRKDTHIRELEDYIDNLLVRVMEETPSILRVPYEPSRKAGKFSNS

SEQ ID NO: 183038 - DNA, 1539 bp, Artificial Sequence
  derived and/or modified sequence
atgatgctatccgaacaggcccagaagtggtttccaacccatgtgcaggtcacggtgttgcaagccaaagacctgaagcctaagggaaaatccggcactaacgatacttatacgatcatccagttaggaaaggagaaatattctacttctgtggctgaaaagaccctggaacctgtctggaaagaggaagcttcttttgaactgccaggcctcttgattcagggatccccagaaaagtacattttatttttgatcgtcatgcacaggtcactggttggtctagacaagtttctgggccaggtggctattaacctcaatgatatcttcgaggataaacaaagaaggaagacagagtggtttaggctggaaagtaagcaggggaaaaggattaagaataggggtgagattaaggtaaatatccagttcatgcgtaacaatatgaccgccagcatgtttgacctttctatgaaagacaagacacggtctccattcgctaagctcaaggacaagatgaagggacggaagaatgacgggacctttagcgatacgtccagcgccatcattccgagcacacacatgcctgacgcgaattcagaattctccagcggcgaaatacagatgaagtctaagccaaagaagcccttccttctggggccccagagactttccagcgcgcacagtatgagtgacttgtccggatcacacatgagctcagagaagctcaaagccggcactattgggcaaactcacttattgggacaccagctggactcatttggcacagtcccagaatctggatcattaaagtctccacataggcgcactctctcctttgacacaagtaagatgaatcagcccgattcaattgtcgacgaaggcgaactctgttttggcagacagaatgatccttttactaacgttaccgccagcctgccacagaagttcgcaactcttccacgcaaaaagaacccattcgaggaaagcagcgagacttgggactcttcaatgaacctgttttcaaaacccattgagataaggaaagagaataaaagggagaagcgcgagaaggtttccctgtttgagagagtcactgggaaaaaggatagcaggagatccgacaagcttaataatggaggctcagattcgccctgcgatctgaagtcaccaaatgcatttagcgagaacaggcaggattatttcgactatgagtccaccaacccatttactgccaagtttcgagcaagcaacataatgccctctagctctttccacatgagccccacctcgaatgaagatctccgtaaaatccctgatagcaacccattcgacgccaccgctggctaccgctctctgacatacgaggaagttctccaggagctggtgaagcataaagaattgctgaggaggaaagacactcacattagggagctggaggactacatcgacaatctgctcgtgcgggtgatggaggagacaccctccatcctaagagtgccctacgagcccagtcggaaagccgggaagttttcaaacagctag

SEQ ID NO: 183039 - DNA, 1539 bp, Artificial Sequence
  derived and/or modified sequence
atgatgctgtctgagcaggcccagaagtggttccccacccacgtgcaggtgacagtgctgcaggccaaggacctgaagcccaagggcaagagcggcaccaatgacacctacaccatcatccagctgggcaaggagaagtacagcacctctgtggccgagaagaccctggagcctgtgtggaaggaggaggccagctttgagctgcccggcctgctgatccagggcagccctgagaagtacatcctcttcctgattgtgatgcacaggagcctggtgggcctggacaagttcctgggccaggtggccatcaacctgaatgacatctttgaggacaagcagaggaggaagacagagtggttccggctggagagcaagcagggcaagaggatcaagaacagaggagagatcaaggtgaacatccagttcatgaggaacaacatgacagcctccatgtttgacctgtccatgaaggacaagaccaggagcccctttgccaagctgaaggacaagatgaagggcaggaagaatgatggcaccttcagtgacaccagcagcgccatcatccccagcacccacatgccagatgccaacagcgagttcagcagcggggagatccagatgaagagcaagcccaagaagcccttcctgctgggcccccagaggctgagcagcgcccacagcatgtctgacctgagcggcagccacatgagcagcgagaagctgaaggccggcaccatcggccagacccacctgctgggccaccagctggacagctttggaacagtgcctgagagcggcagcctgaagagcccccacaggaggaccctgagctttgacaccagcaagatgaaccagcctgacagcatcgtggatgaaggagagctgtgcttcggccggcagaatgaccccttcaccaacgtgacagccagcctgccccagaagtttgccaccctgcccaggaagaagaacccctttgaggagagcagcgagacctgggacagctccatgaacctcttcagcaagcccatcgagatcaggaaggagaacaagcgggagaagcgggagaaggtgtccctgtttgagcgggtgacaggcaagaaggacagccgccgcagtgacaagctgaacaatggaggcagtgacagcccctgtgacctgaagagccccaatgccttcagcgagaaccggcaggactactttgattatgagagcaccaaccccttcaccgccaagttccgggccagcaacatcatgcccagcagcagcttccacatgagccccaccagcaatgaagacctgaggaagatcccagacagcaacccctttgatgccacagctggctaccgcagcctgacctatgaggaggtgctgcaggagctggtgaagcacaaggagctgctgcggaggaaggacacccacatccgggagctggaggactacatcgacaacctgctggtgcgggtgatggaggagacccccagcatcctgcgggtgccctatgagcccagcaggaaggccggcaagttcagcaacagctag

SEQ ID NO: 183040 - DNA, 1539 bp, Artificial Sequence
  derived and/or modified sequence
atgatgctgagcgagcaggcccagaagtggttccccacccacgtgcaagtcaccgtcctgcaggctaaggacctgaaacccaagggaaagtcaggcaccaacgacacctatactatcattcaattggggaaggaaaagtattctacatctgtggccgaaaagacgctggaacctgtatggaaggaagaggcctctttcgagctgccaggactcctgatacagggcagcccggaaaagtacatcctcttccttattgtcatgcatagaagcctggtgggcttggacaaatttcttggtcaagtagcaataaatcttaacgacatctttgaggataagcagcgccggaagacagagtggttccggctcgagtccaaacagggcaagcgcatcaaaaacaggggcgaaattaaggtgaatatccaatttatgcgcaacaatatgacagcaagcatgttcgacctgtccatgaaagacaagactaggtcacccttcgccaaacttaaggataagatgaagggccggaaaaacgacgggacttttagcgatacttcttcggcaattatccccagcacacacatgcctgacgccaactccgaattcagttccggcgaaatccagatgaagagcaagcccaaaaaaccatttctgctgggacctcagcgactcagctcagcccatagcatgagtgatctgtctgggtcccacatgtcctcagaaaaattgaaggctggcacaatcggacagacccatctgctgggtcatcagctcgattcttttggtacagtacccgagtctggtagtctgaagtcaccccaccgacgtactctatcattcgacacttccaaaatgaaccagccagactcaatcgttgatgagggtgagctgtgctttggacgacagaacgacccttttaccaatgtgaccgctagtctgccacagaaattcgctactctcccccgcaagaagaaccctttcgaggagagttccgaaacttgggattcgtcaatgaaccttttctcaaaaccaatcgaaattcgaaaagaaaacaaacgcgagaagagggaaaaggtgtccctgtttgagcgggtgactggtaagaaagatagccgcaggagtgataaactaaacaatggaggctctgacagcccttgtgatctgaaaagtccaaacgccttctctgaaaatagacaagattactttgactatgaatctacaaacccattcacagccaaatttcgcgcctccaacatcatgccttcttcaagtttccatatgagccccacgtccaatgaggacttacgaaagattcccgactcgaacccttttgacgctaccgcaggctatcgctcactcacatacgaggaggtgctgcaggagcttgtgaaacataaggagctcttacgccgaaaagatactcacattagggagctcgaggattatatagataacttactggtccgcgtgatggaagagactcccagcatcctgcgggtcccatatgagccatcccgcaaagctggcaagttcagcaactcatag

SEQ ID NO: 183041 - DNA, 1539 bp, Artificial Sequence
  derived and/or modified sequence
atgatgctttcagaacaagcccagaagtggtttcccactcacgtccaggttacagtgttgcaggccaaggatctcaaaccgaagggaaaaagcggaacgaacgatacatatactattatccagctgggaaaggaaaagtacagtactagcgtggccgaaaagactctggagcccgtatggaaagaggaggcctccttcgagttacccggactgctcattcaaggctctcctgagaagtacatccttttcctgatcgtgatgcaccgctccttagtgggacttgacaagttcctgggccaggtagctatcaacctaaatgacattttcgaggataagcagcgacgtaagacagagtggttccgccttgagagcaaacaaggaaagcgcatcaaaaataggggagaaatcaaagtgaatatccagtttatgcggaacaacatgactgcaagcatgtttgatctgtctatgaaggataagacccgatcaccctttgccaagcttaaggataagatgaaggggaggaaaaatgacggcacatttagtgacacttcctccgctataataccatctacgcacatgcctgatgctaacagcgagttttcctcgggagaaatccagatgaaatctaagccgaaaaaacccttcctgttgggcccacagaggctgagctccgcccattccatgagcgacctgagtggatcccacatgtcttccgagaagttgaaagccggaacgattgggcagacacatctcctcggacaccagctggacagtttcgggacggtacctgaatctggatctctcaaaagccctcatcgaaggacgctcagcttcgatacgtcaaagatgaatcagcccgacagcattgttgacgaaggtgagctatgttttggaaggcaaaacgacccatttaccaacgttaccgcctctctgccgcagaaattcgccaccttgccaaggaagaagaacccctttgaggaaagcagcgagacatgggatagctctatgaacctgttctcaaaacccatcgaaatcagaaaagagaacaagcgtgagaaacgggagaaggtgtcactatttgaacgggttacaggcaaaaaggactccaggcgtagcgataagttgaacaatgggggatcggactccccttgcgacctgaaaagccccaatgccttcagcgagaataggcaagactatttcgattatgagtctacaaatccatttacagccaaattccgcgctagtaatataatgccaagttcctcgttccatatgagccccacctcaaatgaggatctgcgtaagattccagattccaacccgttcgatgccacggctggttacaggagcctaacatacgaagaggttctccaagaacttgtcaaacataaagagctgctgcgccgtaaagatacacacattagggagttagaggactacatagacaatttgttagtccgggttatggaggaaactcccagtattctaagagtcccttacgagccaagccgtaaagctggcaagttctcaaactcttag

SEQ ID NO: 183042 - DNA, 6061 bp, Artificial Sequence
  derived and/or modified sequence
gggcgggcgggaggcgcggaggcagcggaggctgctcggccgcaaggaggcaggcgggaggccaggggtgcagaattggggcgggggctcccttcacccccgcagccctccgcccgggtccgtgtggccaggcctcacgtgccccgcaggcctggggaaggtggagacaggggcgggggtccgcgcagaggcctgcacggcgcggccaggtgatggtgggcctctgtgtttctccagacgaaaggggacccccggagcggccgtgcccctgggctgcccccgcgaggcgttttgacatcagccatagggaagtcggggagccctgagcctgcctgtttccgttaagtgtccttaggatgcagtgattaaggaattaggctctccctccgggaggggcactgcctgtgctagggaactcgggggcagagaaacaggacaggatgatgctgtccgagcaagcccaaaagtggtttccaacccacgtgcaggtcacagtgctccaagccaaagatctgaagccaaaaggcaaaagtggtaccaatgacacatacactataattcagctgggcaaggaaaagtactccacctctgtagctgagaaaacccttgagccagtttggaaggaggaggcctctttcgagctacctggattgctaattcagggaagtccagagaaatacattcttttccttatagttatgcacaggtccctggtgggtctggataaatttttagggcaggtggcaatcaatctcaatgacatctttgaggacaaacaaagaaggaaaacagagtggtttagattagaatccaaacaaggaaaacgaatcaaaaacaggggtgagataaaggtcaatattcagtttatgaggaacaatatgaccgcaagtatgtttgacttatcaatgaaggacaaaaccagatctccttttgcaaagttaaaagataagatgaagggtagaaaaaatgatggaacattttctgatacgtcttctgcaatcattccaagtactcacatgcccgatgccaatagtgaattttcaagtggtgaaatacagatgaaatccaaaccaaaaaagccttttctcttgggtcctcagcgactctcgtcagcgcattcaatgtctgatttatctgggtcccatatgtcttctgagaaactgaaggctggcaccataggtcaaacacatcttctcggacaccagttagattcctttggaacagttccagaaagtggaagtctcaaatctccacacagaagaacattaagctttgatacttctaaaatgaaccaacctgacagcattgtggatgaaggtgaattgtgtttcggaagacaaaatgacccatttacaaatgtgactgcttcattaccccaaaaatttgcaacactgccaaggaagaaaaatccatttgaagaaagcagcgaaacatgggacagcagcatgaatttattttcaaaaccaattgaaataagaaaagaaaataaaagagagaaaagggagaaagttagcctgtttgaaagagtgactggaaaaaaagatagcagaagatctgataaacttaacaatgggggatctgatagcccttgtgacttgaaatcacctaatgcatttagtgaaaatcgccaggactattttgattatgagtcaaccaatccatttacagcaaaattcagggcttcaaatataatgccatcttcaagttttcatatgagtccaacaagcaatgaagacctcaggaaaatcccggacagcaacccctttgatgccactgcagggtatcgtagtctgacctatgaagaggttctacaggagctggtgaaacacaaagaactccttaggaggaaagacacccacatccgggaactcgaggactacatcgacaacctccttgtaagggtaatggaagaaacgcccagtattctcagagtgccgtatgaaccatccaggaaagctggcaaattctctaacagttaataaagccaattgtattgtattgataattggacaaagagagagaaagaaagaaggaaggaaggaaaaacttgttactgaaagagactacactatcaggtttcattacatattctcctttattgtgaagagtagttttacctgtaaatattagcagggactatcaagagtgacctttgaagcaagctaaatcatttaaatgtttaaattgaaaatgggccagattctcaatgaataagtggttccttaggactcactcaggtgctggtactgacccactaatctgccataggcccagaaatatcttcagaagtacgtgagttgttcctcaggaatagatttttcataaagcagaattgatcctgtggctggtttctcagaaatcagtttgtagaaatatttagcttcaggaatactgctcgttataaacactactaaaaaaacagtttatattttatatacacatatgtacatgaatatatatatattcatgtatcttgtatataaaatataggcatatacctcatatatacatgtgtttttagaacatttagaaacaattgattgcctctaaagttaggctaccaatttcttgatttgaaaatgtgtgtgctctattgatgcaagacaagtcatccttcctactgtcatggtttgttatagagaagctgcttcaaatcactcttgactacatggaccttggtttcaaagtgagctgctatatattattctagcatcaaagtttttctctttccccaaaagtgatgatctcaagtccttttttaaagaatgacaaattttaggagacttcattaacttcataacagcatgaatttatttgaattaattaacatttgagtttgtttaaggtataagcagaagataagctaatatagcttgttttgttgaaattctgcatgcctttaaatcactagcaaagcaaatattataaagttatatctgaaaataattgtgggaagtatgtgattgcctggtgtgtctgataacccaaagcagcgggcagattccaggaatgaagaattaggcttggtttcaggttacataaataatagagcagatggttgcctttgggtcttgaaccaaaataagacttactaaaggaagagtgagtttttagaagagaactttacgagcgtgacattatgcattactccacatccaccctttaagaattgatttattacaaaattatgttctattttaaagtccactcccccaaaatactgatttcttccatggattatttttatatgatttgtacaaattttttctgaaatttaaattgacaagcaatgttataaaaatattgctaatcttctgcttatttttcagcctttaaagtctgaaatactataaaacactgagagtatctatgtctttctgaatttaaaatgaaaattcatgtccatatggagacttacatattccccaatctttccatgaattgcatttttttctaatacttatctctgttaagactccattgaaagttaaacaaaaagccgatataatagtttgggttttttttttttgcttattttagtattttgaatcagagaatacttggccaagctcgtatttgtaaactaaaaccccttgttatttgtatcttctgcatttcagttttactgtaagaacatacattttgaaattatgaacatttttttcataaaaattaaatgctttaagaaatggagaaggaaaaatagcttttatcaatttttttctcctcaagattctgtaataaacctcaaagtctggtgtagaatggtattttcccgtttgaggtcttggtagttttttttttttttttaaacatggtgccacttttaattaactaaatgttacaaaattctcagcatttgtttttgtctggtagtattattgagtcttttcatacacttcttaaaatgtgaaaatctatgttttcagtattatgacagtatctgcagatactataataatatgctttggccaaatttgctgtttatagagtgaaccaagatgtcagttttgtattggggatatgttttacataaatagaactcatttaaaagtatggttcaagtactgctcttctttttatggggaaattgatttttaaggagcgattcttttcctatataaaagctattgaggcttagctttattcatacatgagtgatttggttataactcaatcaaaatttttatctttaaatctgagacaagtattatatttaaaactagatctattaatacattcatcactgcctgaaaatttgctgttctaatgtttgtgaattttcactcattacctagagtaaacttattgcatattttcataatcagtcaaaataataaaactaaaaacaaaaagtaaaaattagttcccaagtaaatatatcagtgtttcctgtgtttgggcagaagtgcaaagtagttttaatttctcacgttgtagaaaaagaggccaaaaaggtcaccttagtttatttttccaaaacataactttaggtattctaatgtattttgttagttgcttagaaatggaaataaaatatatgtgcttattaaataatgcacagtacactagattatagagtttatttttgcttttatgctttaaagaatgcatgcccaaaacactactaccaacaagaggattttttaaaatcacagaattgatatttatctcaagactatcttaagctaatgtacttctgttacataattaaactatttctgctattatttttaaagcagtattattttataaccaattctaaaattcagctttaaaaatattgaacataccttcctaccacttacgcttcaagtttcatttattgaataccagggtcatatcttagaattgtatataaaacaacatgtaacccattcatgaaaaacgtttttaagtattgctttttgctgctatgttctgcattgagcctagttttgccattgtcccctgaatgtagtattatctatagattatacataactacatctattgcttttggtggtaaatcaagatttagttgtaattttccagctgtgaaaatgttgccttgtatttaaaagggtttcatgaatggaaacctaagtaaaactaagctcattagtgacagacttgttttcttcttgttattcctccagcaactccctcaccaccacgcctccctgcctaccatccccggaagggtgcttattctttaacaaagagaatctaaaaaaaaaaacaaaaaactgttgtctaatatatctacagtaaatgttacactagagcttttattttcctctgtagcttttcagaagaagcaatttaccttggatttgtaaatcaagctgaaacttttttgatgttcatgtactcatatgtcttgtaggtggtaggtgtcacttgtgtgtatgtgtaagtgaagtatgatgcatgctcattcacttggtccctttgaaataagggaaaggatcacagtgctgctgggccatgatggtatgtagaagggtctgtcagcacacatggaaagcccccatttgcacagatgtagaactttaataatccagatgcaatcattggaagtatttaatatgcaattggtagcaccttagctaattaatctgcatatgaagcattttctgatatatttaataagaggtatagaagctcttcaagcattaaaatagagttgatgtttcattccatttgttttatccatcaaaaaatgcactctcacagtggagttgaagtctaatacatgatacatgtgggcctgttagtcttcgaagcttccagatggtttgtgttttgaggtacaaaaaaatgctgcagatctagaaatgcatatatttagcgggtatttgaaagatagaagcattatttataactgaagagtataacacttatcttcttaagtaaatgctctcataacttgtatacatttttgcaggtacaaattcaaaagtatgtaagcattgtataatgtgacaattgtataatttatgtaatctgatgcatgaatcagaatttttatataatatatgattattgacttatagttgattaaagtgtttaaacttaa

SEQ ID NO: 183043 - DNA, 1539 bp, Artificial Sequence
  derived and/or modified sequence
atgatgctgagcgagcaggcccagaagtggttccccacccacgtgcaggtgaccgtgctgcaggccaaggacctgaagcccaagggcaagagcggcaccaacgacacctacaccatcatccagctgggcaaggagaagtacagcaccagcgtggccgagaagaccctggagcccgtgtggaaggaggaggccagcttcgagctgcccggcctgctgatccagggcagccccgagaagtacatcctgttcctgatcgtgatgcacagaagcctggtgggcctggacaagttcctgggccaggtggccatcaacctgaacgacatcttcgaggacaagcagagaagaaagaccgagtggttcagactggagagcaagcagggcaagagaatcaagaacagaggcgagatcaaggtgaacatccagttcatgagaaacaacatgaccgccagcatgttcgacctgagcatgaaggacaagaccagaagccccttcgccaagctgaaggacaagatgaagggcagaaagaacgacggcaccttcagcgacaccagcagcgccatcatccccagcacccacatgcccgacgccaacagcgagttcagcagcggcgagatccagatgaagagcaagcccaagaagcccttcctgctgggcccccagagactgagcagcgcccacagcatgagcgacctgagcggcagccacatgagcagcgagaagctgaaggccggcaccatcggccagacccacctgctgggccaccagctggacagcttcggcaccgtgcccgagagcggcagcctgaagagcccccacagaagaaccctgagcttcgacaccagcaagatgaaccagcccgacagcatcgtggacgagggcgagctgtgcttcggcagacagaacgaccccttcaccaacgtgaccgccagcctgccccagaagttcgccaccctgcccagaaagaagaaccccttcgaggagagcagcgagacctgggacagcagcatgaacctgttcagcaagcccatcgagatcagaaaggagaacaagagagagaagagagagaaggtgagcctgttcgagagagtgaccggcaagaaggacagcagaagaagcgacaagctgaacaacggcggcagcgacagcccctgcgacctgaagagccccaacgccttcagcgagaacagacaggactacttcgactacgagagcaccaaccccttcaccgccaagttcagagccagcaacatcatgcccagcagcagcttccacatgagccccaccagcaacgaggacctgagaaagatccccgacagcaaccccttcgacgccaccgccggctacagaagcctgacctacgaggaggtgctgcaggagctggtgaagcacaaggagctgctgagaagaaaggacacccacatcagagagctggaggactacatcgacaacctgctggtgagagtgatggaggagacccccagcatcctgagagtgccctacgagcccagcagaaaggccggcaagttcagcaacagctag

SEQ ID NO: 183044 - protein, 669 aa, Artificial Sequence
  derived and/or modified sequence
MMRLRGSGMLRDLLLRSPAGVSATLRRAQPLVTLCRRPRGGGRPAAGPAAAARLHPWWGGGGWPAEPLARGLSSSPSEILQELGKGSTHPQPGVSPPAAPAAPGPKDGPGETDAFGNSEGKELVASGENKIKQGLLPSLEDLLFYTIAEGQEKIPVHKFITALKSTGLRTSDPRLKECMDMLRLTLQTTSDGVMLDKDLFKKCVQSNIVLLTQAFRRKFVIPDFMSFTSHIDELYESAKKQSGGKVADYIPQLAKFSPDLWGVSVCTVDGQRHSTGDTKVPFCLQSCVKPLKYAIAVNDLGTEYVHRYVGKEPSGLRFNKLFLNEDDKPHNPMVNAGAIVVTSLIKQGVNNAEKFDYVMQFLNKMAGNEYVGFSNATFQSERESGDRNFAIGYYLKEKKCFPEGTDMVGILDFYFQLCSIEVTCESASVMAATLANGGFCPITGERVLSPEAVRNTLSLMHSCGMYDFSGQFAFHVGLPAKSGVAGGILLVVPNVMGMMCWSPPLDKMGNSVKGIHFCHDLVSLCNFHNYDNLRHFAKKLDPRREGGDQRVKSVINLLFAAYTGDVSALRRFALSAMDMEQRDYDSRTALHVAAAEGHVEVVKFLLEACKVNPFPKDRWNNTPMDEALHFGHHDVFKILQEYQVQYTPQGDSDNGKENQTVHKNLDGLL

SEQ ID NO: 183045 - protein, 174 aa, Artificial Sequence
  derived and/or modified sequence
MGMMCWSPPLDKMGNSVKGIHFCHDLVSLCNFHNYDNLRHFAKKLDPRREGGDQRVKSVINLLFAAYTGDVSALRRFALSAMDMEQRDYDSRTALHVAAAEGHVEVVKFLLEACKVNPFPKDRWNNTPMDEALHFGHHDVFKILQEYQVQYTPQGDSDNGKENQTVHKNLDGLL

SEQ ID NO: 183046 - DNA, 2010 bp, Artificial Sequence
  derived and/or modified sequence
atgatgagactgcggggttcggggatgctgagggacttgctcctgcgaagccctgctggagtcagcgcaacgctccgcagggcccagccactggttaccctgtgcaggcgccctagaggcggcggaaggcccgccgcaggaccggctgccgcagctcggcttcacccgtggtgggggggaggagggtggcccgctgagcctctcgctcggggtttgtcctcgtcccccagcgaaatccttcaggagctgggtaagggctctactcacccgcagcccggcgtgagcccccccgcagctcctgctgcacctggaccaaaggacgggcctggtgagactgacgcctttggaaactcggaagggaaagaacttgttgccagcggggagaataagattaagcagggactattgccttcgcttgaggacctgcttttctacacaatcgccgagggacaggaaaagattcctgtgcataagtttattacagctctcaaatcaaccgggctaaggaccagtgatcctcggcttaaggagtgcatggatatgcttagactcaccctacagaccacatcggacggggtgatgcttgataaagacctgtttaagaagtgcgtccagtctaatatcgtcttgcttacacaagcctttcggagaaagttcgttatccccgacttcatgagcttcacaagtcatattgatgagttatacgagagcgccaagaaacagagcggtggtaaagttgccgattacatcccacagcttgcgaagttttcccctgacttatggggagtaagtgtctgcacagttgacgggcagcgccacagcactggcgacactaaggtccccttctgtttgcaatcgtgcgtgaagcccctgaagtacgccattgccgtgaacgatctgggtactgaatacgtgcatcggtacgttggcaaggagccatccggcctaaggttcaataaactgtttctgaacgaggatgacaagccccataacccgatggtaaatgcaggggcaatcgtggtcacatctctcatcaaacagggggttaacaatgccgagaaattcgactacgtgatgcagtttttaaataaaatggcagggaacgagtatgtgggcttttcgaacgccacgttccagtctgaaagagagtccggcgaccggaatttcgctattggttactacctgaaggagaagaaatgcttccccgagggaaccgacatggttggaatactggatttttatttccaactctgctcaattgaagtgacatgcgaatctgcttcggtcatggccgcgaccctggcgaacggagggttctgtccaatcaccggggagcgcgtactgtcaccagaagcagtaaggaacaccctcagcctgatgcactcctgcgggatgtacgatttttccggccagtttgcctttcatgtaggactcccagcgaaatcaggggtggcaggcggcattttgctcgtcgtgcccaacgtgatggggatgatgtgttggagccccccactcgacaagatgggaaactccgtgaagggcatccacttctgccacgatctggtctccttgtgcaatttccacaactacgacaacttacgccatttcgctaagaaactcgatccacggcgcgagggtggcgatcaacgcgtcaagtccgtcatcaacctgcttttcgctgcctatacgggtgacgtgtccgccctccgtcgctttgcgttgtctgccatggatatggagcagagagattacgactcccgaactgccctgcacgtggctgccgccgagggccatgttgaggtagtaaaattcctgctggaagcctgcaaggtgaacccatttcctaaagaccgctggaacaacaccccaatggatgaagccctgcattttggtcaccatgatgttttcaagatccttcaggagtatcaagtgcagtatacaccacaaggcgacagtgacaacggcaaagaaaatcagacagttcacaaaaacctggatgggctgctatag

SEQ ID NO: 183047 - DNA, 525 bp, Artificial Sequence
  derived and/or modified sequence
atggggatgatgtgttggagtccacccttggataaaatgggcaattcagtaaaaggtatccacttctgccatgacttagtgagcctgtgtaactttcacaactacgataacttacgtcatttcgcgaaaaagctggatcccagaagggagggcggcgatcagagggtgaaatccgtcattaatctgctgtttgccgcatacacgggagatgttagcgccctgcggaggtttgccctttctgcgatggatatggaacagcgggactacgattctcgaacggctcttcacgttgctgctgccgagggccacgtggaggtcgtgaaattcctgctggaggcttgcaaggtgaatccgttccccaaagaccgttggaacaacacccctatggatgaggctctgcatttcgggcaccatgatgtcttcaagattttacaggagtaccaggtccagtacacgccccagggggactctgacaacggaaaggaaaatcagacagtgcacaagaatcttgacggcttgctgtag

SEQ ID NO: 183048 - DNA, 4834 bp, Artificial Sequence
  derived and/or modified sequence
gagccttaggcggagcgaagagaaccggtcgcggcaatcctagcgcgcagcagcagcagcagcagcagcagcagcagcagcagcagcagcagcacccgcatccgctgcgggagtccgagccggaaccacacccaagtagctgccctttcctcttctgtcatctcaccgccccaccacagaccgcgttccccgaggaaaccggccgcccacgcccggagcatcctcccctgttgagcgggcgctgacggacccggcggcatgatgcggctgcgaggctcggggatgctgcgggacctgctcctgcggtcgcccgccggcgtgagcgcgactctgcggcgggcacagcccttggtcaccctgtgccggcgtccccgaggcgggggacggccggccgcgggcccggctgccgccgcgcgactccacccgtggtggggcgggggcggctggccggcggagcccctcgcgcggggcctgtccagctctccttcggagatcttgcaggagctgggcaaggggagcacgcatccgcagcccggggtgtcgccacccgctgccccggcggcgcccggccccaaggacggccccggggagacggacgcgtttggcaacagcgagggcaaagagctggtggcctcaggtgaaaataaaataaaacagggtctgttacctagcttggaagatttgctgttctatacaattgctgaaggacaagagaaaatacctgttcataaatttattacagcactcaaatctacaggattgcgaacgtctgatcccaggttgaaagagtgtatggatatgttaagattaactcttcaaacaacatcagatggtgtcatgctagacaaagatctttttaaaaaatgtgttcagagcaacattgttttgttgacacaagcatttagaagaaagtttgtgattcctgactttatgtcttttacctcacacattgatgagttatatgaaagtgctaaaaagcagtctggaggaaaggttgcagattatattcctcaactggccaaattcagtcccgatttgtggggtgtgtctgtttgtacagtagatggacagaggcattctactggagataccaaagttcccttctgtcttcagtcctgtgtaaaacctttgaaatatgccattgctgttaatgatcttggaactgaatatgtgcatcgatatgttggaaaagagccgagtggactaagattcaacaaactatttttgaatgaagatgataaaccacataatcctatggtaaatgctggagcaattgttgtgacttcactaataaagcaaggagtaaataatgctgaaaaatttgactatgtcatgcagtttttgaataagatggctggtaatgaatatgttggattcagtaatgcaacgtttcagtctgaaagagaaagtggagatcgaaattttgcaataggatattacttaaaagaaaagaagtgttttccagaaggcacagacatggttggtatattagacttctacttccagctgtgctccattgaagtgacttgtgaatcagccagtgtgatggctgcgacactggctaatggtggtttctgcccaattactggtgaaagagtactgagccctgaagcagttcgaaatacattgagtttgatgcattcctgtggcatgtatgacttctcagggcagtttgctttccatgttggtcttcctgcaaaatctggagttgctgggggcattcttttagttgtccccaatgttatgggtatgatgtgctggtctcctcctctggataagatgggcaacagtgttaagggaattcacttttgtcacgatcttgtttctctgtgtaatttccataactatgataatttgagacactttgcaaaaaaacttgatcctcgaagagaaggtggtgatcaaagggtaaagtcagtgataaatcttttgtttgctgcatatactggagatgtgtctgcacttcgaagatttgctttgtcagctatggacatggaacagcgggactatgattctagaacagcactccatgtagctgctgcagagggtcatgttgaagttgttaaatttttgctggaagcctgcaaagtaaaccctttccccaaggacaggtggaataacactcccatggatgaagcactgcactttggacaccatgatgtatttaaaattctccaagaataccaagtccagtacacacctcaaggagattctgacaacgggaaggaaaatcaaaccgtccataagaatcttgatggattgttgtaatggtctcaaatcccaagatttaaatcacttacctatttaattgtggaaaatgattatgaagaacatgtgtatttctatctggtagtgatgtatattttacatttgtcatttcagtgttactggagttttcttcattgtgcacacaggacaaatctgatctctttgggaaaaaatagaaataaaacaatctccctccataatgtgagcaatattacctcgtgcattgtataatttgatgtaaaagaaatagttaccaatgctagcttgtgtggtcttccatgatttatttgtgttttgtgaattttcaatttatggtgatgatctgctgatatgcatttataaagtaagctctgttgtacagtctgtccaaatgggtcaaggttgcctttagaagcaaatagtgtgattttcaagacttcaaatacaaatttagtttaagtgtttgaacaactatatgcacttacggttgtgtgtttaaaatgtctctctcaccccctagcttcatgatgtgactcttaaaaaactataatagttaacaactgttagtaagatagaccaattctgattagactttatcagggaatctgtttaagatatgtttggtgaccaaaacgtatgtgtgaatgtagttataatgcttttgaaaaattttcctttttctatatccccttagtccagcctctcttctcagacatttagctatctgcctctttcctttagctgggaaagtgagagctggcatactatgcagtttttatgttttccatagtaagtcagaaaatgcctcctatttctggcatcagaactttgccatttgtctacagaagacgaaccagagacaaaattactaagtataaattagtcaagtttatcagtctaaaaaacgaagggatgtgcaactgcagctctttaagaagttttttttttttagcttctagggtaaagataaattcagaaatgctctaagctaccaaagttattctgaaagtatgggaactgctacaactaacaaacatttgtttccaagcctgtcattaagagtctgcatcaagagatttgtcctccttgggggaccactggatcattccagatttcttgtgatttttctattgtgtaattcttggtgggctctgtagtttaataataagaaaaaggccatttcattttaaattgtgacctataattctttgtcttgggttggtaattcaggattcatttggaaagtgggtaaaaggggcttcaaaaaacggatagaacaggattttctaggagttacacatacattttatcctgtcatacctcgagataaagtggcatgttagtgaggagttctgatattaagcacacacacacatgcacacaaatggacttctctgaagctgtgtttagtgaaatgagctcaagtacatgaatgttagttgttatcacatacagcaaattcctttttttttctttttctatgagcacactctgctgcttctaaactttacatgcctgatggcaccttactccagcagcctccaggtgctttcattttcacttccagtctaagccagtggctcctgccactgccctcccattacctagatggcacctcctttggtgaaaccacggccaatgttccttagctgcaccaggcccgaagctgttcccatgcttgagcttccatggggaggatgctgagtgagcagtttcctaccccgtggatctagcaagccatggagacaggtagcatttgtaagatgctgcacaggagcagcattatccccaaagatattacagggtagacacgttttaactgaaatcaatcaagataactttattcaaagagcagcccgctttgtgtgactaaaatgaaacaagacagttgaattgtgtgacttgaagattaccaatgattttgaggcttttctataataaaaagaggttctaaccattatttgggaacaaagagagttttcatcttttttcagatcaaaaccattctgtaaaatctttgttgtttaattaaatgtgccgttatttacccctgatgttatttatgactatgtgccgattcctgctcgggctgtttgctgttggctggtaataatatatttgatttaaatgctgttgactgtgctattaactgctgccgtcagtaaactccaaagatctttttgttttggctttagtatcatatgtgctttttctgtatcctgagcgctctatatgatcatgttaatttaaagctttatacacattgttgtttttgctggtctcatctttggtaatatgctataccccactgctgcccgacactgccctttagctgcagagctggattagctgttgaccatttgatgctgttgtctgtctggcagggactgaatgacctgatgtcagatttagattcttcctggggattacacagctatgaatgtatttgcttctaaaacctcccaaagtgaatctaatcttaaaactacaagttgtaagtattctgaaattgggaaacatttattttaaatgcaatcaggtagtgttgctttttacagcataataaatatatgtatcaaaaaaaaaa

SEQ ID NO: 183049 - DNA, 816 bp, Artificial Sequence
  derived and/or modified sequence
tggaagtttgatttatagaacctcatcccttctgcttttaaggcaatccagtgtacaaggttggtcttcctgcaaaatctggagttgctgggggcattcttttagttgtccccaatgttatgggtatgatgtgctggtctcctcctctggataagatgggcaacagtgttaagggaattcacttttgtcacgatcttgtttctctgtgtaatttccataactatgataatttgagacactttgcaaaaaaacttgatcctcgaagagaaggtggtgatcaaagggtaaagtcagtgataaatcttttgtttgctgcatatactggagatgtgtctgcacttcgaagatttgctttgtcagctatggacatggaacagcgggactatgattctagaacagcactccatgtagctgctgcagagggtcatgttgaagttgttaaatttttgctggaagcctgcaaagtaaaccctttccccaaggacaggtggaataacactcccatggatgaagcactgcactttggacaccatgatgtatttaaaattctccaagaataccaagtccagtacacacctcaaggagattctgacaacgggaaggaaaatcaaaccgtccataagaatcttgatggattgttgtaatggtctcaaatcccaagatttaaatcacttacctatttaattgtggaaaatgattatgaagaacatgtgtatttctatctggtagtgatgtatattttacatttgtcatttcagtgttactggagttttcttcattgtgcacacaggacaaatctgatctctttgggaaaaa

SEQ ID NO: 183050 - DNA, 2010 bp, Artificial Sequence
  derived and/or modified sequence
atgatgaggctgcggggcagcggcatgctgcgggacctgctgctgcggagccctgctggggtgtctgccaccctgcggcgggcccagcccctggtgaccctgtgccggcggccccggggcggcggccggcctgctgctggccctgctgctgctgcccggctgcacccctggtggggcggcggcggctggccagctgagcccctggcccggggcctgagcagcagccccagcgagatcctgcaggagctgggcaagggcagcacccacccccagcccggggtgagccccccagctgccccagctgcccctggccccaaggatggccctggagaaacagatgcctttggaaacagcgagggcaaggagctggtggccagcggggagaacaagatcaagcagggcctgctgcccagcctggaggacctgctcttctacaccatcgccgagggccaggagaagatccctgtgcacaagttcatcacagccctgaagagcacaggcctgcggaccagtgacccccggctgaaggagtgcatggacatgctgcggctgaccctgcagaccaccagtgatggagtgatgctggacaaggacctcttcaagaagtgtgtgcagagcaacatcgtgctgctgacccaggccttccggaggaagtttgtgatcccagacttcatgtccttcaccagccacattgatgagctgtatgaaagtgccaagaagcagagcggcggcaaggtggccgactacatcccccagctggccaagttctccccagacctgtggggcgtgtctgtgtgcaccgtggatggccagaggcacagcactggagacaccaaggtgcccttctgcctgcagagctgtgtgaagcccctgaagtatgccatcgctgtgaatgacctgggcacagaatatgtgcaccgctacgtgggcaaggagcccagcggcctgcgcttcaacaagctgttcctgaatgaagatgacaagccccacaaccccatggtgaatgctggggccatcgtggtgaccagcctcatcaagcagggcgtgaacaatgctgagaagtttgattatgtgatgcagttcctgaacaagatggctggaaatgaatatgtgggcttcagcaatgccaccttccagagcgagcgggagagcggggacaggaactttgccatcggctactacctgaaggagaagaagtgcttccctgagggcacagacatggtgggcatcctggacttctacttccagctgtgcagcattgaggtgacctgtgagagcgcctctgtgatggccgccaccctggccaacggcggcttctgccccatcactggagagcgggtgctgagccctgaggccgtgaggaacaccctgagcctgatgcacagctgtggcatgtatgacttcagcggccagtttgccttccacgtgggcctgcctgccaagagcggcgtggccggcggcatcctgctggtggtgcccaacgtgatgggcatgatgtgctggagcccccccctggacaagatgggcaacagcgtgaagggcatccacttctgccacgacctggtgtccctgtgcaacttccacaactatgacaacctgcggcactttgccaagaagctggacccccggcgggagggcggggaccagagggtgaagagcgtcatcaacctgctgtttgctgcctacacaggagatgtgtctgccctgcggagatttgccctgagcgccatggacatggagcagagggactatgacagcaggacagccctgcacgtggccgctgctgagggccacgtggaggtggtgaagttcctgctggaggcctgcaaggtgaaccccttccccaaggaccgctggaacaacacccccatggatgaggccctgcacttcggccaccatgatgtgttcaagatcctgcaggagtaccaggtgcagtacaccccccagggcgacagcgacaacgggaaggagaaccagacagtgcacaagaacctggatggcctgctgtag

SEQ ID NO: 183051 - DNA, 525 bp, Artificial Sequence
  derived and/or modified sequence
atgggcatgatgtgctggagcccccccctggacaagatgggcaacagcgtgaagggcatccacttctgccacgacctggtgtccctgtgcaacttccacaactatgacaacctgcggcactttgccaagaagctggacccccggcgggagggcggggaccagagggtgaagagcgtcatcaacctgctgtttgctgcctacacaggagatgtgtctgccctgcggagatttgccctgagcgccatggacatggagcagagggactatgacagcaggacagccctgcacgtggccgctgctgagggccacgtggaggtggtgaagttcctgctggaggcctgcaaggtgaaccccttccccaaggaccgctggaacaacacccccatggatgaggccctgcacttcggccaccatgatgtgttcaagatcctgcaggagtaccaggtgcagtacaccccccagggcgacagcgacaatggcaaggagaaccagacagtgcacaagaacctggatggcctgctgtag

SEQ ID NO: 183052 - DNA, 2010 bp, Artificial Sequence
  derived and/or modified sequence
atgatgcggctgcggggcagcggcatgctgcgggacctgctgctgcgctcacctgctggggtcagcgctacccttagaagggcacagccactggtgaccctttgcaggaggccccgcggtggtggtagacctgcagcagggccagctgcagccgccaggctgcatccatggtggggcgggggtggatggccagccgaaccacttgctagagggttatcgagctctccttcagagatactgcaggagcttgggaaagggagtacccacccccagccgggcgtctcaccaccagctgctcccgcagcccccggtcctaaagatgggccaggagagactgacgcctttggcaacagcgaaggcaaagagctggtagcgtctggcgaaaacaagatcaagcagggcttattaccatctcttgaggatcttttgttctatactattgcagaaggtcaagaaaagattcccgtgcataagtttattacagcccttaaatcaacaggtctgaggacgagcgacccaagactgaaggagtgtatggatatgctgcgactcaccctccagactacttctgacggtgtcatgctcgataaggatcttttcaagaaatgcgtgcaatcaaacatcgtgcttctaacccaggcctttcggaggaagtttgtcattcccgatttcatgtcgtttacgtcacatattgatgagctgtatgagagcgctaagaagcagagcggcggtaaagtggctgactatataccccagctcgctaaattttcacccgacttgtggggagttagcgtctgcaccgttgacggacaaagacactccacaggtgataccaaagtgcccttttgtctgcaatcctgcgttaaaccacttaagtacgcaatcgccgtaaacgacctcgggactgagtatgtgcatagatatgttggaaaagagcccagcgggctgcgctttaacaagctattcctgaatgaagatgataagccccacaatccaatggtgaatgcaggcgcaattgtcgtaacttcactcattaagcagggagttaataacgcagaaaagtttgattacgtgatgcagttccttaacaaaatggcgggcaacgagtatgtgggcttcagcaacgctacgttccagtccgaacgggagtctggggaccgcaacttcgccatcggatactatctaaaagagaagaagtgctttccagaggggacagatatggtgggcatattggacttctattttcaactttgctccatagaggtgacatgtgagagtgcttccgttatggcggcaaccctggccaatgggggcttctgtcctattacaggagagcgcgttctgtcccctgaagctgttcggaatacactctcactgatgcatagttgtggaatgtacgacttctcgggtcagtttgccttccacgttggcctgccagccaaatcaggagtggccggaggcattctacttgtcgttccaaacgtgatggggatgatgtgctggtcaccacctctcgataaaatgggcaactcagtgaagggcatccacttttgccacgacctagtctcgttgtgcaatttccataattacgataacttgcgccactttgccaagaagctagaccccaggcgggaaggcggagaccagagggtcaaaagcgtgatcaacctgttattcgctgcttatactggagatgtctcagccctgagacgattcgccctgtccgcaatggatatggagcagcgggactatgacagcaggactgcacttcatgttgctgctgctgaaggtcacgtcgaagtcgtcaaattcctactagaggcttgtaaggttaacccattccctaaggaccgctggaacaacacaccaatggacgaggccctccattttggtcatcatgacgtgttcaagatacttcaagagtaccaggtccagtataccccccaaggtgacagcgataacggaaaggagaaccagactgtgcataagaaccttgatggtctgctctag

SEQ ID NO: 183053 - DNA, 525 bp, Artificial Sequence
  derived and/or modified sequence
atgggcatgatgtgctggagcccccccctggacaagatgggcaactctgtaaaggggatccacttctgccacgatttagtttcgctatgcaactttcataactacgacaatttacggcactttgcaaaaaagctcgaccctcggagagagggcggagatcaacgcgtcaagtctgttatcaacctgttgtttgctgcctatacaggggacgtcagtgcacttaggcggttcgcactgtccgcaatggatatggaacagcgcgattatgactctcgcactgccctgcacgtggcagctgcggaggggcatgtggaagttgtcaagttcctgctggaggcctgtaaggtgaatccatttcccaaggatagatggaacaatacccctatggacgaggcactccacttcggccaccatgacgtcttcaagatcctgcaggagtatcaggtgcagtatacccctcaaggcgattcagacaacggtaaggagaaccagaccgtccataagaaccttgatggcctcctgtag

SEQ ID NO: 183054 - DNA, 2010 bp, Artificial Sequence
  derived and/or modified sequence
atgatgaggctgagaggctccggaatgttgcgtgaccttctcctccgatcaccagctggcgtctctgccactctacggagggcgcaacccctcgtgaccctatgtcgcagacccaggggaggtggaagacctgccgcaggccctgcagcagcagctcggctccacccatggtggggcggtgggggttggcctgctgaacctctggcaaggggcctctcttcatctccctcagagattttacaggagctcggtaaagggtcaacacacccccaacccggtgtgagtccacccgctgcccctgctgctcctggtcccaaggacggtcctggcgagacagacgcatttggcaactcagaggggaaggagctagtggccagcggagagaataaaatcaagcagggtctgctgccatcactcgaagacctcctattctacaccatcgccgagggccaggagaaaatccctgttcataaatttattacagcactcaaaagcaccggactgagaaccagcgaccccagactgaaggagtgtatggatatgcttaggctaacgctgcagacaacttcagacggagttatgctcgataaggatctgttcaagaagtgcgtgcagagtaacattgtcctcctcacccaagcatttaggagaaaatttgtgattcctgatttcatgtcctttacctcccatatcgatgaactgtacgaatccgcaaagaaacagtccggagggaaggttgcagattacattccacagttggccaaattcagccccgacctctggggtgtgagcgtatgcactgtggatgggcaacggcactcaaccggggatactaaggtgcccttctgtctgcagagttgtgtaaagcccctgaagtatgccattgcagtgaatgacctcggcaccgagtatgtccacagatatgtgggtaaggaaccctctggccttcgctttaacaaattgtttcttaacgaggatgataagccacacaacccgatggtgaacgcgggagctatcgtggtgacgagtctgatcaagcaaggggtaaataatgctgaaaagtttgattatgtcatgcagtttcttaacaaaatggcgggaaatgaatacgtgggtttctccaatgctacctttcagtcagaaagagagtccggtgaccgtaactttgctatcggctattatctgaaggaaaagaaatgtttccccgagggcaccgatatggtaggaattctggatttttacttccagctgtgtagcatcgaggtcacgtgtgagtccgccagtgtaatggccgctaccctcgctaatggtgggttttgtccaatcactggcgaacgggttctctcacccgaggccgtacgaaacacgctgagccttatgcattcttgtggtatgtatgatttttcgggccagttcgcgttccacgtcggtctgccggctaagtccggagtcgccggtggcattctcctggtggtacccaacgttatggggatgatgtgctggtctcctccactagacaagatgggaaattccgtcaaagggatccatttctgtcacgatctggtctcgttgtgcaacttccataactatgacaatcttcgtcactttgctaaaaaactggaccctcgcagggagggcggtgaccagagagttaaatctgttatcaacttgctttttgctgcttacaccggggatgtgtcagcactgcggcgatttgctctcagcgccatggacatggagcagagagactatgatagccgaacggcactgcacgttgcagccgcagagggccacgtagaagtggtgaagtttctgctcgaagcctgcaaggtaaatccatttcccaaggaccgatggaataacaccccaatggatgaagcgctgcacttcggtcaccacgatgtttttaagatcctgcaggaatatcaggtacaatatacaccacaaggggacagcgataatgggaaggagaatcagacagtacataagaatctggatggtctgctgtag

SEQ ID NO: 183055 - DNA, 525 bp, Artificial Sequence
  derived and/or modified sequence
atgggtatgatgtgctggtctccaccccttgataagatgggtaatagcgtcaagggtatacacttttgtcatgatctagtgtccctctgcaactttcacaattatgataatttgcggcacttcgccaaaaagcttgaccccaggcgtgaggggggagaccagcgcgtgaaatccgttatcaatctgctcttcgccgcttataccggcgacgtatctgctctgagacgcttcgcactgtcggccatggatatggaacaacgtgattacgattctcggacagcactgcacgtcgccgcagccgaaggccacgtggaggtagtgaaattcttgctcgaagcttgcaaggtcaatccctttccaaaggaccggtggaacaataccccgatggatgaggctttgcactttgggcatcacgatgtttttaagatactacaagagtaccaggttcaatacacaccccagggcgactccgataacgggaaggaaaaccagacagtgcacaagaatctggacggcttgctgtag

SEQ ID NO: 183056 - DNA, 2010 bp, Artificial Sequence
  derived and/or modified sequence
atgatgagactgagaggcagcggcatgctgagagacctgctgctgagaagccccgccggcgtgagcgccaccctgagaagagcccagcccctggtgaccctgtgcagaagacccagaggcggcggcagacccgccgccggccccgccgccgccgccagactgcacccctggtggggcggcggcggctggcccgccgagcccctggccagaggcctgagcagcagccccagcgagatcctgcaggagctgggcaagggcagcacccacccccagcccggcgtgagcccccccgccgcccccgccgcccccggccccaaggacggccccggcgagaccgacgccttcggcaacagcgagggcaaggagctggtggccagcggcgagaacaagatcaagcagggcctgctgcccagcctggaggacctgctgttctacaccatcgccgagggccaggagaagatccccgtgcacaagttcatcaccgccctgaagagcaccggcctgagaaccagcgaccccagactgaaggagtgcatggacatgctgagactgaccctgcagaccaccagcgacggcgtgatgctggacaaggacctgttcaagaagtgcgtgcagagcaacatcgtgctgctgacccaggccttcagaagaaagttcgtgatccccgacttcatgagcttcaccagccacatcgacgagctgtacgagagcgccaagaagcagagcggcggcaaggtggccgactacatcccccagctggccaagttcagccccgacctgtggggcgtgagcgtgtgcaccgtggacggccagagacacagcaccggcgacaccaaggtgcccttctgcctgcagagctgcgtgaagcccctgaagtacgccatcgccgtgaacgacctgggcaccgagtacgtgcacagatacgtgggcaaggagcccagcggcctgagattcaacaagctgttcctgaacgaggacgacaagccccacaaccccatggtgaacgccggcgccatcgtggtgaccagcctgatcaagcagggcgtgaacaacgccgagaagttcgactacgtgatgcagttcctgaacaagatggccggcaacgagtacgtgggcttcagcaacgccaccttccagagcgagagagagagcggcgacagaaacttcgccatcggctactacctgaaggagaagaagtgcttccccgagggcaccgacatggtgggcatcctggacttctacttccagctgtgcagcatcgaggtgacctgcgagagcgccagcgtgatggccgccaccctggccaacggcggcttctgccccatcaccggcgagagagtgctgagccccgaggccgtgagaaacaccctgagcctgatgcacagctgcggcatgtacgacttcagcggccagttcgccttccacgtgggcctgcccgccaagagcggcgtggccggcggcatcctgctggtggtgcccaacgtgatgggcatgatgtgctggagcccccccctggacaagatgggcaacagcgtgaagggcatccacttctgccacgacctggtgagcctgtgcaacttccacaactacgacaacctgagacacttcgccaagaagctggaccccagaagagagggcggcgaccagagagtgaagagcgtgatcaacctgctgttcgccgcctacaccggcgacgtgagcgccctgagaagattcgccctgagcgccatggacatggagcagagagactacgacagcagaaccgccctgcacgtggccgccgccgagggccacgtggaggtggtgaagttcctgctggaggcctgcaaggtgaaccccttccccaaggacagatggaacaacacccccatggacgaggccctgcacttcggccaccacgacgtgttcaagatcctgcaggagtaccaggtgcagtacaccccccagggcgacagcgacaacggcaaggagaaccagaccgtgcacaagaacctggacggcctgctgtag

SEQ ID NO: 183057 - DNA, 525 bp, Artificial Sequence
  derived and/or modified sequence
atgggcatgatgtgctggagcccccccctggacaagatgggcaacagcgtgaagggcatccacttctgccacgacctggtgagcctgtgcaacttccacaactacgacaacctgagacacttcgccaagaagctggaccccagaagagagggcggcgaccagagagtgaagagcgtgatcaacctgctgttcgccgcctacaccggcgacgtgagcgccctgagaagattcgccctgagcgccatggacatggagcagagagactacgacagcagaaccgccctgcacgtggccgccgccgagggccacgtggaggtggtgaagttcctgctggaggcctgcaaggtgaaccccttccccaaggacagatggaacaacacccccatggacgaggccctgcacttcggccaccacgacgtgttcaagatcctgcaggagtaccaggtgcagtacaccccccagggcgacagcgacaacggcaaggagaaccagaccgtgcacaagaacctggacggcctgctgtag

SEQ ID NO: 183058 - protein, 755 aa, Artificial Sequence
  derived and/or modified sequence
MAGCIPEEKTYRRFLELFLGEFRGPCGGGEPEPEPEPEPEPEPESEPEPEPELVEAEAAEASVEEPGEEAATVAATEEGDQEQDPEPEEEAAVEGEEEEEGAATAAAAPGHSAVPPPPPQLPPLPPLPRPLSERITREEVEGESLDLCLQQLYKYNCPSFLAAALARATSDEVLQSDLSAHYIPKETDGTEGTVEIETVKLARSVFSKLHEICCSWVKDFPLRRRPQLYYETSIHAIKNMRRKMEDKHVCIPDFNMLFNLEDQEEQAYFAVFDGHGGVDAAIYASIHLHVNLVRQEMFPHDPAEALCRAFRVTDERFVQKAARESLRCGTTGVVTFIRGNMLHVAWVGDSQVMLVRKGQAVELMKPHKPDREDEKQRIEALGGCVVWFGAWRVNGSLSVSRAIGDAEHKPYICGDADSASTVLDGTEDYLILACDGFYDTVNPDEAVKVVSDHLKENNGDSSMVAHKLVASARDAGSSDNITVIVVFLRDMNKAVNVSEESDWTENSFQGGQEDGGDDKENHGECKRPWPQHQCSAPADLGYDGRVDSFTDRTSLSPGSQINVLEDPGYLDLTQIEASKPHSAQFLLPVEMFGPGAPKKANLINELMMEKKSVQSSLPEWSGAGEFPTAFNLGSTGEQIYRMQSLSPVCSGLENEQFKSPGNRVSRLSHLRHHYSKKWHRFRFNPKFYSFLSAQEPSHKIGTSLSSLTGSGKRNRIRSSLPWRQNSWKGYSENMRKLRKTHDIPCPDLPWSYKIE

SEQ ID NO: 183059 - protein, 606 aa, Artificial Sequence
  derived and/or modified sequence
LRQCYNYNCPSFLAAALARATSDEVLQSDLSAHYIPKETDGTEGTVEIETVKLARSVFSKLHEICCSWVKDFPLRRRPQLYYETSIHAIKNMRKLFYKHISKKKKKRKKRDWDQEEQAYFAVFDGHGGVDAAIYASIHLHVNLVRQEMFPHDPAEALCRAFRVTDERFVQKAARESLRCGTTGVVTFIRGNMLHVAWVGDSQVMLVRKGQAVELMKPHKPDREDEKQRIEALGGCVVWFGAWRVNGSLSVSRAIGDAEHKPYICGDADSASTVLDGTEDYLILACDGFYDTVNPDEAVKVVSDHLKENNGDSSMVAHKLVASARDAGSSDNITVIVVFLRDMNKAVNVSEESDWTENSFQGGQEDGGDDKENHGECKRPWPQHQCSAPADLGYDGRVDSFTDRTSLSPGSQINVLEDPGYLDLTQIEASKPHSAQFLLPVEMFGPGAPKKANLINELMMEKKSVQSSLPEWSGAGEFPTAFNLGSTGEQIYRMQSLSPVCSGLENEQFKSPGNRVSRLSHLRHHYSKKWHRFRFNPKFYSFLSAQEPSHKIGTSLSSLTGSGKRNRIRSSLPWRQNSWKGYSENMRKLRKTHDIPCPDLPWSYKIE

SEQ ID NO: 183060 - DNA, 1821 bp, Artificial Sequence
  derived and/or modified sequence
ctgagacagtgctacaactacaactgccccagcttcctggccgccgccctggccagagccaccagcgacgaggtgctgcagagcgacctgagcgcccactacatccccaaggagaccgacggcaccgagggcaccgtggagatcgagaccgtgaagctggccagaagcgtgttcagcaagctgcacgagatctgctgcagctgggtgaaggacttccccctgagaagaagaccccagctgtactacgagaccagcatccacgccatcaagaacatgagaaagctgttctacaagcacatcagcaagaagaagaagaagagaaagaagagagactgggaccaggaggagcaggcctacttcgccgtgttcgacggccacggcggcgtggacgccgccatctacgccagcatccacctgcacgtgaacctggtgagacaggagatgttcccccacgaccccgccgaggccctgtgcagagccttcagagtgaccgacgagagattcgtgcagaaggccgccagagagagcctgagatgcggcaccaccggcgtggtgaccttcatcagaggcaacatgctgcacgtggcctgggtgggcgacagccaggtgatgctggtgagaaagggccaggccgtggagctgatgaagccccacaagcccgacagagaggacgagaagcagagaatcgaggccctgggcggctgcgtggtgtggttcggcgcctggagagtgaacggcagcctgagcgtgagcagagccatcggcgacgccgagcacaagccctacatctgcggcgacgccgacagcgccagcaccgtgctggacggcaccgaggactacctgatcctggcctgcgacggcttctacgacaccgtgaaccccgacgaggccgtgaaggtggtgagcgaccacctgaaggagaacaacggcgacagcagcatggtggcccacaagctggtggccagcgccagagacgccggcagcagcgacaacatcaccgtgatcgtggtgttcctgagagacatgaacaaggccgtgaacgtgagcgaggagagcgactggaccgagaacagcttccagggcggccaggaggacggcggcgacgacaaggagaaccacggcgagtgcaagagaccctggccccagcaccagtgcagcgcccccgccgacctgggctacgacggcagagtggacagcttcaccgacagaaccagcctgagccccggcagccagatcaacgtgctggaggaccccggctacctggacctgacccagatcgaggccagcaagccccacagcgcccagttcctgctgcccgtggagatgttcggccccggcgcccccaagaaggccaacctgatcaacgagctgatgatggagaagaagagcgtgcagagcagcctgcccgagtggagcggcgccggcgagttccccaccgccttcaacctgggcagcaccggcgagcagatctacagaatgcagagcctgagccccgtgtgcagcggcctggagaacgagcagttcaagagccccggcaacagagtgagcagactgagccacctgagacaccactacagcaagaagtggcacagattcagattcaaccccaagttctacagcttcctgagcgcccaggagcccagccacaagatcggcaccagcctgagcagcctgaccggcagcggcaagagaaacagaatcagaagcagcctgccctggagacagaacagctggaagggctacagcgagaacatgagaaagctgagaaagacccacgacatcccctgccccgacctgccctggagctacaagatcgagtag

SEQ ID NO: 183061 - DNA, 2268 bp, Artificial Sequence
  derived and/or modified sequence
atggcaggctgtatacctgaagaaaagacctatcgccgctttctggagctgttccttggcgaattcaggggcccctgcggcggcggggagcctgaacccgagcccgagccggaaccagagccagagcccgagagcgagccagagcctgagccagagttagtggaggctgaagctgccgaggccagtgtagaggagccaggagaagaggcggccacagtggccgctaccgaagagggggaccaagaacaggatccagaacctgaggaggaggctgccgtggaaggagaagaggaggaggagggcgccgcgactgccgcagctgcacctgggcattccgcggtcccccctcccccccctcagctccctcccctgccccctctgccccggcccctctccgaacggattactcgcgaagaggtggagggcgagtcccttgatctctgcttgcaacagctgtataaatacaattgcccatcattcttggcggcggcattagcccgggcgaccagcgatgaagtcctccagtccgacctgagtgcccactacatacccaaggagaccgacggcaccgaaggcacggttgaaatcgagactgtcaaactggctcgctctgttttctccaagctccacgaaatctgctgctcttgggtgaaagacttcccactgaggcgtcgaccacagctctactacgagacttccatccatgccatcaaaaatatgaggagaaagatggaggacaagcacgtgtgcatcccggactttaatatgctgtttaatctcgaggaccaggaggaacaagcatatttcgctgtctttgatggacatgggggggtcgatgctgcaatctacgcttctatccacctgcacgtgaaccttgttcggcaggagatgtttccacacgatcccgcagaagctttgtgtagagccttcagagtgactgacgagagattcgtgcaaaaagctgctagggagagcctgagatgcggtacaactggcgtggtgactttcattcgtggcaacatgctccacgtcgcgtgggtgggcgacagccaggtcatgttagtgcggaagggtcaggccgttgaactgatgaaacctcacaaaccagatcgcgaagatgaaaagcaacgaatagaggcgcttggcggctgtgttgtttggttcggtgcatggcgagtcaacgggtcgctttcagtgtcacgtgccattggggacgctgagcataagccatacatttgcggggatgccgactctgctagtactgtacttgatgggactgaggattatcttattctcgcctgcgatggtttttatgacactgtcaaccctgatgaagcagtgaaagtggtgagcgaccacctaaaggaaaacaatggcgatagcagtatggtagcccataagctcgtggcatctgctagggacgcgggaagctccgacaatatcacagtcattgtcgtttttctgcgtgatatgaacaaagccgtgaacgttagcgaggagagtgattggacagagaacagtttccagggcggtcaagaggacggtggggacgacaaggaaaatcatggcgagtgtaagcgcccctggccacagcaccagtgttccgccccagctgaccttggatacgacggcagggtagacagtttcaccgatcggacttctttaagccctgggtcccagattaatgtgctggaagacccagggtacctggacctgacacagatcgaggcaagtaagccccactccgcacaattcctcctgccagtggagatgttcggccccggagctcccaaaaaggccaacctgatcaacgaattgatgatggaaaagaagagtgtgcaaagctcccttcccgagtggtccggcgctggggagtttcctactgcctttaatcttggtagcacaggggaacagatctatcggatgcagtctctgagcccagtatgtagcggactggagaacgagcagtttaaatcgccaggaaatagggtgtcacgattgagccacttgcgtcaccattatagcaaaaaatggcatagatttagattcaaccctaaattttattcttttctgagtgcccaagaacctagtcacaagattggtacatcattatcctctctcacaggctccgggaagcggaatcgaattagatcaagcctcccctggaggcagaacagctggaaagggtattccgaaaacatgaggaagctccgaaaaactcatgacatcccatgcccggatttgccatggagttacaaaatcgaatag

SEQ ID NO: 183062 - DNA, 1821 bp, Artificial Sequence
  derived and/or modified sequence
ctccgtcagtgttacaattataactgcccttcctttctcgccgcagctttggctcgcgcaacatcagacgaagttcttcaaagcgacctgtccgctcactatattccgaaggagaccgacggaaccgagggtacagtcgagatcgagacagtaaaactggccaggtccgtattctcgaagctgcatgagatctgctgttcttgggtgaaggactttcccctacggaggcggccccaactgtactacgaaacctctatccacgcgattaagaacatgcgcaagctcttttacaagcacatttccaaaaagaagaaaaaaagaaagaaacgcgattgggatcaggaggagcaggcttacttcgccgtgttcgatgggcatggaggtgtggatgctgccatttatgcatcaatacacctacatgtcaatctggtgcgccaggagatgttcccacacgatccagctgaggctctgtgccgcgccttcagggtaaccgatgaacgattcgtccagaaagcagcacgggaatctctgagatgtggaaccaccggcgtcgttactttcatacggggtaatatgttgcacgtggcatgggttggggattcccaagtgatgctggtgaggaaaggtcaagctgtggaactgatgaaaccccataaacctgaccgagaggacgagaagcaacggatcgaagccctaggcggctgcgtggtttggttcggcgcatggagggtcaacggatctctctcagtatctagggcaattggagatgccgaacacaagccctacatttgcggagacgcggattcagcgtccaccgtcctggacggaacggaagactacctcattttagcctgcgatgggttctacgatacagtgaatcctgatgaggcggtaaaagtcgtatctgaccatttaaaagagaacaatggtgactcatccatggtggctcacaaacttgtggctagcgctcgcgatgccggtagctctgataatattaccgtgatcgtcgtgtttttaagagacatgaacaaagccgtgaacgtgtcggaggagtccgactggacagagaatagctttcaggggggccaagaggacggtggagatgataaggaaaatcacggtgagtgcaagcgcccgtggccacaacaccaatgctcggctccggctgatctgggctatgacgggagagtcgatagctttacagacagaacatctctgagtccagggagccaaattaatgttctggaggatcccgggtaccttgacctcacccagatcgaggccagcaaaccccatagtgctcagttcctcctgcctgtagaaatgtttggccctggagctcccaagaaagccaatctgataaatgaacttatgatggagaagaaatccgtgcaatcatcgctccctgaatggtctggcgctggagagttcccgacggctttcaacctcggttctactggcgaacagatctataggatgcagtccctgtccccggtctgctccggcctcgaaaatgagcaatttaaatcgcccggaaaccgggtgagcaggcttagtcatctgcggcaccattactctaagaaatggcaccggtttaggttcaatccaaaattttactcattcctgagcgcccaagaaccgtctcacaagatcggaacctccctgtcttctctcacagggagtgggaaacgcaataggattcggtcctctttgccttggagacagaacagttggaagggctactcggagaatatgagaaagcttcgaaaaactcatgacatcccttgtcccgacctcccttggtcatataaaatagagtag

SEQ ID NO: 183063 - DNA, 2268 bp, Artificial Sequence
  derived and/or modified sequence
atggccggctgcatccctgaggagaagacctaccgccgcttcctggagctgttcctgggggagttccggggcccctgtggcggcggggagcctgagcctgagcctgagcctgagcctgagcctgagcctgagagcgagcctgagcctgagcctgagctggtggaggccgaggccgctgaggcctctgtggaggagcccggggaggaggccgccaccgtggccgccacagaggagggggaccaggagcaggaccctgagcctgaggaggaggccgctgtggagggggaggaggaggaggagggcgccgccacagctgctgctgcccctggccacagcgctgtgcccccacctccaccccagctgccccccctgccccccctgccccggcccctgtctgagcgcatcacccgggaggaggtggagggggagagcctggacctgtgcctgcagcagctgtacaagtacaactgccccagcttcctggccgccgccctggcccgggccaccagtgatgaggtgctgcagagcgacctgagcgcccactacatccccaaggagacagatggaacagagggcaccgtggagattgagaccgtgaagctggcccggagcgtcttcagcaagctgcacgagatctgctgctcctgggtgaaggacttccccctgcggcggcggccccagctgtactatgagaccagcatccacgccatcaagaacatgaggaggaagatggaggacaagcacgtgtgcatcccagacttcaacatgctgttcaacctggaggaccaggaggagcaggcctactttgctgtgtttgatggccatggaggagtggatgctgccatctatgccagcatccacctgcacgtgaacctggtgcggcaggagatgttcccccatgaccctgctgaggccctgtgccgggccttccgggtgacagatgaaagatttgtgcagaaggccgcccgggagagcctgcgctgtggcaccactggagtggtgaccttcatccggggcaacatgctgcacgtggcctgggtgggggacagccaggtgatgctggtgaggaagggccaggccgtggagctgatgaagccccacaagccagaccgggaggatgagaagcagagaattgaggccctgggcggctgtgtggtgtggtttggagcctggagggtgaatggcagcctgtctgtgtcccgggccatcggagatgctgagcacaagccctacatctgtggagatgctgacagcgccagcacagtgctggatggaacagaggactacctgatcctggcctgtgatggcttctatgacacagtgaacccagatgaggccgtgaaggtggtgtctgaccacctgaaggagaacaacggggacagctccatggtggcccacaagctggtggccagcgccagagatgctggcagcagtgacaacatcaccgtcatcgtggtgttcctgcgggacatgaacaaggctgtgaatgtgtctgaggagagtgactggacagaaaattccttccagggcggccaggaggatggaggagatgacaaggagaaccacggggagtgcaagaggccctggccccagcaccagtgcagcgccccagctgacctgggctatgatggccgggtggacagcttcacagacaggaccagcctgagccctggcagccagatcaacgtgctggaggaccccggctacctggacctgacccagatcgaggccagcaagccccacagcgcccagttcctgctgcctgtggagatgtttggacctggggcccccaagaaggccaacctgatcaatgagctgatgatggagaagaagtctgtgcagagcagcctgcctgagtggagcggggccggggagttccccacagccttcaacctgggcagcactggagagcagatctacaggatgcagagcctgagccctgtgtgcagcggcctggagaatgagcagttcaagagccctggcaacagagtgtcccggctgagccacctgcggcaccactacagcaagaagtggcaccgcttccgcttcaaccccaagttctacagcttcctgagcgcccaggagcccagccacaagattggcaccagcctgagcagcctgaccggcagcggcaagaggaaccgcatccgcagcagcctgccctggaggcagaacagctggaagggctacagcgagaacatgaggaagctgaggaagacccatgacatcccctgcccagacctgccctggagctacaagattgaatag

SEQ ID NO: 183064 - DNA, 1821 bp, Artificial Sequence
  derived and/or modified sequence
ctgcggcagtgctacaactacaactgccccagcttcctggccgccgccctggcccgggccaccagtgatgaggtgctgcagagcgacctgagcgcccactacatccccaaggagacagatggaacagagggcaccgtggagattgagaccgtgaagctggcccggagcgtcttcagcaagctgcacgagatctgctgctcctgggtgaaggacttccccctgcggcggcggccccagctgtactatgagaccagcatccacgccatcaagaacatgaggaagctgttctacaagcacatcagcaagaagaagaagaagaggaagaagagggactgggaccaggaggagcaggcctactttgctgtgtttgatggccacggcggcgtggatgctgccatctatgccagcatccacctgcacgtgaacctggtgcggcaggagatgttcccccatgaccctgctgaggccctgtgccgggccttccgggtgacagatgaaagatttgtgcagaaggccgcccgggagagcctgcgctgtggcaccaccggggtggtgaccttcatccggggcaacatgctgcacgtggcctgggtgggggacagccaggtgatgctggtgaggaagggccaggccgtggagctgatgaagccccacaagccagacagagaagatgagaagcagagaattgaggccctgggcggctgtgtggtgtggtttggagcctggagggtgaatggcagcctgtctgtgtcccgggccatcggagatgctgagcacaagccctacatctgtggagatgctgacagcgccagcacagtgctggatggaacagaggactacctgatcctggcctgtgatggcttctatgacacagtgaacccagatgaagctgtgaaggtggtgtctgaccacctgaaggaaaataatggagacagctccatggtggcccacaagctggtggccagcgccagagatgctggcagcagtgacaacatcaccgtgattgtggtgttcctgcgggacatgaacaaggctgtgaatgtgtctgaggagagtgactggacagagaacagcttccagggcggccaggaggatggaggagatgacaaggaaaatcatggagagtgcaagaggccctggccccagcaccagtgcagcgccccagctgacctgggctatgatggccgggtggacagcttcacagacaggaccagcctgagccctggcagccagatcaacgtgctggaggaccccggctacctggacctgacccagatcgaggccagcaagccccacagcgcccagttcctgctgcctgtggagatgtttggacctggggcccccaagaaggccaacctgatcaatgagctgatgatggagaagaagtctgtgcagagcagcctgcctgagtggagcggggccggggagttccccacagccttcaacctgggcagcactggagagcagatctacaggatgcagagcctgagccctgtgtgcagcggcctggagaatgagcagttcaagagccctggcaacagagtgtcccggctgagccacctgcggcaccactacagcaagaagtggcaccgcttccgcttcaaccccaagttctacagcttcctgagcgcccaggagcccagccacaagattggcaccagcctgagcagcctgactggaagtggcaagaggaaccgcatccgcagcagcctgccctggaggcagaacagctggaagggctacagcgagaacatgaggaagctgaggaagacccatgacatcccctgcccagacctgccctggagctacaagattgaatag

SEQ ID NO: 183065 - DNA, 2268 bp, Artificial Sequence
  derived and/or modified sequence
atggccggctgcatccccgaggagaagacctaccggcggttcctggaactctttttaggcgaattcaggggtccctgcgggggaggtgaaccggagcccgagccagaacccgagccagaacctgagcccgagagcgaaccagaacctgagccagagttagtggaagccgaggccgccgaggcctccgtggaggagccaggtgaggaggcagcgaccgttgccgccacagaagaaggcgaccaggaacaggaccctgagccggaagaagaagctgcagttgaaggagaagaggaggaagaaggggcggccacagctgctgctgccccaggccacagcgccgtacctcccccaccaccccagctgccacctctcccccccttgcctcggcccctgtcggagcgcatcacacgcgaggaagtggaaggggaatcattggatttgtgcttacaacagttatacaaatataattgccccagctttctcgcggccgctctcgctagggccaccagcgacgaggtactccaatcagatctctccgcccactatatccctaaagagacggatggaacagagggtaccgtggaaatcgagactgtgaaactcgcccgcagtgtattctcgaaactgcatgaaatttgttgtagttgggtcaaggattttcctctccgccggaggccccaactatattatgagacatctatccacgctataaagaacatgaggagaaagatggaggacaagcacgtgtgcatacctgacttcaacatgttgtttaatctggaagatcaggaggagcaggcctactttgccgttttcgacggtcatggcggtgtagatgcggcaatctacgcctcaattcatctccacgtgaatctggttagacaagaaatgttccctcatgatccagccgaagctctctgcagggcctttagggttactgatgaacgctttgtccagaaggccgctcgggagagtctgagatgtggaacaacaggcgtcgtgacatttatcaggggaaatatgctacacgtggcatgggttggtgactcgcaggtgatgctcgtgcgcaaggggcaggcagttgagctcatgaaaccccataaaccagacagagaagacgagaagcaacgcatcgaagcgctgggcggctgcgtggtatggtttggtgcctggcgcgttaatgggagcttgagcgtaagccgagccattggggacgctgagcataaaccatacatatgcggcgacgccgattccgccagtacagtccttgatggcactgaggactacctaattttagcctgcgacggattttacgataccgtcaaccccgatgaggccgttaaggtggtcagcgaccatctgaaagagaataacggcgactcatcaatggttgctcataagctcgtggcgtcggcaagagatgccggcagctccgataacataacagtgatcgttgtgttcttgcgcgacatgaataaagcagtgaacgtgagcgaagagtctgactggactgagaactccttccagggcggccaggaagacggaggcgacgataaagaaaatcacggagagtgcaagcgaccctggccgcagcaccaatgcagtgcaccagcagacttgggttacgacgggagagtggatagcttcaccgaccgcactagcctttcaccaggctcccaaatcaacgtgctggaggatccggggtacttggacttgacccagattgaagccagcaagcctcacagtgcgcaatttttgctgccagtcgaaatgttcgggccgggggcaccaaagaaggcgaacctgataaatgagttgatgatggagaagaaatcagttcagagcagcctgcctgagtggtcgggcgccggagagtttccaacagccttcaacctgggatccactggcgagcagatctataggatgcagtccctgtcccctgtttgctctggtctagagaatgagcagtttaaatccccggggaatcgggtgagtaggttgtcacatttaaggcaccattactccaaaaagtggcatcgttttcgcttcaaccctaagttctattcattcctctccgcgcaggaacccagccacaagatcggaacttctctaagctctctgactggaagcggtaagcggaatcggattaggtcatccctgccatggcgccagaactcctggaagggctattcagagaacatgcgcaagttgagaaaaactcacgacataccttgcccagatctcccatggtcatacaaaatagaatag

SEQ ID NO: 183066 - DNA, 1821 bp, Artificial Sequence
  derived and/or modified sequence
ctgcggcagtgctacaactacaactgccccagcttcctggccgccgccctggctagggcaactagcgatgaagtcttacaaagcgacttgtccgcacattacatccctaaagagaccgatggcactgagggcactgtcgagattgagacggtcaagctagcacggtccgtcttcagcaagctccatgaaatttgctgctcttgggtcaaagacttcccactgcggcggagaccccaactctactacgagacatctatccacgctataaagaatatgcgcaagctgttctataaacatatctctaagaaaaagaaaaagaggaaaaagcgtgactgggaccaagaagaacaggcctattttgcagtgttcgatggccacggaggagtcgatgccgccatctatgctagtatacaccttcacgtgaacttggtgcgccaggaaatgttcccacatgatcctgccgaggctctgtgtcgggctttccgagtgaccgatgaacggttcgtgcagaaagccgcaagggaatcattaaggtgtggcacaacgggtgttgtaacttttattcgtggaaacatgctccatgtggcatgggtgggtgacagccaggtaatgctcgtgagaaagggccaagccgtggaactcatgaaaccccacaagccggatagggaagatgagaagcagagaatagaggcactcggtgggtgtgttgtgtggttcggcgcatggagagttaatgggtcactctcggtatctcgcgcaattggagacgcagagcacaagccctacatctgtggcgatgcagactcggcctccacggtcctcgatggaacggaagattacctcattctggcgtgcgacgggttttacgacacggtaaacccggacgaggctgtgaaggtcgtgtctgaccatcttaaagagaacaacggggattctagcatggttgctcataagctagtcgcctcagccagggacgcgggttcctctgataatatcacggtgatcgtcgttttcttaagggacatgaacaaagcggtgaacgtgagtgaggaatccgactggacagagaacagcttccagggtggccaggaggatggaggggacgacaaggagaatcatggtgaatgcaaacgaccttggccgcaacaccagtgttcggcacccgcggacttgggatatgacggtcgcgtagacagctttaccgatcgcacctctctgtcccctggttcacaaataaatgttctcgaggaccccggctacctcgatcttacccagatcgaagcaagcaagccgcattctgctcagttcttgctgccagtggaaatgttcggccctggagcacccaagaaggccaacctgatcaatgagcttatgatggaaaagaagtctgttcaaagttctctgcctgaatggtctggagcaggagaattcccaaccgcattcaacctcgggtctaccggagagcaaatctaccggatgcagtccctatcacccgtctgttcaggcttggaaaatgagcagtttaagtctcctggtaatcgcgtgtctcgtttaagccacttacggcaccattacagtaagaagtggcacaggtttagatttaatccaaaattttattcattcctcagtgctcaggagcctagccacaagattggaacctctctgtcttctttgacaggatcagggaaacggaaccggatccgctcatccctaccttggagacagaactcctggaagggttattcggagaacatgcgcaagctccggaaaactcacgatattccttgccctgacttgccatggtcctataaaatcgaatag

SEQ ID NO: 183067 - DNA, 2268 bp, Artificial Sequence
  derived and/or modified sequence
atggcgggatgcatccccgaggaaaagacctatcgcaggttccttgagttattcctgggggagttcagaggtccatgcggcggaggagaacccgaacccgaacctgagcctgagccggagccagaacctgaatcagaaccggaacctgaaccggagctggtagaagcggaggccgctgaagcaagcgtggaggagcccggtgaggaagctgccaccgtagccgcaacggaagaaggagatcaggagcaagatcctgaaccagaagaggaggccgcagttgaaggggaagaagaagaagagggggctgccactgccgcagcagcgcctggacattcagcagtgccccctccccctccacaactccctcccttgcccccactcccacggcctctatccgagcggattactcgcgaggaggtggagggcgagagcctggatctctgcctccaacaattatataagtacaattgcccctcatttctggccgcagctctggcgagagctacgagcgatgaggtactgcaatccgacctgtccgcacactacattcccaaagaaacggacggcactgagggtaccgtggagattgagaccgttaaactcgcccgatcagtattttccaaactgcatgaaatatgctgcagttgggtgaaggattttcccctgaggagacgcccacagctgtactacgagaccagtatccacgctatcaaaaacatgcggaggaagatggaggacaaacacgtgtgtatcccggacttcaacatgttgtttaatcttgaggatcaggaggaacaagcctactttgctgtgttcgatgggcatggcggtgtggatgctgcgatctacgctagtattcacctgcatgtcaacctcgtgaggcaagaaatgtttccacacgatcccgcagaggctctatgtagagccttcagggtgaccgacgaacgcttcgtgcagaaagcagccagggagtcactcaggtgtggcacaaccggagtggttacgtttatccgcggaaacatgctgcacgttgcctgggtgggggattctcaagtcatgttggttagaaagggccaggcagttgaactgatgaaaccccacaagccagacagagaagatgaaaagcagaggatcgaggcgttgggaggctgtgtcgtctggttcggcgcatggcgggtgaatggctccctctcagttagtcgggctattggcgatgcagaacacaagccatacatttgcggagacgccgattccgccagtaccgtgttggacggaacggaagactatttgatcctcgcctgtgacggtttctatgacaccgtgaatccagacgaggcagtgaaagtggtctctgaccacttgaaagagaacaatggcgacagctcgatggtcgcacacaaattggtggcctctgccagggacgccggttcctccgataatatcaccgtgatcgtggtttttctgcgagacatgaacaaggcagtgaatgtgagtgaagaatctgactggacggaaaatagtttccaggggggacaggaagacggaggcgatgataaagagaatcacggtgagtgtaaaagaccctggcctcagcaccaatgctctgctcccgcagatcttggttatgatgggcgagtggactcctttacagaccgcacaagcctgagcccagggagccagattaacgtccttgaggacccaggttatttggacctaactcaaatcgaggcctcaaaacctcattcagcccaattcctcctgcccgttgagatgttcggacccggtgcgccaaagaaagcgaatctcattaacgagcttatgatggaaaagaagtcagtccagtcttcactgcctgaatggtccggagctggcgagttccctaccgcatttaacctaggaagcacaggggaacagatctataggatgcagtccctatccccagtctgttccgggctcgagaatgaacagttcaaatcaccagggaaccgagtgtctcgactgtcccatctgagacaccattattccaaaaagtggcatcgcttccggtttaaccctaaattctattccttcctctccgcacaggaaccttctcataaaatcggtacctcactctcttcattgaccggttctggcaagagaaatcgaattcgctcttccttgccatggagacagaactcgtggaaaggctactccgagaatatgaggaagctccggaagacacacgacatcccctgcccagatctgccatggtcatataagattgagtag

SEQ ID NO: 183068 - DNA, 1821 bp, Artificial Sequence
  derived and/or modified sequence
ctgcggcaatgttataactataattgcccaagctttcttgctgccgcattggcacgggcaacaagcgatgaggttctgcagagcgacctgagtgcgcattatatccccaaagagaccgatggcacagaaggcactgttgaaattgagacagttaagctggctcgcagtgtcttctcgaagttgcacgagatttgttgctcctgggtaaaggattttcctctacgacgccgtcctcagctatactacgaaaccagtattcatgctattaaaaatatgagaaagctcttctacaaacacatctccaaaaagaagaaaaagcgcaaaaagagagattgggaccaggaagagcaggcttacttcgcagtgttcgacggtcacgggggagtggacgctgcgatttatgcgagcatacatctgcacgtcaacctcgtccgtcaagagatgtttccccacgaccccgctgaggctctgtgccgggcattccgtgtgactgacgagcgtttcgtccagaaggcagcaagggaaagtctgaggtgcggtacaacaggagttgttacttttataaggggcaacatgctccacgtggcttgggtaggtgactcgcaggtgatgttagtgcgaaaggggcaggcggtggaactgatgaagccccacaagcccgacagagaggatgaaaagcagaggatcgaggcactggggggatgtgtggtgtggttcggcgcatggagagtgaatggaagcttaagcgtcagtagagcaattggtgacgccgaacataagccctacatctgcggcgacgccgacagcgcatctacagtgctcgacggaacagaagactatcttattctggcgtgcgacgggttttacgacaccgtcaatcccgacgaggctgtgaaggtggtgagcgaccatttaaaagaaaacaacggcgattctagtatggtagcacataagctggtcgcttctgccagggacgccggaagctccgataatatcacggtcatcgttgtattcttgcgcgacatgaataaagccgtcaacgtgtcagaagagtcagattggactgaaaacagtttccagggaggtcaggaagacggaggagatgataaggaaaaccatggggagtgtaaaagaccatggccacaacaccagtgtagtgcacctgcagacctggggtacgatgggagggtcgactcctttaccgataggacttccctctctcccggatctcaaatcaatgttctcgaggatccgggatatctcgaccttacacagatcgaggcgagtaaaccgcattccgcccagttccttctgccagtggaaatgttcggtccaggtgccccaaaaaaggcgaacttgataaatgagcttatgatggagaagaaaagtgtccaaagtagtttaccggaatggtccggcgcaggcgaatttcccacagccttcaacctcggaagcacaggggaacaaatttatcggatgcagtctttgtccccagtttgttcagggctggagaacgagcagtttaagagccctgggaatagggtttctaggctgtctcaccttcggcaccactactctaagaagtggcaccgtttcagattcaatcccaaattctactccttcctgtccgcccaggagccatcacataaaatcggcacctccctgagcagcctgacaggcagtggaaagaggaaccgtatccgcagctcattgccgtggcgccaaaattcttggaaagggtactccgagaatatgagaaagcttaggaagacacacgatatcccttgtccagatcttccttggagctataaaattgaatag

SEQ ID NO: 183069 - DNA, 5961 bp, Artificial Sequence
  derived and/or modified sequence
ttgagacaatgttataattataattgcccttcctttttggctgctgctttagccagagccacatcagatgaagtccttcagagtgatctttctgcacattatatcccaaaggaaacggatggcacagaagggactgtggagattgagacagtgaaattggcccgttctgtcttcagcaaactacacgagatttgctgcagctgggtgaaagacttccccctccgcaggagaccccagctttattatgagacatcaatccatgccatcaaaaacatgcgcaagctattctataaacatataagcaaaaaaaaaaaaaaaagaaagaaaagagattgggaccaggaagaacaagcttactttgcagtgtttgatggccatgggggagtagatgctgctatttatgcctccattcacctccacgttaacttagtccgccaggagatgttcccccatgatcctgctgaggccctgtgcagggccttccgggtcactgatgagcggtttgtgcagaaagcagccagggagagcttaagatgtgggaccacaggagtggtgactttcatcagaggcaacatgctacatgtggcctgggtgggtgattcccaggttatgcttgtgagaaagggccaagctgttgaactaatgaagccacacaaaccagacagagaggatgaaaagcagagaattgaggcccttggaggttgcgtagtctggtttggtgcctggagggtgaatggaagtctgtcggtttccagagctattggagatgctgaacataagccatatatctgtggggatgcagattctgcctccactgttctggatgggaccgaagactacctcattctggcctgtgatggcttctatgacaccgtgaaccctgatgaggcagtgaaagttgtgtccgaccacctgaaagagaataatggagacagcagcatggttgcccacaaattagtggcatcagctcgtgatgctgggtcaagtgataacatcacggttattgtggtattcctgagggacatgaacaaagctgtaaatgttagtgaggaatcagattggacagagaactcttttcaaggagggcaagaagatggtggggatgataaggagaatcatggagagtgcaaacgcccttggcctcagcaccagtgctcagcaccagccgacctaggctatgatgggcgtgtggattcattcactgatagaactagcctgagcccagggtcccaaatcaacgtgctggaagacccaggctacctagatctcacacaaatagaagcaagcaaacctcacagtgcccagtttttgctaccagttgagatgtttggtcctggtgcaccaaagaaagcaaatcttattaatgagttaatgatggagaaaaaatcagttcagtcatcattgcctgaatggagtggtgctggagagtttcccactgctttcaatttgggttcaacaggggagcagatatacagaatgcagagcttgtctcctgtctgttcagggttggaaaatgaacagttcaaatccccgggaaacagagtttctagattgtctcatttacgccaccactactcaaagaagtggcacagattcaggtttaatccaaagttttattcatttctctctgctcaagagccttcccacaaaataggcactagcctgtcctcacttactggaagtgggaagagaaataggataagaagttctctgccatggaggcaaaatagttggaaagggtacagtgaaaacatgaggaagctcagaaagactcatgatattccatgcccagatcttccttggagctataaaatagaataatttttctttcaagtaggttagctagctctcccccaataaaaataccactatcagagtagaaacaaggtagacatttctaaaacatatgtgcttcattatgaatccatggatggctcaattcttaaatgtaaatagatctctaggaaactcaaagtacagtgttttcaatctaaaaagaagtattggcagtttcacttgcaaaattacacagctggtccctgtgatgtgtctcgacaccaatacacaacccccttcccaccatccttcatgtcactagatacacaacccccttcccaccatcccttcagtcactagtggaagctttcaagttagttatttcagtcaggatatacagtgttgaaatctcaatgcagttgaaatctggtctgatgtgcctaatttatctgtggaaaatttaatgctgaattacatttggttgggaaatgtccctcaaaatcctgggcactatgaaggaaccccctgccccctcacctttttgggtaggtaaaagactaaaagccatatggattttaactgataacaatgaaagtggtaaatcagtgtaaaagtgtcatattctcagacttgtgaggcggtttatagtcagaaagatttacggatttttttcctgtaacataaaagattgtgaactttttttaattaaaaaatatttcctagggctgtagttatttgggagtttcataacctgttatggtgcttttggtggaaatttttattatttagcattttaggagaccgctgtcaactggttttaatctatgatgctaatgtgttttccactgtaccctcatctcaggaataaaactgctttaacggagatgatgtcaggtacaaatacactatagagtcaaaataccatttacaaagaaaatcaaaagcatttctatattttgtctttttttagttcagacagcaaaggcatgtactactataaaatacaaagtgattttagagaatgaaaaatgctacttttatcttctctaaaattatttcccccaaggtagtgaagtaattggaatgaaggaggctgaaagtattgtctaaagtgagcccagaggccactgagaatgcagattactgacagccaggtctgtttagttgtaattggaagacacatgagtgtcctgcttacatgtagcttcagactgcagagacaggacgtgtgcttttcatttcaatatttagttatatttgatattttgaaactgtctgctttttgctatttctgcagtttcaagttagttagaagcatgttgtcaactaaagacaacaaactatcagattcattcattcagtgaagcagcctctgattctctaagagtcacgaatgtcttagtgttaccctcccctagtcaacagcagaccagcctggccaatgcctatgggtggcccctctggagtgctcactaacaagggtgagtgctctcgctaagaagtgtcccccgcctaatcatgtgtttataggatagtacacgttccccaggcccataacagaggactaaaatctctgaattttaaagacacagatgactggcatattttggataccagtatagctatatcaaatagacaaaaacagcttcactttagcaatgatcagattgttaatctacagattttattttttaaaatttggatgtaagtagagactttcagtatttgttttctcttgattttgaagtcatttcttcttctcacgtctgtgacaaatggttgaaaaggagtcaacatggccccaactatagtgccggaaccttttcatcattctgaggctttgccccacacatggtcctcactcatatctgtcaccttctgaagcctagatcttgttaacccatcaggtgcagtgtcagtttcaaatcaaattatctaagaaaacaagaaaacaaaggcagcagactattggtacacattatagtccaaagtgcttagcgaagtaaaaaaaaaagctttttaaaatttctattgttgtctattggtaatgtttttgatcagaataaagagggtaaagggaaaaagttactacacatgctaggctttctcagtggggaaaaaaatggctggatagaactgggacaaacacagacccatctttaggggtctggattttgtaggtccgactacacagcagtgttaactcatttctcatgccattagctctctacaaaataaagcaaagtagttctagtgtggtcgttataaaccaatattgtgaaaaatagcaactattcatttgttcacaacatgcgtatttatagagtagttaggtaccatttgtaaggtaaatcctttaaaattctataatacatactaaaatagtggttattggtctgatatatgctgctcttggttctataaactagataaaagcagtgctttgtgaaatgcagtgttctctcttaacgccactggtgataggaagtagttcccttcagttcaaatcctgtgcccttatttgctgcttgctgacgtaagcaataagtaaccctctaactaatggtatctacatatttctgtaacttgtatttaatgatggtgtacctggtgattgtaaaaatattagacagatataaaagtatctatataatatctataaactgttaatgctgaggtatagtctgtgaattatgtgttttgtatttttattcattgtgtaatttagtggtggtgaaagttctacactcaatccttaaagagtggcagtatccctttttcaatttaacatggtctgcatcaatctgtttgcctgctaaacaagttagaataggaaatagtaaaataaatccaaacaagagtgtaatattggttagggaaacaaacttcaggtcaccaactgaagtcattacaaactccttgtacattcactgtgagtttcaaagggagtcagtccctaatttacaggtttcctttgttcactttctagatgtgtacttttgagggacatgaggttaggcaacattacagcaacacacactggggctattaatcccatttaggtctgtactaaagaggatgggtagaaacacatatgtatataccttttctttacctagaagtgccatccattgtccttgaattattatgattaaagttactgttgcatttaggaggctccttgaaagtaacaccttttccaaggacaatggcaacaatgtcaatgtcaacactgagtctaattttgaccacatttatagtggtatagtgtcaatactgcattttcatgacaaccacactccactgttgaaacactgtgccagtgagaagtgcaacatccagtgggcagatgaaaatgatgcatggccaagttcagtgtttacagataaaactgctgtggttcaagtgcttccttccccatcaaatccttgataaggctttgtgggaaaatgatctaaattattgttttaatttttaaacctaatttattcactcagtgaacattcttacctaagcaaggctataaaagggaatactacagttttgtccacactttaatttgagaccatttttctttgaatcgtaagttagcaaaagaaatttttttcacctttgaaaatcacgtgatgttaaaggacaaatgcccactcttctattctgatctgcaaatagcttaaatgtctcttgcaaaacaaagtaagataccaccagtattacaacacaatgattttccagacaaatggtatggtgttgaaaaataactgttacttcttaaagcagcattttatcttctattttgaagactatttattgtaataattagaaaacatgaaatagggaactccagactgacacagcagttgtttttgaaaaggaaataaactttgatgaattagataatccagatacatcattgtaaactcttactctaggtgctctttggtgagagacaggctttgttctcttgttcataacatttctctgcaaagaattctctatggagtgaagcgaatgaagtgaataatttcttaccaaataaatttatcaatttacaaatctgctctacatctcacttttgagttcagttgtagtcatgagtgatccttcatattttattaaaagtgttcattcaggtaaggtgtatgttgaaattttgccaattatcttaataaaacctggcaattt

SEQ ID NO: 183070 - DNA, 6535 bp, Artificial Sequence
  derived and/or modified sequence
tgctgatcgctcgtgccggtgcggccgttaaccgcccttgccggagccctaggctcaaaagcagccccttacccttcctgggcttcccccaacccctttcccggtctgccctggggcatgagcagcgatggccggctgcatccctgaggagaaaacttaccggcgcttcctggagctattcctgggcgagtttcgcggaccgtgcggcggcggcgagccggagccggaacccgaacccgaacccgaacccgaacccgagtccgagcccgagcccgaacctgaactggtagaagctgaggcggccgaggcttcggtagaggaacccggggaggaggcggccacggtagccgcgacggaggagggggaccaggagcaagacccggagcccgaggaggaggcggcggttgagggtgaggaggaggaggagggcgcggcgacggcggcggcagccccggggcactcggccgtgccgccgccgccgccccagctgccgcctttgcccccgctcccgcgaccgctgtcagagcgcatcacccgcgaggaggtggagggcgaaagcctggacctgtgcctgcagcagctctacaaatataattgcccttcctttttggctgctgctttagccagagccacatcagatgaagtccttcagagtgatctttctgcacattatatcccaaaggaaacggatggcacagaagggactgtggagattgagacagtgaaattggcccgttctgtcttcagcaaactacacgagatttgctgcagctgggtgaaagacttccccctccgcaggagaccccagctttattatgagacatcaatccatgccatcaaaaacatgcgcaggaaaatggaggacaaacatgtctgcattcctgactttaatatgctcttcaacctagaggaccaggaagaacaagcttactttgcagtgtttgatggccatgggggagtagatgctgctatttatgcctccattcacctccacgttaacttagtccgccaggagatgttcccccatgatcctgctgaggccctgtgcagggccttccgggtcactgatgagcggtttgtgcagaaagcagccagggagagcttaagatgtgggaccacaggagtggtgactttcatcagaggcaacatgctacatgtggcctgggtgggtgattcccaggttatgcttgtgagaaagggccaagctgttgaactaatgaagccacacaaaccagacagagaggatgaaaagcagagaattgaggcccttggaggttgcgtagtctggtttggtgcctggagggtgaatggaagtctgtcggtttccagagctattggagatgctgaacataagccatatatctgtggggatgcagattctgcctccactgttctggatgggaccgaagactacctcattctggcctgtgatggcttctatgacaccgtgaaccctgatgaggcagtgaaagttgtgtccgaccacctgaaagagaataatggagacagcagcatggttgcccacaaattagtggcatcagctcgtgatgctgggtcaagtgataacatcacggttattgtggtattcctgagggacatgaacaaagctgtaaatgttagtgaggaatcagattggacagagaactcttttcaaggagggcaagaagatggtggggatgataaggagaatcatggagagtgcaaacgcccttggcctcagcaccagtgctcagcaccagccgacctaggctatgatgggcgtgtggattcattcactgatagaactagcctgagcccagggtcccaaatcaacgtgctggaagacccaggctacctagatctcacacaaatagaagcaagcaaacctcacagtgcccagtttttgctaccagttgagatgtttggtcctggtgcaccaaagaaagcaaatcttattaatgagttaatgatggagaaaaaatcagttcagtcatcattgcctgaatggagtggtgctggagagtttcccactgctttcaatttgggttcaacaggggagcagatatacagaatgcagagcttgtctcctgtctgttcagggttggaaaatgaacagttcaaatccccgggaaacagagtttctagattgtctcatttacgccaccactactcaaagaagtggcacagattcaggtttaatccaaagttttattcatttctctctgctcaagagccttcccacaaaataggcactagcctgtcctcacttactggaagtgggaagagaaataggataagaagttctctgccatggaggcaaaatagttggaaagggtacagtgaaaacatgaggaagctcagaaagactcatgatattccatgcccagatcttccttggagctataaaatagaataatttttctttcaagtaggttagctagctctcccccaataaaaataccactatcagagtagaaacaaggtagacatttctaaaacatatgtgcttcattatgaatccatggatggctcaattcttaaatgtaaatagatctctaggaaactcaaagtacagtgttttcaatctaaaaagaagtattggcagtttcacttgcaaaattacacagctggtccctgtgatgtgtctcgacaccaatacacaacccccttcccaccatccttcatgtcactagatacacaacccccttcccaccatcccttcagtcactagtggaagctttcaagttagttatttcagtcaggatatacagtgttgaaatctcaatgcagttgaaatctggtctgatgtgcctaatttatctgtggaaaatttaatgctgaattacatttggttgggaaatgtccctcaaaatcctgggcactatgaaggaaccccctgccccctcacctttttgggtaggtaaaagactaaaagccatatggattttaactgataacaatgaaagtggtaaatcagtgtaaaagtgtcatattctcagacttgtgaggcggtttatagtcagaaagatttacggatttttttcctgtaacataaaagattgtgaactttttttaattaaaaaatatttcctagggctgtagttatttgggagtttcataacctgttatggtgcttttggtggaaatttttattatttagcattttaggagaccgctgtcaactggttttaatctatgatgctaatgtgttttccactgtaccctcatctcaggaataaaactgctttaacggagatgatgtcaggtacaaatacactatagagtcaaaataccatttacaaagaaaatcaaaagcatttctatattttgtctttttttagttcagacagcaaaggcatgtactactataaaatacaaagtgattttagagaatgaaaaatgctacttttatcttctctaaaattatttcccccaaggtagtgaagtaattggaatgaaggaggctgaaagtattgtctaaagtgagcccagaggccactgagaatgcagattactgacagccaggtctgtttagttgtaattggaagacacatgagtgtcctgcttacatgtagcttcagactgcagagacaggacgtgtgcttttcatttcaatatttagttatatttgatattttgaaactgtctgctttttgctatttctgcagtttcaagttagttagaagcatgttgtcaactaaagacaacaaactatcagattcattcattcagtgaagcagcctctgattctctaagagtcacgaatgtcttagtgttaccctcccctagtcaacagcagaccagcctggccaatgcctatgggtggcccctctggagtgctcactaacaagggtgagtgctctcgctaagaagtgtcccccgcctaatcatgtgtttataggatagtacacgttccccaggcccataacagaggactaaaatctctgaattttaaagacacagatgactggcatattttggataccagtatagctatatcaaatagacaaaaacagcttcactttagcaatgatcagattgttaatctacagattttattttttaaaatttggatgtaagtagagactttcagtatttgttttctcttgattttgaagtcatttcttcttctcacgtctgtgacaaatggttgaaaaggagtcaacatggccccaactatagtgccggaaccttttcatcattctgaggctttgccccacacatggtcctcactcatatctgtcaccttctgaagcctagatcttgttaacccatcaggtgcagtgtcagtttcaaatcaaattatctaagaaaacaagaaaacaaaggcagcagactattggtacacattatagtccaaagtgcttagcgaagtaaaaaaaaaagctttttaaaatttctattgttgtctattggtaatgtttttgatcagaataaagagggtaaagggaaaaagttactacacatgctaggctttctcagtggggaaaaaaatggctggatagaactgggacaaacacagacccatctttaggggtctggattttgtaggtccgactacacagcagtgttaactcatttctcatgccattagctctctacaaaataaagcaaagtagttctagtgtggtcgttataaaccaatattgtgaaaaatagcaactattcatttgttcacaacatgcgtatttatagagtagttaggtaccatttgtaaggtaaatcctttaaaattctataatacatactaaaatagtggttattggtctgatatatgctgctcttggttctataaactagataaaagcagtgctttgtgaaatgcagtgttctctcttaacgccactggtgataggaagtagttcccttcagttcaaatcctgtgcccttatttgctgcttgctgacgtaagcaataagtaaccctctaactaatggtatctacatatttctgtaacttgtatttaatgatggtgtacctggtgattgtaaaaatattagacagatataaaagtatctatataatatctataaactgttaatgctgaggtatagtctgtgaattatgtgttttgtatttttattcattgtgtaatttagtggtggtgaaagttctacactcaatccttaaagagtggcagtatccctttttcaatttaacatggtctgcatcaatctgtttgcctgctaaacaagttagaataggaaatagtaaaataaatccaaacaagagtgtaatattggttagggaaacaaacttcaggtcaccaactgaagtcattacaaactccttgtacattcactgtgagtttcaaagggagtcagtccctaatttacaggtttcctttgttcactttctagatgtgtacttttgagggacatgaggttaggcaacattacagcaacacacactggggctattaatcccatttaggtctgtactaaagaggatgggtagaaacacatatgtatataccttttctttacctagaagtgccatccattgtccttgaattattatgattaaagttactgttgcatttaggaggctccttgaaagtaacaccttttccaaggacaatggcaacaatgtcaatgtcaacactgagtctaattttgaccacatttatagtggtatagtgtcaatactgcattttcatgacaaccacactccactgttgaaacactgtgccagtgagaagtgcaacatccagtgggcagatgaaaatgatgcatggccaagttcagtgtttacagataaaactgctgtggttcaagtgcttccttccccatcaaatccttgataaggctttgtgggaaaatgatctaaattattgttttaatttttaaacctaatttattcactcagtgaacattcttacctaagcaaggctataaaagggaatactacagttttgtccacactttaatttgagaccatttttctttgaatcgtaagttagcaaaagaaatttttttcacctttgaaaatcacgtgatgttaaaggacaaatgcccactcttctattctgatctgcaaatagcttaaatgtctcttgcaaaacaaagtaagataccaccagtattacaacacaatgattttccagacaaatggtatggtgttgaaaaataactgttacttcttaaagcagcattttatcttctattttgaagactatttattgtaataattagaaaacatgaaatagggaactccagactgacacagcagttgtttttgaaaaggaaataaactttgatgaattagataatccagatacatcattgtaaactcttactctaggtgctctttggtgagagacaggctttgttctcttgttcataacatttctctgcaaagaattctctatggagtgaagcgaatgaagtgaataatttcttaccaaataaatttatcaatttacaaatctgctctacatctcacttttgagttcagttgtagtcatgagtgatccttcatattttattaaaagtgttcattcaggtaaggtgtatgttgaaattttgccaattatcttaataaaacctggcaattt

SEQ ID NO: 183071 - DNA, 2268 bp, Artificial Sequence
  derived and/or modified sequence
atggccggctgcatccccgaggagaagacctacagaagattcctggagctgttcctgggcgagttcagaggcccctgcggcggcggcgagcccgagcccgagcccgagcccgagcccgagcccgagcccgagagcgagcccgagcccgagcccgagctggtggaggccgaggccgccgaggccagcgtggaggagcccggcgaggaggccgccaccgtggccgccaccgaggagggcgaccaggagcaggaccccgagcccgaggaggaggccgccgtggagggcgaggaggaggaggagggcgccgccaccgccgccgccgcccccggccacagcgccgtgccccccccccccccccagctgccccccctgccccccctgcccagacccctgagcgagagaatcaccagagaggaggtggagggcgagagcctggacctgtgcctgcagcagctgtacaagtacaactgccccagcttcctggccgccgccctggccagagccaccagcgacgaggtgctgcagagcgacctgagcgcccactacatccccaaggagaccgacggcaccgagggcaccgtggagatcgagaccgtgaagctggccagaagcgtgttcagcaagctgcacgagatctgctgcagctgggtgaaggacttccccctgagaagaagaccccagctgtactacgagaccagcatccacgccatcaagaacatgagaagaaagatggaggacaagcacgtgtgcatccccgacttcaacatgctgttcaacctggaggaccaggaggagcaggcctacttcgccgtgttcgacggccacggcggcgtggacgccgccatctacgccagcatccacctgcacgtgaacctggtgagacaggagatgttcccccacgaccccgccgaggccctgtgcagagccttcagagtgaccgacgagagattcgtgcagaaggccgccagagagagcctgagatgcggcaccaccggcgtggtgaccttcatcagaggcaacatgctgcacgtggcctgggtgggcgacagccaggtgatgctggtgagaaagggccaggccgtggagctgatgaagccccacaagcccgacagagaggacgagaagcagagaatcgaggccctgggcggctgcgtggtgtggttcggcgcctggagagtgaacggcagcctgagcgtgagcagagccatcggcgacgccgagcacaagccctacatctgcggcgacgccgacagcgccagcaccgtgctggacggcaccgaggactacctgatcctggcctgcgacggcttctacgacaccgtgaaccccgacgaggccgtgaaggtggtgagcgaccacctgaaggagaacaacggcgacagcagcatggtggcccacaagctggtggccagcgccagagacgccggcagcagcgacaacatcaccgtgatcgtggtgttcctgagagacatgaacaaggccgtgaacgtgagcgaggagagcgactggaccgagaacagcttccagggcggccaggaggacggcggcgacgacaaggagaaccacggcgagtgcaagagaccctggccccagcaccagtgcagcgcccccgccgacctgggctacgacggcagagtggacagcttcaccgacagaaccagcctgagccccggcagccagatcaacgtgctggaggaccccggctacctggacctgacccagatcgaggccagcaagccccacagcgcccagttcctgctgcccgtggagatgttcggccccggcgcccccaagaaggccaacctgatcaacgagctgatgatggagaagaagagcgtgcagagcagcctgcccgagtggagcggcgccggcgagttccccaccgccttcaacctgggcagcaccggcgagcagatctacagaatgcagagcctgagccccgtgtgcagcggcctggagaacgagcagttcaagagccccggcaacagagtgagcagactgagccacctgagacaccactacagcaagaagtggcacagattcagattcaaccccaagttctacagcttcctgagcgcccaggagcccagccacaagatcggcaccagcctgagcagcctgaccggcagcggcaagagaaacagaatcagaagcagcctgccctggagacagaacagctggaagggctacagcgagaacatgagaaagctgagaaagacccacgacatcccctgccccgacctgccctggagctacaagatcgagtag

SEQ ID NO: 183072 - protein, 62 aa, Artificial Sequence
  derived and/or modified sequence
MEELETSLFQTRKAHRIEQMVARWLRRSRDSSARAKVAAADGPARNPTQTLIPVRHTVKIDK

SEQ ID NO: 183073 - protein, 1578 aa, Artificial Sequence
  derived and/or modified sequence
MEELETSLFQTRKAHRIEQMVARWLRRSRDSSARAKVAAADGPARNPTQTLIPVRHTVKIDKDTLLQDYGFHISESLPLTVVAVTAGGSAHGKLFPGDQILQMNNEPAEDLSWERAVDILREAEDSLSITVVRCTSGVPKSSFLTEEKRARLKTNPVKVHFAEEVLISGHSQGNSLLCMPNVLKLYLENGQTKAFKFEANTTVKDIILTVKEKLSIRSIEYFALALEEQYSISRLHLLHEEELIQQVVEREESHDYRCLFRVCFVPKDPLDLLKEDPVAFEYLYLQSCSDVLQERFAVEMKCSSALRLAALHIQERIYACAQPQKISLKYIEKDWGIENFISPTLLRNMKGKDIKKAISFHMKRNQNLLEPRQKQLISAAQLRLNYLQILGELKTYGGRIFNATLMLQDRESYIALLVGAKYGISQVINSKLNIMSTLAEFANISRVELTEESEKVSVVKVYLQDVKVLTLLLESNSAKDLACLIAGYYRLLVDPVTSIFLWPGNKQQAHRVSAEEGYESRACSDSEESSEVDCVLEPLSDRRLVKLAPCRSLIKEEQPPGNSPTPEVARRGPSTCGASSTTDSAESEASDSANTESRGYRTSGSSESMDALEEDDLDTCSSSRSTFFHFGSPGLAESIDSDSQEERSGIETSGFLCLLDLAQRANPQCQKTEFSESAALETFGWAPELSTVRLDPRLYEGSHADYYSLCSSVSPASYLSDSSESTASRQGGAPPAWGQQGWTEAQPSSMLEPLALHPPLAFEDGSSDEEYYDAADKLTPPGPPSGPRDVSTAEPSATSLQNKASTSSPENSLPCGPDGRQPSRRGGVKKYAKTLRKRRSFLQTDYTSQVSFPLVPSASLESVDDVCYYDREPYLALGAPSPTVSSLQDMQGEPGLLETKALGLLAPLRETKSTNPASRVMEMEPETMETKSVIDSRVSSISAIRFRIDPNNKENSGVVPAASSSASTPHCSNPGSSGPDTAQARPSQILPLSQDLDGIAPKEPTIEHGDSSFSLSSGDPNPDRACLASNPGLNNVSQGDTLELQLEPHVQLEMGLESFCTNHIQETAPKYTEPLLSPRDEPRSDECGINPGEKIASIPTKEEPQGQLSLERDREVTNKNGTNVFQEESRKDSGDSPGDVSNNVSQTLDISSPAGKIVTSLSLDAPVTGTEQIPPHPPRDPQGQSREPPGQGCQAQEQKLFVELDLDPDFFLGKQTVSPAVPPEGIKAEAPNHVTGQDIAPRDSPEWVCFNPEPSLPEPLPCPQEDPHLETSNHCLLSEGKSDSSSICLSAEKSFLCFAPESHPEVSASLRVATSLGFAGMNEMVAPRIGMDQCSCQFSYATCFRGPQPETEEEDRDLEAHPMAPLTSPPSAGSPVVLPWRPARAHSCTTAPLSRKSHIWPEYCSRALRQLKATPASTPEGFIQLMESLLELQDILETSWGVGNKHPPEKCTWHFTESRSRLCMGSQKLLSSCRHVIRMDQSPEEMQGAVRDTFQHLVQLAGLCFQFTDCSRCSARHREAAGNLRDVVYTYHQFIEAAKSTCERGYHDLSVKLLARQCTALTAAVFCLTQKFRASTAL

SEQ ID NO: 183074 - protein, 634 aa, Artificial Sequence
  derived and/or modified sequence
MPNVLKLYLENGQTKAFKFEANTTVKDIILTVKEKLSIRSIEYFALALEEQYSISRLHLLHEEELIQQVVEREESHDYRCLFRVCFVPKDPLDLLKEDPVAFEYLYLQSCSDVLQERFAVEMKCSSALRLAALHIQERIYACAQPQKISLKYIEKDWGIENFISPTLLRNMKGKDIKKAISFHMKRNQNLLEPRQKQLISAAQLRLNYLQILGELKTYGGRIFNATLMLQDRESYIALLVGAKYGISQVINSKLNIMSTLAEFANISRVELTEESEKVSVVKVYLQDVKVLTLLLESNSAKDLACLIAGYYRLLVDPVTSIFLWPGNKQQAHRVSAEEGYESRACSDSEESSEVDCVLEPLSDRRLVKLAPCRSLIKEEQPPGNSPTPEVARRGPSTCGASSTTDSAESEASDSANTESRGYRTSGSSESMDALEEDDLDTCSSSRSTFFHFGSPGLAESIDSDSQEERSGIETSGFLCLLDLAQRANPQCQKTEFSESAALETFGWAPELSTVRLDPRLYEGSHADYYSLCSSVSPASYLSDSSESTASRQGGAPPAWGQQGWTEAQPSSMLEPLALHPPLAFEDGSSDEEYYDAADKLTPPGPPSGEPSLAGLQTRQAAPECLPGIKAWGQA

SEQ ID NO: 183075 - protein, 681 aa, Artificial Sequence
  derived and/or modified sequence
MAEVGGVPKSSFLTEEKRARLKTNPVKVHFAEEVLISGHSQGNSLLCMPNVLKLYLENGQTKAFKFEANTTVKDIILTVKEKLSIRSIEYFALALEEQYSISRLHLLHEEELIQQVVEREESHDYRCLFRVCFVPKDPLDLLKEDPVAFEYLYLQSCSDVLQERFAVEMKCSSALRLAALHIQERIYACAQPQKISLKYIEKDWGIENFISPTLLRNMKGKDIKKAISFHMKRNQNLLEPRQKQLISAAQLRLNYLQILGELKTYGGRIFNATLMLQDRESYIALLVGAKYGISQVINSKLNIMSTLAEFANISRVELTEESEKVSVVKVYLQDVKVLTLLLESNSAKDLACLIAGYYRLLVDPVTSIFLWPGNKQQAHRVSAEEGYESRACSDSEESSEVDCVLEPLSDRRLVKLAPCRSLIKEEQPPGNSPTPEVARRGPSTCGASSTTDSAESEASDSANTESRGYRTSGSSESMDALEEDDLDTCSSSRSTFFHFGSPGLAESIDSDSQEERSGIETSGFLCLLDLAQRANPQCQKTEFSESAALETFGWAPELSTVRLDPRLYEGSHADYYSLCSSVSPASYLSDSSESTASRQGGAPPAWGQQGWTEAQPSSMLEPLALHPPLAFEDGSSDEEYYDAADKLTPPGPPSGEPSLAGLQTRQAAPECLPGIKAWGQA

SEQ ID NO: 183076 - DNA, 189 bp, Artificial Sequence
  derived and/or modified sequence
atggaggagctggagaccagcctgttccagaccagaaaggcccacagaatcgagcagatggtggccagatggctgagaagaagcagagacagcagcgccagagccaaggtggccgccgccgacggccccgccagaaaccccacccagaccctgatccccgtgagacacaccgtgaagatcgacaagtag

SEQ ID NO: 183077 - DNA, 4737 bp, Artificial Sequence
  derived and/or modified sequence
atggaggagctggagaccagcctgttccagaccagaaaggcccacagaatcgagcagatggtggccagatggctgagaagaagcagagacagcagcgccagagccaaggtggccgccgccgacggccccgccagaaaccccacccagaccctgatccccgtgagacacaccgtgaagatcgacaaggacaccctgctgcaggactacggcttccacatcagcgagagcctgcccctgaccgtggtggccgtgaccgccggcggcagcgcccacggcaagctgttccccggcgaccagatcctgcagatgaacaacgagcccgccgaggacctgagctgggagagagccgtggacatcctgagagaggccgaggacagcctgagcatcaccgtggtgagatgcaccagcggcgtgcccaagagcagcttcctgaccgaggagaagagagccagactgaagaccaaccccgtgaaggtgcacttcgccgaggaggtgctgatcagcggccacagccagggcaacagcctgctgtgcatgcccaacgtgctgaagctgtacctggagaacggccagaccaaggccttcaagttcgaggccaacaccaccgtgaaggacatcatcctgaccgtgaaggagaagctgagcatcagaagcatcgagtacttcgccctggccctggaggagcagtacagcatcagcagactgcacctgctgcacgaggaggagctgatccagcaggtggtggagagagaggagagccacgactacagatgcctgttcagagtgtgcttcgtgcccaaggaccccctggacctgctgaaggaggaccccgtggccttcgagtacctgtacctgcagagctgcagcgacgtgctgcaggagagattcgccgtggagatgaagtgcagcagcgccctgagactggccgccctgcacatccaggagagaatctacgcctgcgcccagccccagaagatcagcctgaagtacatcgagaaggactggggcatcgagaacttcatcagccccaccctgctgagaaacatgaagggcaaggacatcaagaaggccatcagcttccacatgaagagaaaccagaacctgctggagcccagacagaagcagctgatcagcgccgcccagctgagactgaactacctgcagatcctgggcgagctgaagacctacggcggcagaatcttcaacgccaccctgatgctgcaggacagagagagctacatcgccctgctggtgggcgccaagtacggcatcagccaggtgatcaacagcaagctgaacatcatgagcaccctggccgagttcgccaacatcagcagagtggagctgaccgaggagagcgagaaggtgagcgtggtgaaggtgtacctgcaggacgtgaaggtgctgaccctgctgctggagagcaacagcgccaaggacctggcctgcctgatcgccggctactacagactgctggtggaccccgtgaccagcatcttcctgtggcccggcaacaagcagcaggcccacagagtgagcgccgaggagggctacgagagcagagcctgcagcgacagcgaggagagcagcgaggtggactgcgtgctggagcccctgagcgacagaagactggtgaagctggccccctgcagaagcctgatcaaggaggagcagccccccggcaacagccccacccccgaggtggccagaagaggccccagcacctgcggcgccagcagcaccaccgacagcgccgagagcgaggccagcgacagcgccaacaccgagagcagaggctacagaaccagcggcagcagcgagagcatggacgccctggaggaggacgacctggacacctgcagcagcagcagaagcaccttcttccacttcggcagccccggcctggccgagagcatcgacagcgacagccaggaggagagaagcggcatcgagaccagcggcttcctgtgcctgctggacctggcccagagagccaacccccagtgccagaagaccgagttcagcgagagcgccgccctggagaccttcggctgggcccccgagctgagcaccgtgagactggaccccagactgtacgagggcagccacgccgactactacagcctgtgcagcagcgtgagccccgccagctacctgagcgacagcagcgagagcaccgccagcagacagggcggcgccccccccgcctggggccagcagggctggaccgaggcccagcccagcagcatgctggagcccctggccctgcacccccccctggccttcgaggacggcagcagcgacgaggagtactacgacgccgccgacaagctgaccccccccggcccccccagcggccccagagacgtgagcaccgccgagcccagcgccaccagcctgcagaacaaggccagcaccagcagccccgagaacagcctgccctgcggccccgacggcagacagcccagcagaagaggcggcgtgaagaagtacgccaagaccctgagaaagagaagaagcttcctgcagaccgactacaccagccaggtgagcttccccctggtgcccagcgccagcctggagagcgtggacgacgtgtgctactacgacagagagccctacctggccctgggcgcccccagccccaccgtgagcagcctgcaggacatgcagggcgagcccggcctgctggagaccaaggccctgggcctgctggcccccctgagagagaccaagagcaccaaccccgccagcagagtgatggagatggagcccgagaccatggagaccaagagcgtgatcgacagcagagtgagcagcatcagcgccatcagattcagaatcgaccccaacaacaaggagaacagcggcgtggtgcccgccgccagcagcagcgccagcaccccccactgcagcaaccccggcagcagcggccccgacaccgcccaggccagacccagccagatcctgcccctgagccaggacctggacggcatcgcccccaaggagcccaccatcgagcacggcgacagcagcttcagcctgagcagcggcgaccccaaccccgacagagcctgcctggccagcaaccccggcctgaacaacgtgagccagggcgacaccctggagctgcagctggagccccacgtgcagctggagatgggcctggagagcttctgcaccaaccacatccaggagaccgcccccaagtacaccgagcccctgctgagccccagagacgagcccagaagcgacgagtgcggcatcaaccccggcgagaagatcgccagcatccccaccaaggaggagccccagggccagctgagcctggagagagacagagaggtgaccaacaagaacggcaccaacgtgttccaggaggagagcagaaaggacagcggcgacagccccggcgacgtgagcaacaacgtgagccagaccctggacatcagcagccccgccggcaagatcgtgaccagcctgagcctggacgcccccgtgaccggcaccgagcagatccccccccacccccccagagacccccagggccagagcagagagccccccggccagggctgccaggcccaggagcagaagctgttcgtggagctggacctggaccccgacttcttcctgggcaagcagaccgtgagccccgccgtgccccccgagggcatcaaggccgaggcccccaaccacgtgaccggccaggacatcgcccccagagacagccccgagtgggtgtgcttcaaccccgagcccagcctgcccgagcccctgccctgcccccaggaggacccccacctggagaccagcaaccactgcctgctgagcgagggcaagagcgacagcagcagcatctgcctgagcgccgagaagagcttcctgtgcttcgcccccgagagccaccccgaggtgagcgccagcctgagagtggccaccagcctgggcttcgccggcatgaacgagatggtggcccccagaatcggcatggaccagtgcagctgccagttcagctacgccacctgcttcagaggcccccagcccgagaccgaggaggaggacagagacctggaggcccaccccatggcccccctgaccagcccccccagcgccggcagccccgtggtgctgccctggagacccgccagagcccacagctgcaccaccgcccccctgagcagaaagagccacatctggcccgagtactgcagcagagccctgagacagctgaaggccacccccgccagcacccccgagggcttcatccagctgatggagagcctgctggagctgcaggacatcctggagaccagctggggcgtgggcaacaagcacccccccgagaagtgcacctggcacttcaccgagagcagaagcagactgtgcatgggcagccagaagctgctgagcagctgcagacacgtgatcagaatggaccagagccccgaggagatgcagggcgccgtgagagacaccttccagcacctggtgcagctggccggcctgtgcttccagttcaccgactgcagcagatgcagcgccagacacagagaggccgccggcaacctgagagacgtggtgtacacctaccaccagttcatcgaggccgccaagagcacctgcgagagaggctaccacgacctgagcgtgaagctgctggccagacagtgcaccgccctgaccgccgccgtgttctgcctgacccagaagttcagagccagcaccgccctgtag

SEQ ID NO: 183078 - DNA, 1905 bp, Artificial Sequence
  derived and/or modified sequence
atgcccaacgtgctgaagctgtacctggagaacggccagaccaaggccttcaagttcgaggccaacaccaccgtgaaggacatcatcctgaccgtgaaggagaagctgagcatcagaagcatcgagtacttcgccctggccctggaggagcagtacagcatcagcagactgcacctgctgcacgaggaggagctgatccagcaggtggtggagagagaggagagccacgactacagatgcctgttcagagtgtgcttcgtgcccaaggaccccctggacctgctgaaggaggaccccgtggccttcgagtacctgtacctgcagagctgcagcgacgtgctgcaggagagattcgccgtggagatgaagtgcagcagcgccctgagactggccgccctgcacatccaggagagaatctacgcctgcgcccagccccagaagatcagcctgaagtacatcgagaaggactggggcatcgagaacttcatcagccccaccctgctgagaaacatgaagggcaaggacatcaagaaggccatcagcttccacatgaagagaaaccagaacctgctggagcccagacagaagcagctgatcagcgccgcccagctgagactgaactacctgcagatcctgggcgagctgaagacctacggcggcagaatcttcaacgccaccctgatgctgcaggacagagagagctacatcgccctgctggtgggcgccaagtacggcatcagccaggtgatcaacagcaagctgaacatcatgagcaccctggccgagttcgccaacatcagcagagtggagctgaccgaggagagcgagaaggtgagcgtggtgaaggtgtacctgcaggacgtgaaggtgctgaccctgctgctggagagcaacagcgccaaggacctggcctgcctgatcgccggctactacagactgctggtggaccccgtgaccagcatcttcctgtggcccggcaacaagcagcaggcccacagagtgagcgccgaggagggctacgagagcagagcctgcagcgacagcgaggagagcagcgaggtggactgcgtgctggagcccctgagcgacagaagactggtgaagctggccccctgcagaagcctgatcaaggaggagcagccccccggcaacagccccacccccgaggtggccagaagaggccccagcacctgcggcgccagcagcaccaccgacagcgccgagagcgaggccagcgacagcgccaacaccgagagcagaggctacagaaccagcggcagcagcgagagcatggacgccctggaggaggacgacctggacacctgcagcagcagcagaagcaccttcttccacttcggcagccccggcctggccgagagcatcgacagcgacagccaggaggagagaagcggcatcgagaccagcggcttcctgtgcctgctggacctggcccagagagccaacccccagtgccagaagaccgagttcagcgagagcgccgccctggagaccttcggctgggcccccgagctgagcaccgtgagactggaccccagactgtacgagggcagccacgccgactactacagcctgtgcagcagcgtgagccccgccagctacctgagcgacagcagcgagagcaccgccagcagacagggcggcgccccccccgcctggggccagcagggctggaccgaggcccagcccagcagcatgctggagcccctggccctgcacccccccctggccttcgaggacggcagcagcgacgaggagtactacgacgccgccgacaagctgaccccccccggcccccccagcggcgagcccagcctggccggcctgcagaccagacaggccgcccccgagtgcctgcccggcatcaaggcctggggccaggcctag

SEQ ID NO: 183079 - DNA, 2046 bp, Artificial Sequence
  derived and/or modified sequence
atggccgaggtgggcggcgtgcccaagagcagcttcctgaccgaggagaagagagccagactgaagaccaaccccgtgaaggtgcacttcgccgaggaggtgctgatcagcggccacagccagggcaacagcctgctgtgcatgcccaacgtgctgaagctgtacctggagaacggccagaccaaggccttcaagttcgaggccaacaccaccgtgaaggacatcatcctgaccgtgaaggagaagctgagcatcagaagcatcgagtacttcgccctggccctggaggagcagtacagcatcagcagactgcacctgctgcacgaggaggagctgatccagcaggtggtggagagagaggagagccacgactacagatgcctgttcagagtgtgcttcgtgcccaaggaccccctggacctgctgaaggaggaccccgtggccttcgagtacctgtacctgcagagctgcagcgacgtgctgcaggagagattcgccgtggagatgaagtgcagcagcgccctgagactggccgccctgcacatccaggagagaatctacgcctgcgcccagccccagaagatcagcctgaagtacatcgagaaggactggggcatcgagaacttcatcagccccaccctgctgagaaacatgaagggcaaggacatcaagaaggccatcagcttccacatgaagagaaaccagaacctgctggagcccagacagaagcagctgatcagcgccgcccagctgagactgaactacctgcagatcctgggcgagctgaagacctacggcggcagaatcttcaacgccaccctgatgctgcaggacagagagagctacatcgccctgctggtgggcgccaagtacggcatcagccaggtgatcaacagcaagctgaacatcatgagcaccctggccgagttcgccaacatcagcagagtggagctgaccgaggagagcgagaaggtgagcgtggtgaaggtgtacctgcaggacgtgaaggtgctgaccctgctgctggagagcaacagcgccaaggacctggcctgcctgatcgccggctactacagactgctggtggaccccgtgaccagcatcttcctgtggcccggcaacaagcagcaggcccacagagtgagcgccgaggagggctacgagagcagagcctgcagcgacagcgaggagagcagcgaggtggactgcgtgctggagcccctgagcgacagaagactggtgaagctggccccctgcagaagcctgatcaaggaggagcagccccccggcaacagccccacccccgaggtggccagaagaggccccagcacctgcggcgccagcagcaccaccgacagcgccgagagcgaggccagcgacagcgccaacaccgagagcagaggctacagaaccagcggcagcagcgagagcatggacgccctggaggaggacgacctggacacctgcagcagcagcagaagcaccttcttccacttcggcagccccggcctggccgagagcatcgacagcgacagccaggaggagagaagcggcatcgagaccagcggcttcctgtgcctgctggacctggcccagagagccaacccccagtgccagaagaccgagttcagcgagagcgccgccctggagaccttcggctgggcccccgagctgagcaccgtgagactggaccccagactgtacgagggcagccacgccgactactacagcctgtgcagcagcgtgagccccgccagctacctgagcgacagcagcgagagcaccgccagcagacagggcggcgccccccccgcctggggccagcagggctggaccgaggcccagcccagcagcatgctggagcccctggccctgcacccccccctggccttcgaggacggcagcagcgacgaggagtactacgacgccgccgacaagctgaccccccccggcccccccagcggcgagcccagcctggccggcctgcagaccagacaggccgcccccgagtgcctgcccggcatcaaggcctggggccaggcctag

SEQ ID NO: 183080 - DNA, 499 bp, Artificial Sequence
  derived and/or modified sequence
ggggtcgggagttggagaccagcctgaccaacatggagaaaccccaactctactaaaaatacaaaattagccgggcatggtggcgcatgcctgtaatcccagctactcgggaggctgaggcaggagaatcgcttgaacccgggaggcggaggttgtggtgagctgagatcacgccattgcactccagcctgggcaacaagagcaaaactctctctcaaaaaaaaaaaaagaaaagaaaaaagaaagtaaataggggatttgaacagaaacaggtttgcaggtagaaaaaaacgtctcaaccactgaggtaaatggaagagctggagaccagtttattccagacacggaaagcacatagaatagaacaaatggtggcaagatggcttcggcgctcccgggacagctcggcccgggctaaagttgctgcagctgatgggcccgccaggaacccaactcagaccctcatccctgtgcgacacacagtaaagatagacaaaga

SEQ ID NO: 183081 - DNA, 4971 bp, Artificial Sequence
  derived and/or modified sequence
ggccgcgaccgtgcccgccgctgggcggggccgcccttctccgagagcgtcagcccgctaggtccttgtccgcgcgggcggcacctcctctgcaggtaaatggaagagctggagaccagtttattccagacacggaaagcacatagaatagaacaaatggtggcaagatggcttcggcgctcccgggacagctcggcccgggctaaagttgctgcagctgatgggcccgccaggaacccaactcagaccctcatccctgtgcgacacacagtaaagatagacaaagacaccctcctccaggactatggatttcacatttctgagagccttccccttacagtggtggctgtcacagcaggaggctctgctcacggcaagcttttccctggtgatcagatcctccaaatgaacaatgagcctgctgaagacctttcctgggaacgagcagtcgatattctcagggaagcagaagattctctttcaatcacagttgttcgctgcacgtcgggagtccctaaatcgtccttcctgaccgaggagaagagagccagactgaagaccaaccccgtgaaggtgcactttgctgaagaagtgctcatcagtggacacagccagggtaattctctgctgtgtatgcccaacgtgctcaagctatacttggagaatggacagaccaaagctttcaagtttgaggcaaacacaaccgtgaaggacatcatcctcaccgtgaaggagaagctgtccatccgaagtatcgagtactttgcactggccctggaagagcagtacagcatctcccggctgcacctgctgcacgaagaggaactcatccagcaggtggtagaaagggaggagtcacatgactaccgctgcctcttcagggtctgttttgttcccaaggaccccctggacctcctgaaagaagaccccgtggcctttgaatacctctatctgcagagctgcagcgatgtgctccaggagcgctttgctgtagaaatgaaatgtagctctgcactccgactcgcggctctgcacatccaggaacggatctacgcctgtgcccagccacagaagatctctttaaagtatatagagaaagactggggaatagagaactttatatctccaactttactccgaaacatgaaaggcaaagacatcaagaaagccattagcttccacatgaagaggaaccagaatttgctggaaccccgacagaagcaacttatttctgctgcccagctacgtttaaattatctacagatcctcggagaactcaagacatatggtggaagaatctttaatgctactttaatgttacaggatagagaatcctacattgcccttctagttggagccaagtatgggattagccaggttatcaatagcaaactcaacatcatgtccacattggcagagtttgcaaacatcagccgtgtagagctaacggaagagtctgagaaagtgagcgtcgtcaaagtgtatcttcaggacgtcaaggttctgactttgctgctggaatccaacagtgcaaaagacctagcctgcctgattgctgggtactacaggctgttggttgacccagttacctccattttcctctggcctggaaacaaacaacaagcgcaccgggtatctgcagaagaaggctatgaatccagggcctgcagtgactcagaggagtcctctgaggtggactgcgtactcgaacctctctctgacaggcgcctggtgaaactggcaccctgcagatcactcataaaggaggagcagcctcctgggaacagccccacacctgaggtggctaggaggggccccagcacctgcggggccagcagcacgacagacagtgccgagtccgaggcgtccgactcagccaacactgagagccgcggctacaggaccagtggctcgagtgagtccatggacgctctggaagaggatgacttagacacctgctcctccagcaggtccaccttcttccactttggctcgccaggcctcgcagagagcattgactctgacagccaggaggagagaagcgggattgaaaccagtggcttcctctgtctcctggacctggcccagagagccaacccccagtgccagaagacagagttttccgagagtgctgctttggagacatttggctgggcaccagaactgagcacagtcaggctggaccccaggctgtatgaaggcagccacgctgactactacagcctgtgttccagtgtctccccggccagctacctgagtgacagttccgagagtacagcttcccggcaagggggagccccgccagcctggggtcagcagggctggactgaggcccagcccagttccatgctggaacccctggccctgcacccaccactggcctttgaggatggcagctcagatgaggaatactatgacgcggctgataagctcactcccccaggccccccgtcagggcccagagatgtttctactgcagaacccagtgccacaagcttgcagaataaggccagcacttctagccctgagaacagcctgccttgtgggccagatggaagacagccaagcaggaggggaggggtgaagaaatatgccaagaccctgaggaaaagaaggtctttcctacagaccgactacacctctcaggtctcatttcccctggtgccatcagcctccctggagagtgtagacgacgtgtgctactatgacagggagccctacctggcccttggtgcaccctccccaactgtgtcctctctgcaggacatgcagggtgagcctggccttctggagaccaaggccttggggctgctggctcctctgagggagaccaagagcacaaacccagcctccagggtcatggagatggagcccgagaccatggaaaccaaatcagtcatcgactctcgagtgtcttctatttctgccattcgcttccggattgaccccaacaataaagagaattctggtgttgtccctgctgccagctcctcagcaagcactcctcactgttctaacccaggttcatctggcccagatactgctcaggcaaggccttcccaaatcttacctctatctcaagacctggatgggattgcccccaaagaaccaaccatagagcatggagacagctccttctccctctccagtggtgaccctaacccagacagagcctgcctggccagcaacccaggactaaataatgtctctcaaggagacacactagagctccagttggagccccatgtccagttggaaatgggattggaatctttttgtacaaatcatatacaagaaactgcccccaaatacacagagcctttgttgtctcctagagatgagcctagaagtgatgaatgtggaataaatccaggagagaagatagcttctatccctacaaaggaagagccacaaggacaactatctctggaaagagacagagaagttacaaacaaaaatggcaccaacgtatttcaggaggagtctaggaaggattcaggtgactccccgggtgatgtgtcaaataatgtttcacagactcttgatattagctctccagctggtaaaatagtaacctccctttctttagatgctcctgtaacagggaccgagcagatcccaccacatccccctagagaccctcaaggacagagcagagaacccccagggcaaggctgccaggctcaagaacaaaaactattcgtagagttggatttagaccctgatttctttcttgggaagcagacagtttcaccagccgtccctccagaggggatcaaggcagaggcacctaaccatgtgacagggcaagatatagcccctagggacagccctgagtgggtctgttttaatcctgagccttccctgccagaaccactaccatgtccacaagaggatcctcacttagaaacttcaaaccattgcttactctcagaaggcaaaagtgacagctctagcatctgcctttctgctgagaagtcttttctgtgctttgccccagaaagccatcctgaagtctctgccagtctcagggtggccacatctttgggttttgcaggcatgaatgagatggtggctcccaggatagggatggaccagtgcagctgtcagttctcctatgccacatgcttccgtggcccgcagcctgagacagaggaagaagacagggacttggaagcacaccccatggcccccctcacctcaccgccctctgcgggaagcccggtggttctgccctggaggcctgcccgagcccacagctgcaccaccgcacccctgtcgaggaaaagccacatctggccagagtactgctccagggcactgagacagctgaaagccacccctgccagcacccctgagggcttcatccaactcatggagagcttgctggagctacaagacattttagaaacttcctggggggttggaaacaaacatcccccagagaagtgcacctggcactttaccgaaagccggagccgcctctgcatgggctcccagaagctcctgtcgagctgtcggcatgtgatcagaatggaccagtcccccgaagagatgcagggggccgtgcgtgacaccttccagcacctggtccagctggccggcctgtgctttcagttcacagactgtagccgctgctccgcccggcacagggaggcagcggggaacctgagggatgtggtgtacacctaccatcagtttatagaggctgctaaatcgacctgcgagagaggctaccacgacctgagtgtgaaactcctggcccgtcagtgcacggccctcacggccgccgtgttctgtttgacccagaagttccgggcatccacggccctgtaaacaggtcaacggcccaagggcctcctgccctgtcctgccttggacacttccctgagaagccccttccactctcccacccaccctcttcaaatgtttactatatagagtattcaaataaactgctgcttaatcttg

SEQ ID NO: 183082 - DNA, 2805 bp, Artificial Sequence
  derived and/or modified sequence
atcctttgaattgtctctttaaaatatgagatggctgaagtgggtgtaagtaggtggtttataatatgttctagatgccaagatattcatggtagcagagctgatgttcagaacgtggcccagagtttcatcttggtacttttacacatggaaacattctagaggctggtctaaaggactgtccacaccaagggaacataggctgttaggctggaaaatagtgtatcaggatttcatccaggaaggtcacagcctgttggtctagaagatcatgtaagatgctattcagcaagtgtcacaagttggcctgatacaatctagtccaaagtcttcaccatatactcataccaacctgtgatgactctctttacttctttgggaaaagaaggtaccttccaaaagataagagcgaagtggagccaaggggagtccctaaatcgtccttcctgaccgaggagaagagagccagactgaagaccaaccccgtgaaggtgcactttgctgaagaagtgctcatcagtggacacagccagggtaattctctgctgtgtatgcccaacgtgctcaagctatacttggagaatggacagaccaaagctttcaagtttgaggcaaacacaaccgtgaaggacatcatcctcaccgtgaaggagaagctgtccatccgaagtatcgagtactttgcactggccctggaagagcagtacagcatctcccggctgcacctgctgcacgaagaggaactcatccagcaggtggtagaaagggaggagtcacatgactaccgctgcctcttcagggtctgttttgttcccaaggaccccctggacctcctgaaagaagaccccgtggcctttgaatacctctatctgcagagctgcagcgatgtgctccaggagcgctttgctgtagaaatgaaatgtagctctgcactccgactcgcggctctgcacatccaggaacggatctacgcctgtgcccagccacagaagatctctttaaagtatatagagaaagactggggaatagagaactttatatctccaactttactccgaaacatgaaaggcaaagacatcaagaaagccattagcttccacatgaagaggaaccagaatttgctggaaccccgacagaagcaacttatttctgctgcccagctacgtttaaattatctacagatcctcggagaactcaagacatatggtggaagaatctttaatgctactttaatgttacaggatagagaatcctacattgcccttctagttggagccaagtatgggattagccaggttatcaatagcaaactcaacatcatgtccacattggcagagtttgcaaacatcagccgtgtagagctaacggaagagtctgagaaagtgagcgtcgtcaaagtgtatcttcaggacgtcaaggttctgactttgctgctggaatccaacagtgcaaaagacctagcctgcctgattgctgggtactacaggctgttggttgacccagttacctccattttcctctggcctggaaacaaacaacaagcgcaccgggtatctgcagaagaaggctatgaatccagggcctgcagtgactcagaggagtcctctgaggtggactgcgtactcgaacctctctctgacaggcgcctggtgaaactggcaccctgcagatcactcataaaggaggagcagcctcctgggaacagccccacacctgaggtggctaggaggggccccagcacctgcggggccagcagcacgacagacagtgccgagtccgaggcgtccgactcagccaacactgagagccgcggctacaggaccagtggctcgagtgagtccatggacgctctggaagaggatgacttagacacctgctcctccagcaggtccaccttcttccactttggctcgccaggcctcgcagagagcattgactctgacagccaggaggagagaagcgggattgaaaccagtggcttcctctgtctcctggacctggcccagagagccaacccccagtgccagaagacagagttttccgagagtgctgctttggagacatttggctgggcaccagaactgagcacagtcaggctggaccccaggctgtatgaaggcagccacgctgactactacagcctgtgttccagtgtctccccggccagctacctgagtgacagttccgagagtacagcttcccggcaagggggagccccgccagcctggggtcagcagggctggactgaggcccagcccagttccatgctggaacccctggccctgcacccaccactggcctttgaggatggcagctcagatgaggaatactatgacgcggctgataagctcactcccccaggccccccgtcaggtgagccgtcccttgcaggtctgcagacacggcaggcagctcctgagtgcctcccggggatcaaggcctggggccaagcttgagaggaaggcacatgagtgaaacagggtccctgtacacttctgaggaggtagatacagattccatggaccaaattttaggcatcgtggcaggcctgcaagggaggttcagacaactgtggcaagcagatgggagggattcatccaacagtgggaatcagggaaggcttcccagaagagggggcaaatgggctgggccctgtgggagggacagaatttacaaaaaaggaaagggcttgacaggagtgcccggcagagcgaagtggctatgtcatcactgatcctgaggctgcattaaaggaggccttgaagcaagaagaaccagacagacaggccgtctgtggccctgcaa

SEQ ID NO: 183083 - DNA, 5465 bp, Artificial Sequence
  derived and/or modified sequence
gaacacaactgggcagaactagcaggagaccaagtattatgtggcacagaataaactctacaactataaaatggatgcatcatgagaccttgggtgtcatcttctgtgttgcccttggcacagaggaagccagtttgccaatcaaggacctctagggtttcctctctcgactggctcaagtggttgaggtcttgaggatgagaatgccatctgcaggactcctgtgcctgtcgtgctgaaaggagagaagccagacatgttgacaggcatagctgcagctgcccagtatccgcagatgaggagggtcatgctcctgtgaggagggggcccgtgccacagagataccacccaactttgcccacatggcctggcagtcggttttacttgggcttatcgatgagctatgggaaggtcatttgatattcacattcttgtggccgcaatgttgggaatgtggccttttatctttaaaaatagctgtgtgctgggaggcccgggagcagtgtcctgggatggaggggagctgccagcagggggaagaggtgtggatttctttccgaggaagagtcccttcagctctgtgccactggtaaatggaagagctggagaccagtttattccagacacggaaagcacatagaatagaacaaatggtggcaagatggcttcggcgctcccgggacagctcggcccgggctaaagttgctgcagctgatgggcccgccaggaacccaactcagaccctcatccctgtgcgacacacagtaaagatagacaaagacaccctcctccaggactatggatttcacatttctgagagccttccccttacagtggtggctgtcacagcaggaggctctgctcacggcaagcttttccctggtgatcagatcctccaaatgaacaatgagcctgctgaagacctttcctgggaacgagcagtcgatattctcagggaagcagaagattctctttcaatcacagttgttcgctgcacgtcgggagtccctaaatcgtccttcctgaccgaggagaagagagccagactgaagaccaaccccgtgaaggtgcactttgctgaagaagtgctcatcagtggacacagccagggtaattctctgctgtgtatgcccaacgtgctcaagctatacttggagaatggacagaccaaagctttcaagtttgaggcaaacacaaccgtgaaggacatcatcctcaccgtgaaggagaagctgtccatccgaagtatcgagtactttgcactggccctggaagagcagtacagcatctcccggctgcacctgctgcacgaagaggaactcatccagcaggtggtagaaagggaggagtcacatgactaccgctgcctcttcagggtctgttttgttcccaaggaccccctggacctcctgaaagaagaccccgtggcctttgaatacctctatctgcagagctgcagcgatgtgctccaggagcgctttgctgtagaaatgaaatgtagctctgcactccgactcgcggctctgcacatccaggaacggatctacgcctgtgcccagccacagaagatctctttaaagtatatagagaaagactggggaatagagaactttatatctccaactttactccgaaacatgaaaggcaaagacatcaagaaagccattagcttccacatgaagaggaaccagaatttgctggaaccccgacagaagcaacttatttctgctgcccagctacgtttaaattatctacagatcctcggagaactcaagacatatggtggaagaatctttaatgctactttaatgttacaggatagagaatcctacattgcccttctagttggagccaagtatgggattagccaggttatcaatagcaaactcaacatcatgtccacattggcagagtttgcaaacatcagccgtgtagagctaacggaagagtctgagaaagtgagcgtcgtcaaagtgtatcttcaggacgtcaaggttctgactttgctgctggaatccaacagtgcaaaagacctagcctgcctgattgctgggtactacaggctgttggttgacccagttacctccattttcctctggcctggaaacaaacaacaagcgcaccgggtatctgcagaagaaggctatgaatccagggcctgcagtgactcagaggagtcctctgaggtggactgcgtactcgaacctctctctgacaggcgcctggtgaaactggcaccctgcagatcactcataaaggaggagcagcctcctgggaacagccccacacctgaggtggctaggaggggccccagcacctgcggggccagcagcacgacagacagtgccgagtccgaggcgtccgactcagccaacactgagagccgcggctacaggaccagtggctcgagtgagtccatggacgctctggaagaggatgacttagacacctgctcctccagcaggtccaccttcttccactttggctcgccaggcctcgcagagagcattgactctgacagccaggaggagagaagcgggattgaaaccagtggcttcctctgtctcctggacctggcccagagagccaacccccagtgccagaagacagagttttccgagagtgctgctttggagacatttggctgggcaccagaactgagcacagtcaggctggaccccaggctgtatgaaggcagccacgctgactactacagcctgtgttccagtgtctccccggccagctacctgagtgacagttccgagagtacagcttcccggcaagggggagccccgccagcctggggtcagcagggctggactgaggcccagcccagttccatgctggaacccctggccctgcacccaccactggcctttgaggatggcagctcagatgaggaatactatgacgcggctgataagctcactcccccaggccccccgtcagggcccagagatgtttctactgcagaacccagtgccacaagcttgcagaataaggccagcacttctagccctgagaacagcctgccttgtgggccagatggaagacagccaagcaggaggggaggggtgaagaaatatgccaagaccctgaggaaaagaaggtctttcctacagaccgactacacctctcaggtctcatttcccctggtgccatcagcctccctggagagtgtagacgacgtgtgctactatgacagggagccctacctggcccttggtgcaccctccccaactgtgtcctctctgcaggacatgcagggtgagcctggccttctggagaccaaggccttggggctgctggctcctctgagggagaccaagagcacaaacccagcctccagggtcatggagatggagcccgagaccatggaaaccaaatcagtcatcgactctcgagtgtcttctatttctgccattcgcttccggattgaccccaacaataaagagaattctggtgttgtccctgctgccagctcctcagcaagcactcctcactgttctaacccaggttcatctggcccagatactgctcaggcaaggccttcccaaatcttacctctatctcaagacctggatgggattgcccccaaagaaccaaccatagagcatggagacagctccttctccctctccagtggtgaccctaacccagacagagcctgcctggccagcaacccaggactaaataatgtctctcaaggagacacactagagctccagttggagccccatgtccagttggaaatgggattggaatctttttgtacaaatcatatacaagaaactgcccccaaatacacagagcctttgttgtctcctagagatgagcctagaagtgatgaatgtggaataaatccaggagagaagatagcttctatccctacaaaggaagagccacaaggacaactatctctggaaagagacagagaagttacaaacaaaaatggcaccaacgtatttcaggaggagtctaggaaggattcaggtgactccccgggtgatgtgtcaaataatgtttcacagactcttgatattagctctccagctggtaaaatagtaacctccctttctttagatgctcctgtaacagggaccgagcagatcccaccacatccccctagagaccctcaaggacagagcagagaacccccagggcaaggctgccaggctcaagaacaaaaactattcgtagagttggatttagaccctgatttctttcttgggaagcagacagtttcaccagccgtccctccagaggggatcaaggcagaggcacctaaccatgtgacagggcaagatatagcccctagggacagccctgagtgggtctgttttaatcctgagccttccctgccagaaccactaccatgtccacaagaggatcctcacttagaaacttcaaaccattgcttactctcagaaggcaaaagtgacagctctagcatctgcctttctgctgagaagtcttttctgtgctttgccccagaaagccatcctgaagtctctgccagtctcagggtggccacatctttgggttttgcaggcatgaatgagatggtggctcccaggatagggatggaccagtgcagctgtcagttctcctatgccacatgcttccgtggcccgcagcctgagacagaggaagaagacagggacttggaagcacaccccatggcccccctcacctcaccgccctctgcgggaagcccggtggttctgccctggaggcctgcccgagcccacagctgcaccaccgcacccctgtcgaggaaaagccacatctggccagagtactgctccagggcactgagacagctgaaagccacccctgccagcacccctgagggcttcatccaactcatggagagcttgctggagctacaagacattttagaaacttcctggggggttggaaacaaacatcccccagagaagtgcacctggcactttaccgaaagccggagccgcctctgcatgggctcccagaagctcctgtcgagctgtcggcatgtgatcagaatggaccagtcccccgaagagatgcagggggccgtgcgtgacaccttccagcacctggtccagctggccggcctgtgctttcagttcacagactgtagccgctgctccgcccggcacagggaggcagcggggaacctgagggatgtggtgtacacctaccatcagtttatagaggctgctaaatcgacctgcgagagaggctaccacgacctgagtgtgaaactcctggcccgtcagtgcacggccctcacggccgccgtgttctgtttgacccagaagttccgggcatccacggccctgtaaacaggtcaacggcccaagggcctcctgccctgtcctgccttggacacttccctgagaagccccttccactctcccacccaccctcttcaaatgtttactatatagagtattcaaataaactgctgcttaatcttg

SEQ ID NO: 183084 - DNA, 2270 bp, Artificial Sequence
  derived and/or modified sequence
gaattgtctctttaaaatatgagatggctgaagtgggtggagtccctaaatcgtccttcctgaccgaggagaagagagccagactgaagaccaaccccgtgaaggtgcactttgctgaagaagtgctcatcagtggacacagccagggtaattctctgctgtgtatgcccaacgtgctcaagctatacttggagaatggacagaccaaagctttcaagtttgaggcaaacacaaccgtgaaggacatcatcctcaccgtgaaggagaagctgtccatccgaagtatcgagtactttgcactggccctggaagagcagtacagcatctcccggctgcacctgctgcacgaagaggaactcatccagcaggtggtagaaagggaggagtcacatgactaccgctgcctcttcagggtctgttttgttcccaaggaccccctggacctcctgaaagaagaccccgtggcctttgaatacctctatctgcagagctgcagcgatgtgctccaggagcgctttgctgtagaaatgaaatgtagctctgcactccgactcgcggctctgcacatccaggaacggatctacgcctgtgcccagccacagaagatctctttaaagtatatagagaaagactggggaatagagaactttatatctccaactttactccgaaacatgaaaggcaaagacatcaagaaagccattagcttccacatgaagaggaaccagaatttgctggaaccccgacagaagcaacttatttctgctgcccagctacgtttaaattatctacagatcctcggagaactcaagacatatggtggaagaatctttaatgctactttaatgttacaggatagagaatcctacattgcccttctagttggagccaagtatgggattagccaggttatcaatagcaaactcaacatcatgtccacattggcagagtttgcaaacatcagccgtgtagagctaacggaagagtctgagaaagtgagcgtcgtcaaagtgtatcttcaggacgtcaaggttctgactttgctgctggaatccaacagtgcaaaagacctagcctgcctgattgctgggtactacaggctgttggttgacccagttacctccattttcctctggcctggaaacaaacaacaagcgcaccgggtatctgcagaagaaggctatgaatccagggcctgcagtgactcagaggagtcctctgaggtggactgcgtactcgaacctctctctgacaggcgcctggtgaaactggcaccctgcagatcactcataaaggaggagcagcctcctgggaacagccccacacctgaggtggctaggaggggccccagcacctgcggggccagcagcacgacagacagtgccgagtccgaggcgtccgactcagccaacactgagagccgcggctacaggaccagtggctcgagtgagtccatggacgctctggaagaggatgacttagacacctgctcctccagcaggtccaccttcttccactttggctcgccaggcctcgcagagagcattgactctgacagccaggaggagagaagcgggattgaaaccagtggcttcctctgtctcctggacctggcccagagagccaacccccagtgccagaagacagagttttccgagagtgctgctttggagacatttggctgggcaccagaactgagcacagtcaggctggaccccaggctgtatgaaggcagccacgctgactactacagcctgtgttccagtgtctccccggccagctacctgagtgacagttccgagagtacagcttcccggcaagggggagccccgccagcctggggtcagcagggctggactgaggcccagcccagttccatgctggaacccctggccctgcacccaccactggcctttgaggatggcagctcagatgaggaatactatgacgcggctgataagctcactcccccaggccccccgtcaggtgagccgtcccttgcaggtctgcagacacggcaggcagctcctgagtgcctcccggggatcaaggcctggggccaagcttgagaggaaggcacatgagtgaaacagggtccctgtacacttctgaggaggtagatacagattccatggaccaaattttaggcatcgtggcaggcctgcaagggaggttcagacaactgtggcaagcagatgggagggattcatccaacagtgggaatcagggaaggcttcccagaagagggggcaaatgggctgggccctgtg

SEQ ID NO: 183085 - DNA, 189 bp, Artificial Sequence
  derived and/or modified sequence
atggaagagttagagacaagcctttttcagaccaggaaggcgcataggatcgagcagatggtggcaaggtggttaagacggagcagggattcttcagcaagagccaaggttgcagcagccgacgggccagctcggaacccgacccagacccttatccctgttagacatacggtcaagatcgacaagtag

SEQ ID NO: 183086 - DNA, 4737 bp, Artificial Sequence
  derived and/or modified sequence
atggaggaactcgaaactagcctgttccaaacacgaaaggcacatcgaattgagcaaatggtggccaggtggctgcgacggagcagggactcctctgccagagcaaaagtagcagcagctgacgggcctgcacgcaatccaacacagaccctgatcccggtgcggcacaccgtgaagatcgataaagatactctactgcaggactacgggtttcacataagcgagagtcttcccctcactgtggtagcggtcacagcaggcgggtccgcacacgggaagctgtttcccggagatcagatcctgcaaatgaacaatgaacctgccgaggacttgtcttgggagagagcagtcgacatcctgcgggaagcagaggactcgctgagcataacagtcgtccgctgcacttccggggtgcctaaatcttccttcttgactgaggagaaacgggctcgacttaagaccaaccctgtcaaggtgcatttcgcagaagaggttttgatctccggccattcacaggggaacagtctcctctgcatgcctaatgtgctgaagctctacttagagaatggccagacaaaagccttcaaatttgaagccaatactacggtcaaagacattatcctcacggtgaaagaaaaactcagcattcgctccattgagtatttcgctctggcgctggaagagcagtactctatttcacggttgcacctgctgcacgaagaggagctcatccagcaggtcgtcgaaagagaggagtcccacgactatcggtgcctgtttcgagtctgcttcgtgccaaaggatcctctcgatctcctgaaggaggacccggtggcatttgaatacctgtacttgcagtcatgcagcgacgttcttcaggagagattcgccgtggaaatgaagtgtagctccgccttgcggctcgcagcccttcatatccaggaaaggatctacgcctgcgcccaaccacagaagatttctctcaagtacatcgaaaaggactggggcatagagaatttcatttctcctacactgcttaggaatatgaagggaaaagacattaaaaaggctattagctttcatatgaaacgcaaccaaaatctgttggaacctagacagaaacagctgatctccgctgcccagctccggctcaattacctacaaatattgggggaactgaaaacctatggcggtcgaattttcaatgccaccttaatgctgcaggacagggaatcttacatcgccctgctggtgggtgcaaagtatggaatctcccaagtcattaactctaagttgaacataatgagtactttggcagagtttgctaacatatctagagtggaactgactgaggaaagcgagaaggtctccgtggtcaaggtctacctgcaggacgtgaaagtgcttaccctgcttctggaaagcaattccgctaaagacctggcctgcctgattgccgggtattatagactgcttgttgatcccgtcacctcaattttcttgtggcccggaaacaagcagcaggctcacagggtgagtgcggaagaaggttatgagagccgggcctgctcggattccgaagagtcaagcgaggtcgattgtgtgctggagcccttgtccgatcgaaggttggtcaaacttgcaccatgccgctctctcataaaagaagagcagccccccggaaattcacctacaccggaggtcgcaagaaggggcccttcgacctgtggagcctcatctacaacagatagtgcggagtctgaggcgagcgacagtgccaataccgagagtcgcggttaccgcacaagtggcagctcagagtcaatggacgcgttggaggaggatgaccttgatacatgtagctcatcccgctctaccttttttcatttcggcagccctgggctagcagaaagtatcgattctgactcccaagaagagcgttccgggatcgaaacgagcgggtttttgtgtctgctggacctagcacagagagcgaacccccagtgtcagaagactgaattttctgaaagcgcagccctggagactttcggatgggcacctgaattatctaccgtaaggttggatccaagactttacgaagggtcccacgcagactattactctctatgttcttccgtaagtccagcctcctacctgtccgatagcagtgaatctaccgcctcacggcagggcggagctccccctgcctggggccagcagggatggaccgaagcccaacccagttcaatgcttgagccactggcccttcatccccccctggcctttgaggacgggtcctctgacgaagagtactacgacgcagcagacaagctcacccctcctggaccccccagtggccccagggatgtgagcaccgcagaacccagcgctacttcgttacagaataaagcctcaactagtagccccgagaacagcctcccctgcgggccagacgggcgccaacccagcaggagagggggagtaaagaaatacgcgaagacactgcggaaaagacgtagttttctgcaaactgactataccagccaggtttcctttcccctagttccaagcgcctcccttgaatcggtggatgatgtttgttattacgatcgtgagccataccttgccctgggagctccttctcccactgtgtcctccctacaggacatgcagggggagcccggattgctggaaactaaggccctgggactactggcaccactccgagaaactaaaagtacgaatccggcttcaagagtgatggagatggagcccgaaactatggagacaaaaagtgtgatagattctcgcgtgtcaagcatctccgccatccggttcagaatcgatccaaacaataaggaaaacagcggggtggtacctgcagctagttcctcagcgagtaccccccactgctctaaccctggttcgtctgggccagacacagctcaggctcgtcctagccagatactccccctctcacaagacttagacgggattgccccgaaggagccaacgattgaacatggcgattcctccttttccctttcgagcggcgatcctaatcccgacagagcctgtcttgcttccaatcctggcctcaacaatgtgtcgcagggtgataccctggaactgcagttggagccccacgttcagcttgaaatgggcttggagagcttctgcactaatcacattcaagaaactgccccaaagtacacagaaccccttttgtctccacgggatgagccccggagtgacgaatgcgggatcaaccctggcgagaagatcgcctcaattccgactaaggaggagccccagggccaactatccctggagagggatcgcgaagttaccaataagaatggtaccaatgtctttcaagaggagtcccgcaaggactcaggcgactcacccggcgatgtatccaacaacgtttcgcagacgttggacatctccagccctgccggtaaaatcgtgacctctctgagcctggatgcccctgtcactgggactgaacagattcccccccaccccccaagggatcctcaggggcaatcaagggagcccccgggccagggctgccaggcccaggaacaaaagctctttgtggagcttgacctcgaccccgacttctttctgggaaaacaaactgtctcccccgccgtgcccccagaaggcatcaaagctgaagcccccaaccacgtgacaggccaggatattgcaccgcgcgactcgccagagtgggtgtgcttcaaccccgaacccagcctccccgaacccttgccttgccctcaggaggatccgcatctggagacaagcaaccattgtctgctgagcgaagggaagagcgactccagcagcatctgcttatccgctgagaagagcttcctgtgcttcgcccccgaatcccaccctgaggtgagcgcaagcctccgagtggcgaccagtctaggatttgccgggatgaacgaaatggttgcaccgcgcattggcatggatcagtgtagttgccagtttagctatgccacttgcttccgcggcccacagcctgagaccgaagaggaagatagagatctcgaggctcatccaatggcccccctgactagccctccaagtgctgggagcccagtcgttctcccttggcgccctgctcgcgcccattcctgtaccactgctcccctctctcggaaatcgcacatctggccagaatattgtagccgggcactgcgccagctgaaggctactccggcctctacaccagaaggatttatccagctaatggagtctctactggaactccaagacattctcgaaactagctggggtgtcggcaataagcacccaccagagaagtgcacctggcacttcacagaaagcaggagtagattgtgtatgggaagccagaaattactgtcttcctgtaggcacgtcatacgtatggatcagtccccggaggaaatgcaaggcgctgtccgcgacacctttcagcacctcgttcagctcgctggcctttgcttccagtttaccgattgcagccgatgttcagcccgacaccgggaagcggctgggaatctcagagacgttgtgtatacataccaccagtttattgaggccgccaagtcaacctgcgagcgcggctatcatgacctctccgtcaagcttttggcacggcaatgcactgctctgaccgcagccgttttctgtctcactcagaagttccgagcaagcacggctctctag

SEQ ID NO: 183087 - DNA, 1905 bp, Artificial Sequence
  derived and/or modified sequence
atgcctaacgtcctgaaattatacctagaaaacggccagacaaaggcctttaaatttgaggcgaataccacagtcaaggatatcattcttaccgtgaaggagaagttgtctatcagatccatcgaatacttcgccctagcattggaagaacagtatagcatctcacggttacatctgctgcatgaagaagagttaatccaacaagtggtcgagagagaggaaagtcacgactatcgctgtctgtttcgggtgtgcttcgtgcccaaggatcccctagatctgctgaaggaggatccggtcgccttcgaatatctctacctccagtcatgttccgatgtactgcaggagcgctttgccgtcgaaatgaagtgttcaagcgccctgcggctcgctgcgctccatatccaggagcgtatctacgcatgcgctcagccccagaagatttcattgaagtatattgaaaaggactggggcatcgagaacttcatttctcctacactcctccgcaatatgaagggcaaggacatcaagaaggccatatcctttcacatgaaacgtaatcaaaatttactggagccccgccagaagcagctaataagtgccgcgcagctgagattgaactatctgcagattttgggagagctcaagacatatggtggtaggattttcaacgccactctcatgttgcaggatcgtgagtcgtacattgccttattggttggcgccaagtacggaatttcccaggtgatcaactccaaactgaacatcatgtctaccctcgcggaatttgcaaacataagccgtgtggaactgacagaggagagcgaaaaagtctccgtggtgaaggtttacttacaggacgtgaaggtgttgacgctactgcttgagtctaactcggcaaaggacttggcctgcctgatcgcagggtattaccggctgctcgtggaccctgtcacttccatctttttgtggcccggcaacaaacagcaagctcaccgggtgagcgctgaggaggggtatgaatcacgggcttgctctgattccgaggaaagttctgaggtagactgtgtcctggaaccgctgtccgacagaagactggttaagctggcaccctgtcggagcctgattaaggaggaacaaccccctggtaattccccaaccccagaggtagctcgacggggcccgtccacctgcggtgcctcttctaccactgattctgcagagtctgaggcaagcgattctgctaacactgaaagccggggttaccggacctccggcagcagcgaaagcatggatgctctggaagaagatgacctcgacacgtgtagttcgtcaaggtcgactttctttcacttcggatcacctggcctggcagaaagcattgactcagactctcaggaagaaagatccggaatcgagaccagcggctttctgtgtttgctcgacttggcccagagagccaatccccagtgccaaaaaactgaattctctgaaagtgccgcattagagaccttcggctgggctcccgagttaagcactgtaagactcgaccctcggctctacgagggttcacacgccgactactatagtctctgttcctcagtctcccccgcctcatacctgagcgattccagcgaaagtaccgcaagtcggcagggaggcgccccacctgcttgggggcagcaaggctggacggaagcacagccctcaagcatgctcgagccactcgctctgcaccctcctcttgcttttgaggacgggtcttcagacgaggagtactacgacgcagctgacaaactgactccgcccggccccccctcgggggagccttcactcgcaggtcttcagacacggcaggccgctcccgagtgtctacccggtatcaaagcctggggccaggcttag

SEQ ID NO: 183088 - DNA, 4737 bp, Artificial Sequence
  derived and/or modified sequence
atggaggaactcgagacctccctatttcagacacgcaaggctcaccgaatcgagcagatggtggcccgctggctcaggcgtagtcgcgactcctcagccagagccaaagtcgcagccgccgacggccccgcacgcaatcccactcagacattaattcccgtgcgccatacagttaaaattgacaaggatacgcttctgcaagactacgggtttcacataagcgagagcttgcctctgaccgtggttgccgtgaccgcaggaggctccgctcatggcaagttgtttccaggcgaccagattttacagatgaacaacgaacctgccgaagacctgtcctgggagagggccgtggatattctgagggaagcagaagattcactaagcatcacagttgtacgatgtacaagtggagttcctaaatcctcctttctcaccgaggagaagcgggctaggttaaagacaaatccagtcaaggtccacttcgccgaagaggttctgataagcgggcatagccagggcaacagtcttctatgtatgcctaacgtcctgaagttataccttgagaacggacagactaaagcgttcaagttcgaggccaacaccacagtgaaggacattatcctgaccgtgaaagaaaaattatcgattaggagtattgaatactttgctctggcactggaagagcagtacagcatcagtaggctccatttgctccatgaggaagaactgatacaacaggtagtggagcgcgaggaaagccatgactataggtgcctttttcgcgtctgtttcgtccctaaggatccattggacctgttaaaagaggaccctgtcgcctttgaatacctctatcttcagtcgtgtagtgacgttctgcaagaacggttcgccgtcgagatgaaatgttctagcgcactgaggctggcagccctacatatacaggagagaatttatgcttgtgcccagccccagaaaatttcgcttaaatatatcgagaaggattggggtattgaaaatttcatttcacctacgctactgcgaaacatgaaggggaaagatataaagaaggcaatctcattccacatgaaacgcaaccagaacttactagagccccgtcaaaagcaattgatcagcgctgctcagctgaggctgaactacctgcagatccttggcgagttgaaaacttacggaggtcggattttcaacgccaccctgatgctccaagaccgtgaatcctacatcgctctcctggtgggtgccaaatacgggataagccaagtgattaactccaagctgaacattatgagtactctggccgagttcgctaacattagccgtgtggagctgacggaagagagcgaaaaggtgtctgtcgttaaggtttacctccaagacgtcaaagttttgaccttgctgcttgagtctaatagtgccaaagatctggcctgtttgatagcaggctactacaggcttctggtggacccagtcacctccatcttcttgtggccagggaataagcagcaggcacacagagtttcggccgaagagggctatgagtccagagcttgttcggactccgaagagtcctccgaggtagattgtgtgctggaacccctgagcgaccgccgactggtgaaactcgccccctgtcgatcattaataaaggaggagcagccgcctgggaactcgcccacccctgaagttgctcgcagggggccctcgacgtgcggcgcctcttcaactactgattccgcagagtcggaggctagtgactccgctaacacggagtctcgtggatacaggacatccggttctagtgaaagcatggacgcgctcgaagaagacgatctggatacatgcagtagctctagatctaccttcttccatttcgggtcacccggactggccgaatccatagacagtgattcacaagaggagagatcaggtatcgagactagcggattcttatgtctgcttgatctggcgcagcgtgcaaatccccagtgccaaaaaaccgagttctcagagtctgcagccctggaaacctttgggtgggctccagaattgtctactgtgcgtttggaccctcgcctgtacgagggttcccatgccgactattattccctgtgctcaagcgtgagccctgcttcttatctgagcgacagtagtgagtcaacagcgtcccgccaggggggagctcctccggcctggggccagcagggatggaccgaggcacagccgtcctctatgttggaaccactggccctccaccctccactagcattcgaggatgggagtagtgatgaggagtattacgatgccgccgataaactcacacctccaggcccgccatcaggccctcgagatgtgagtacagccgagccttccgctacgagcctgcagaataaagcttccacttcatcccccgaaaactctctgccctgcggccccgacggaaggcagccatcccggcgcggtggagtgaaaaaatacgctaagactctgcgaaaaagaaggtcctttctgcagactgactatacaagccaagttagcttcccgctggtgccaagcgcctcccttgagtccgttgacgatgtgtgctactacgaccgagagccataccttgctctgggcgccccaagccctaccgtctcatccctgcaggacatgcagggagaaccagggctcttggaaaccaaagctcttgggctgcttgcccccctgcgcgagacgaaaagtaccaatccggccagcagggtgatggaaatggaacctgagacgatggaaacaaagagcgtgattgactctcgcgtgtcctctattagcgccataaggttccgaatcgatccgaacaacaaggaaaattctggcgttgtccccgctgcctcttcctctgcatctacccctcactgtagtaaccccggaagttccggccccgatacggcacaagcgagaccctcacagattctgccgctgtcccaggatctggacgggatcgcacccaaggagcccaccattgagcacggggactcaagtttttctctctcctcgggcgaccccaatcctgatagggcttgcctggccagcaatccaggccttaataatgtttctcagggggatacgttggagctgcagcttgaacctcatgtgcagttagagatgggacttgaatcattctgtaccaaccatatccaagagaccgcccctaagtacactgagcccttactgtcgcctagagatgagccccggtccgatgaatgtggaattaaccccggtgagaagattgcatccatacccacaaaggaagaaccccaaggccagctatctctcgaaagggatcgcgaggtcacaaataaaaacggcaccaacgtattccaggaagagtcaagaaaggactctggtgactcgcctggtgacgtgagcaacaacgtttcacaaaccttggacatcagttcccccgcaggtaagatcgtgacctccctctcactggacgcccctgtcaccggcacagagcaaattcccccgcatcctccccgtgacccccagggccagtctcgggaaccccctggacagggatgccaggcacaggagcagaaattgtttgtcgagctggatcttgatcccgacttctttctgggcaaacagacggtgtcacccgccgtgcctccggagggcatcaaggccgaggctccaaaccacgtaacaggtcaggacatcgcgcctagagacagtcctgaatgggtgtgctttaatccagagcccagcctcccagaacctctcccctgtccccaggaggaccctcaccttgagacttcaaaccactgcctcctgagtgaaggcaagagtgacagctcctcaatttgtttgtccgctgaaaagtcatttctgtgctttgcgcctgaatcccatcccgaggtctcagcatccctgcgcgttgccacatccctgggcttcgccgggatgaacgaaatggtggctcctcggatcggcatggatcagtgctcttgtcagttttcttacgccacctgtttcagaggaccacagccagagacagaagaggaggaccgggatctagaggcccaccccatggctcctctcacttcaccaccatccgctggcagtccagtggtcttgccctggcgaccggcgcgcgcccacagctgtacaactgcacccctctctcgtaagtcacatatttggcccgaatactgcagccgggccttgagacaactgaaagccacccccgctagcacaccagagggcttcattcagttgatggagtcactgcttgagcttcaggatatccttgagacaagttggggtgttgggaataagcatccccccgagaagtgtacctggcactttactgagagtcggtcgagactgtgcatgggctcccagaagctcctgagttcttgcaggcatgtcatacgcatggatcaatctccagaggagatgcaaggggccgttcgagatacattccagcacttagtgcagttagctggactttgttttcaattcaccgactgttcaagatgtagcgcacgccatagagaggccgccggtaatctgcgtgacgtggtctacacgtaccaccagtttatcgaggccgcaaagtctacatgtgagcgcggctaccatgatctgtctgttaagttgctggcaaggcaatgtaccgcattaacagccgctgttttctgccttacccagaagtttcgagccagcactgcattgtag

SEQ ID NO: 183089 - DNA, 2046 bp, Artificial Sequence
  derived and/or modified sequence
atggcagaggtgggcggggtcccaaagtcttcgtttctgaccgaggagaaacgcgccagattaaagacaaatcctgttaaagtgcacttcgctgaagaagtgttgatatcgggacactcccaagggaacagcctcctctgcatgcctaatgtgctgaaattatatctcgaaaatggtcagactaaagccttcaagttcgaggccaacaccacagtgaaagacattatcctcaccgtgaaggagaagctgagcatccggtccattgagtactttgcattggccctggaggagcagtactcaatctcccggcttcatctgttgcatgaagaagaacttattcagcaggtagttgaacgcgaggagagccacgactaccgctgtctgttccgggtgtgctttgtgcctaaagacccactggacttgctaaaagaggatcctgtggctttcgagtacttgtatctgcagtcttgtagtgacgttctgcaagaaaggttcgccgtagaaatgaaatgcagcagcgctttgaggctggccgccctacatattcaggagagaatctatgcttgtgcgcaaccacagaaaattagcttaaaatacatagaaaaggactggggcatcgaaaatttcatctcaccaaccctgctgcgaaatatgaagggaaaggacatcaaaaaagcaataagttttcatatgaagaggaatcagaatctcctagaacctcgacaaaaacagctgatctccgctgcccaactgcgcttgaactatctgcaaatactgggtgaactcaagacctacggagggcgaattttcaacgcgacactgatgcttcaagacagagagtcctacattgccctgctggtgggggcaaaatacgggatttcccaagtaattaacagtaaattgaatataatgtcaactctggctgaattcgccaatatttctagggtggagctcaccgaggagtctgagaaggtgtctgtggtgaaagtctaccttcaggacgttaaggtactgaccctcttgctggaatccaattctgctaaggacttggcctgtctcattgcagggtactatcggctcctggtggacccagtgacatcaatttttctgtggcctggtaataagcaacaagctcacagagttagtgccgaggaagggtacgagagtagagcctgttccgacagcgaagagtcgtcggaggtggattgtgttctcgagcctctcagtgaccggcgactcgtgaaactagccccttgccgctcattaattaaagaggagcaacctccaggaaattcgccaaccccagaggtagcgcgtcggggaccaagcacttgtggcgccagctccaccacagacagcgccgagtcagaggcgtctgactccgccaataccgaaagtagaggctataggactagcgggtcatccgaaagcatggacgccctggaagaggatgatctcgatacgtgttcatcctcccggtcaacctttttccattttggtagtcctgggctggccgagtccatcgatagcgacagtcaggaggaaaggtccggtatagaaacatcgggcttcctatgtttgttagatctggcccagcgggcaaatccccagtgccaaaagaccgagttctcagagtctgcagccctggaaacctttggctgggccccggagctgagcactgtgcgacttgatccccgactgtatgagggctcacacgctgattattactccctgtgctctagcgtctcacctgccagctatctgagcgatagttcggagtctactgcctctagacaagggggtgcccctcctgcgtggggtcagcagggctggaccgaggcccagccctcctcaatgctggagccactggctctgcacccgccgttggcttttgaagacggatccagcgacgaggaatactatgacgcagccgataagctgacgccaccaggacccccaagcggcgaaccctcactcgcaggccttcaaacaagacaggctgccccagaatgtcttcctggcatcaaggcatggggccaggcttag

SEQ ID NO: 183090 - DNA, 189 bp, Artificial Sequence
  derived and/or modified sequence
atggaggagctggagaccagcctcttccagaccaggaaggcccacagaattgagcagatggtggcccgctggctgcggcgcagccgggacagcagcgcccgggccaaggtggccgctgctgatggccctgccaggaaccccacccagaccctcatccctgtgcgccacacagtgaagattgacaagtag

SEQ ID NO: 183091 - DNA, 4737 bp, Artificial Sequence
  derived and/or modified sequence
atggaggagctggagaccagcctcttccagaccaggaaggcccacagaattgagcagatggtggcccgctggctgcggcgcagccgggacagcagcgcccgggccaaggtggccgctgctgatggccctgccaggaaccccacccagaccctcatccctgtgcgccacacagtgaagattgacaaggacaccctgctgcaggactatggcttccacatcagcgagagcctgcccctgactgtggtggccgtgacagctgggggcagcgcccacggcaagctgtttcctggggaccagatcctgcagatgaacaatgaacctgctgaggacctgtcctgggagagagctgtggacatcctgcgggaggccgaggacagcctgagcatcaccgtggtgcgctgcaccagcggcgtgcccaagagcagcttcctgacagaggagaagagggcccggctgaagaccaaccctgtgaaggtgcactttgctgaggaggtgctgatcagcggccacagccagggcaacagcctgctgtgcatgcccaacgtgctgaagctgtacctggagaatggccagaccaaggccttcaagtttgaggccaacaccaccgtgaaggacatcatcctgactgtgaaggagaagctgagcatccgcagcattgagtactttgccctggccctggaggagcagtacagcatcagccggctgcacctgctgcacgaggaggagctgatccagcaggtggtggagcgggaggagagccatgactaccgctgcctcttccgggtgtgctttgtgcccaaggaccccctggacctgctgaaggaggaccctgtggcctttgagtacctgtacctgcagagctgcagtgatgtgctgcaggagagatttgctgtggagatgaagtgcagcagcgccctgcggctggccgccctgcacatccaggagcgcatctatgcctgtgcccagccccagaagatcagcctgaagtacatcgagaaggactggggcatcgagaacttcatcagccccaccctgctgaggaacatgaagggcaaggacatcaagaaggccatctccttccacatgaagaggaaccagaacctgctggagccccggcagaagcagctgatctctgctgcccagctgcggctgaactacctgcagatcctgggggagctgaagacctacggcggccgcatcttcaatgccaccctgatgctgcaggaccgggagagctacatcgccctgctggtgggcgccaagtatggcatcagccaggtgatcaacagcaagctgaacatcatgagcaccctggccgagtttgccaacatcagccgggtggagctgacagaggagagcgagaaggtgtctgtggtgaaggtgtacctgcaggatgtgaaggtgctgaccctgctgctggagagcaacagcgccaaggacctggcctgcctgattgctggctactaccgcctgctggtggaccctgtgaccagcatcttcctgtggccaggcaacaagcagcaggcccaccgggtgtctgctgaggagggctatgagagccgggcctgcagcgacagcgaggagagcagcgaggtggactgtgtgctggagcccctgagtgaccggcggctggtgaagctggccccctgccgcagcctcatcaaggaggagcagcccccaggcaacagccccaccccagaggtggcccggcggggccccagcacctgtggggccagcagcaccacagacagcgctgagagcgaggccagtgacagcgccaacacagagagccggggctaccgcaccagcggcagcagcgagagcatggatgccctggaggaggatgacctggacacctgcagcagcagccgcagcaccttcttccacttcggcagccctggcctggccgagagcattgacagcgacagccaggaggagaggagcggcatcgagaccagcggcttcctgtgcctgctggacctggcccagagggccaacccccagtgccagaagacagagttcagcgagagcgctgccctggagaccttcggctgggcccctgagctgagcacagtgcggctggacccccggctgtatgagggcagccacgccgactactacagcctgtgcagctctgtgtccccagccagctacctgagtgacagcagcgagagcacagccagccggcagggcggggcccccccagcctggggccagcagggctggacagaggcccagcccagctccatgctggagcccctggccctgcacccccccctggcctttgaagatggcagcagtgatgaggagtactatgatgctgctgacaagctgaccccacctggccccccatctggccccagagatgtgtccacagctgagcccagcgccaccagcctgcagaacaaggccagcaccagcagccctgagaacagcctgccctgtggcccagatggccggcagcccagccggcggggcggcgtgaagaagtatgccaagaccctgaggaagaggaggagcttcctgcagacagactacaccagccaggtgtccttccccctggtgcccagcgccagcctggagagcgtggatgatgtgtgctactatgaccgggagccctacctggccctgggcgcccccagccccaccgtgagcagcctgcaggacatgcagggcgagcccggcctgctggagaccaaggccctgggcctgctggcccccctgcgggagaccaagagcaccaacccagccagccgggtgatggagatggagcctgagaccatggagaccaagagcgtcatcgacagccgggtgagcagcatcagcgccatccgcttcagaattgaccccaacaacaaggagaacagcggcgtggtgcctgctgccagcagcagcgccagcaccccccactgcagcaaccctggcagcagcggccctgacacagcccaggcccggcccagccagatcctgcccctgagccaggacctggatggcatcgcccccaaggagcccaccatcgagcacggggacagcagcttcagcctgagcagcggggaccccaacccagaccgggcctgcctggccagcaaccctggcctgaacaacgtgtcccagggcgacaccctggagctgcagctggagccccacgtgcagctggagatgggcctggagagcttctgcaccaaccacatccaggagacagcccccaagtacacagagcccctgctgagccccagagatgagcccaggagtgatgaatgtggcatcaaccctggagagaagatcgccagcatccccaccaaggaggagccccagggccagctgagcctggagcgggaccgggaggtgaccaacaagaatggcaccaacgtgttccaggaggagagcaggaaggacagcggggacagccctggagatgtgagcaacaacgtgtcccagaccctggacatcagcagccctgctgggaagatcgtgaccagcctgagcctggatgcccctgtgactggaacagagcagatccccccccaccccccccgggacccccagggccagagccgggagcccccaggccagggctgccaggcccaggagcagaagctgtttgtggagctggacctggaccctgacttcttcctgggcaagcagacagtgtccccagctgtgcccccagagggcatcaaggccgaggcccccaaccacgtgacaggccaggacatcgccccccgggacagccctgagtgggtgtgcttcaaccctgagcccagcctgcctgagcccctgccctgcccccaggaggacccccacctggagaccagcaaccactgcctgctgtctgagggcaagagtgacagcagcagcatctgcctgtctgctgagaagagcttcctgtgctttgcccctgagagccaccctgaggtgtctgccagcctgcgggtggccaccagcctgggctttgctggcatgaatgagatggtggcccccagaattggcatggaccagtgcagctgccagttctcctatgccacctgcttccggggcccccagcctgagacagaggaggaggaccgggacctggaggcccaccccatggcccccctgaccagccccccatctgctggcagccctgtggtgctgccctggaggcctgcccgggcccacagctgcaccacagcccccctgagcaggaagagccacatctggccagagtactgcagccgggccctgcggcagctgaaggccaccccagccagcaccccagagggcttcatccagctgatggagagcctgctggagctgcaggacatcctggagacctcctggggcgtgggcaacaagcaccccccagagaagtgcacctggcacttcacagagagccgcagccggctgtgcatgggcagccagaagctgctgagcagctgcagacatgtgatccgcatggaccagagccctgaggagatgcagggcgctgtgcgggacaccttccagcacctggtgcagctggccggcctgtgcttccagttcacagactgcagccgctgcagcgcccggcaccgggaggccgccggcaacctgagagatgtggtgtacacctaccaccagttcattgaagctgccaagagcacctgtgagcggggctaccatgacctgtctgtgaagctgctggcccggcagtgcacagccctgacagctgctgtgttctgcctgacccagaagttccgggccagcacagccctgtag

SEQ ID NO: 183092 - DNA, 1905 bp, Artificial Sequence
  derived and/or modified sequence
atgcccaacgtgctgaagctgtacctggagaatggccagaccaaggccttcaagtttgaggccaacaccaccgtgaaggacatcatcctgactgtgaaggagaagctgagcatccgcagcattgagtactttgccctggccctggaggagcagtacagcatcagccggctgcacctgctgcacgaggaggagctgatccagcaggtggtggagcgggaggagagccatgactaccgctgcctcttccgggtgtgctttgtgcccaaggaccccctggacctgctgaaggaggaccctgtggcctttgagtacctgtacctgcagagctgcagtgatgtgctgcaggagagatttgctgtggagatgaagtgcagcagcgccctgcggctggccgccctgcacatccaggagcgcatctatgcctgtgcccagccccagaagatcagcctgaagtacatcgagaaggactggggcatcgagaacttcatcagccccaccctgctgaggaacatgaagggcaaggacatcaagaaggccatctccttccacatgaagaggaaccagaacctgctggagccccggcagaagcagctgatctctgctgcccagctgcggctgaactacctgcagatcctgggggagctgaagacctacggcggccgcatcttcaatgccaccctgatgctgcaggaccgggagagctacatcgccctgctggtgggcgccaagtatggcatcagccaggtgatcaacagcaagctgaacatcatgagcaccctggccgagtttgccaacatcagccgggtggagctgacagaggagagcgagaaggtgtctgtggtgaaggtgtacctgcaggatgtgaaggtgctgaccctgctgctggagagcaacagcgccaaggacctggcctgcctgattgctggctactaccgcctgctggtggaccctgtgaccagcatcttcctgtggccaggcaacaagcagcaggcccaccgggtgtctgctgaggagggctatgagagccgggcctgcagcgacagcgaggagagcagcgaggtggactgtgtgctggagcccctgagtgaccggcggctggtgaagctggccccctgccgcagcctcatcaaggaggagcagcccccaggcaacagccccaccccagaggtggcccggcggggccccagcacctgtggggccagcagcaccacagacagcgctgagagcgaggccagtgacagcgccaacacagagagccggggctaccgcaccagcggcagcagcgagagcatggatgccctggaggaggatgacctggacacctgcagcagcagccgcagcaccttcttccacttcggcagccctggcctggccgagagcattgacagcgacagccaggaggagaggagcggcatcgagaccagcggcttcctgtgcctgctggacctggcccagagggccaacccccagtgccagaagacagagttcagcgagagcgctgccctggagaccttcggctgggcccctgagctgagcacagtgcggctggacccccggctgtatgagggcagccacgccgactactacagcctgtgcagctctgtgtccccagccagctacctgagtgacagcagcgagagcacagccagccggcagggcggggcccccccagcctggggccagcagggctggacagaggcccagcccagctccatgctggagcccctggccctgcacccccccctggcctttgaagatggcagcagtgatgaggagtactatgatgctgctgacaagctgaccccacctggccccccatctggagagcccagcctggccggcctgcagacccggcaggccgccccagaatgtctgcccggcatcaaggcctggggccaggcctag

SEQ ID NO: 183093 - DNA, 2046 bp, Artificial Sequence
  derived and/or modified sequence
atggccgaggtgggcggcgtgcccaagagcagcttcctgacagaggagaagagggcccggctgaagaccaaccctgtgaaggtgcactttgctgaggaggtgctgatcagcggccacagccagggcaacagcctgctgtgcatgcccaacgtgctgaagctgtacctggagaatggccagaccaaggccttcaagtttgaggccaacaccaccgtgaaggacatcatcctgactgtgaaggagaagctgagcatccgcagcattgagtactttgccctggccctggaggagcagtacagcatcagccggctgcacctgctgcacgaggaggagctgatccagcaggtggtggagcgggaggagagccatgactaccgctgcctcttccgggtgtgctttgtgcccaaggaccccctggacctgctgaaggaggaccctgtggcctttgagtacctgtacctgcagagctgcagtgatgtgctgcaggagagatttgctgtggagatgaagtgcagcagcgccctgcggctggccgccctgcacatccaggagcgcatctatgcctgtgcccagccccagaagatcagcctgaagtacatcgagaaggactggggcatcgagaacttcatcagccccaccctgctgaggaacatgaagggcaaggacatcaagaaggccatctccttccacatgaagaggaaccagaacctgctggagccccggcagaagcagctgatctctgctgcccagctgcggctgaactacctgcagatcctgggggagctgaagacctatggaggccgcatcttcaatgccaccctgatgctgcaggaccgggagagctacatcgccctgctggtgggcgccaagtatggcatcagccaggtgatcaacagcaagctgaacatcatgagcaccctggccgagtttgccaacatcagccgggtggagctgacagaggagagcgagaaggtgtctgtggtgaaggtgtacctgcaggatgtgaaggtgctgaccctgctgctggagagcaacagcgccaaggacctggcctgcctgattgctggctactaccgcctgctggtggaccctgtgaccagcatcttcctgtggccaggcaacaagcagcaggcccaccgggtgtctgctgaggagggctatgagagccgggcctgcagcgacagcgaggagagcagcgaggtggactgtgtgctggagcccctgagtgaccggcggctggtgaagctggccccctgccgcagcctcatcaaggaggagcagcccccaggcaacagccccaccccagaggtggcccggcggggccccagcacctgtggggccagcagcaccacagattctgctgagagcgaggccagtgacagcgccaacacagagagccggggctaccgcaccagcggcagcagcgagagcatggatgccctggaggaggatgacctggacacctgcagcagcagccgcagcaccttcttccacttcggcagccctggcctggccgagagcattgacagcgacagccaggaggagaggtctggaattgagaccagcggcttcctgtgcctgctggacctggcccagagggccaacccccagtgccagaagacagagttcagcgagagcgctgccctggagaccttcggctgggcccctgagctgagcacagtgcggctggacccccggctgtatgagggcagccatgctgactactacagcctgtgcagctctgtgtccccagccagctacctgagtgacagcagcgagagcacagccagccggcagggcggggcccccccagcctggggccagcagggctggacagaggcccagcccagctccatgctggagcccctggccctgcacccccccctggcctttgaagatggcagcagtgatgaggagtactatgatgctgctgacaagctgaccccacctggcccccccagcggggagcccagcctggccggcctgcagacccggcaggccgcccctgagtgcctgcccggcatcaaggcctggggccaggcctag

SEQ ID NO: 183094 - DNA, 189 bp, Artificial Sequence
  derived and/or modified sequence
atggaggagctggagaccagcctgttccagacccggaaggcccaccggatcgagcaaatggtggctagatggttaagacggagtagggatagctccgcccgcgcgaaagttgcagccgcggacgggccagcaaggaaccccacccaaacactcatccccgttaggcacacagtcaaaatcgacaagtag

SEQ ID NO: 183095 - DNA, 4737 bp, Artificial Sequence
  derived and/or modified sequence
atggaggagctggagaccagcctgttccagacccggaaggcccacagaatagaacaaatggtggcccgatggttgagacggagcagagatagcagtgcacgcgccaaagtggcggcagcggacggccctgcccgcaacccaactcagaccctaattccggtgagacacaccgtgaagatagacaaagatacactgctgcaagactatgggtttcacatttccgaatcattacccctaacagtggttgccgtgacagcgggtgggtctgctcatgggaagttgtttcccggagaccagatcctgcagatgaataatgaacccgcagaagacctcagctgggaacgagcagtagatattctgagagaagcagaggattcccttagtatcactgttgttcgctgcacctctggagtaccaaagagttcttttctgactgaggaaaagagggcacgcctcaagactaatcccgttaaggtccactttgccgaggaagtgctgatcagtggtcacagccagggtaattcactcttgtgcatgcctaatgttctaaaactgtacttggagaatggccagacaaaagccttcaaatttgaggctaataccaccgtaaaggacataattttgacggtgaaggaaaagctttccattcgtagtatagagtacttcgcgcttgccctcgaggaacagtactccataagccgtctccatctgctgcacgaggaggagctcatacaacaggtggtcgaaagggaggagagccacgattataggtgtctatttcgagtgtgtttcgtgccaaaggaccccctcgacctcctgaaggaggatccagtggctttcgagtacttgtacctgcagtcctgcagtgacgtgcttcaggaaaggtttgccgttgaaatgaagtgttcaagtgccctgagactggccgcgctgcacatccaggagaggatttacgcttgcgcccagccccagaaaatctcgcttaagtatatcgagaaggactggggaatcgagaacttcataagtccaactctgcttcgaaatatgaagggcaaggatatcaaaaaggctatcagtttccacatgaaacggaaccaaaacttacttgagcctaggcagaagcagctgatcagcgccgctcagctgcgacttaactatctgcaaatacttggtgagcttaaaacatatggcggaagaatttttaacgcaaccttaatgttgcaagatcgagagagctacatcgccctgttggtgggcgccaagtacggaatctcacaggtgatcaattctaaactcaacatcatgtctaccctggctgagtttgcgaacatctctcgggttgagctgacagaagagtccgagaaggttagcgtcgtgaaagtctacctgcaggacgtcaaagtgctgacacttctactggagtctaatagcgccaaagatcttgcttgcctcattgctggatactatcgcctcttggtggatcccgtgacatccatattcctctggcccgggaacaaacagcaggctcatcgtgtgtctgcagaggagggatacgagtcccgtgcctgtagtgacagcgaggaaagctcagaagtggactgcgtcctggagcctctctccgatcgccggctggttaaactcgccccgtgccgaagcctgattaaagaggaacagccgccagggaatagtccaactccggaggttgccagacggggaccaagcacctgtggcgccagttccactactgacagtgcagagagcgaggcctccgatagcgcaaatactgagagccgaggctaccgtacctctggaagttcagaatcaatggacgctttagaggaagatgatcttgatacctgctccagcagcaggtctaccttcttccacttcgggtctcccggcctcgcagagtcgatcgattccgactcccaggaggagagatccggtattgagacttcgggctttctctgcctcctcgacctcgctcagcgcgcaaatccgcagtgccagaaaacggaatttagcgagagcgcagcccttgagaccttcggttgggcccctgaactgtcaaccgtgcgactagaccccagactgtacgaagggtcgcacgcggactactactctctgtgtagttccgtcagccctgccagttacttgtccgactccagtgagtctactgcttcccgtcaagggggggcaccgcctgcctgggggcagcaaggctggactgaggcccagcctagcagcatgctagaacctctggccctacacccacctcttgcctttgaagatggctctagtgatgaggaatactatgatgctgctgacaaattaaccccccctggccctccctcgggcccaagagacgtgtctaccgctgagccgtctgccacgtcgctgcagaacaaggccagcacctcctcacccgaaaatagcctgccctgtggccccgatggccgccaaccgtctagacgggggggtgtgaagaagtacgctaagactctgcggaagaggcgatcattcctgcagaccgattacactagccaggtctcattcccactggtgccaagtgcgtccctcgaatccgtggatgacgtgtgttattacgaccgggagccgtatctggccctcggggcaccgagtccaacagtcagctcccttcaggacatgcagggcgagccaggcttgcttgagacaaaggccttgggtctcctggcaccactcagagagactaagtctaccaatcctgccagtcgggtgatggagatggagccagagacaatggaaaccaagtcggtcatcgattctagagtgtccagcatttcagcaatacgcttcaggatcgaccccaacaataaagaaaactctggagttgtgcccgctgcatctagcagcgcgtcgaccccacactgctccaatcctggcagcagcgggccagatactgcccaggctaggccttcccaaatcctgccactcagccaggatttggacggcatcgctcctaaagaacctactattgagcacggggattccagttttagcctctcttctggtgatccaaaccctgatcgcgcctgcctggcctctaatccagggttgaacaacgtgtcacagggagacacattggaactacagctggagccccacgtccaattagagatgggactcgaaagcttctgcaccaatcacatacaggagaccgcccccaagtataccgagcccttgctgtccccacgggatgagcctagaagcgatgaatgtggtatcaaccccggtgaaaagattgcctccatcccgaccaaggaggaaccacaggggcaactgtccctcgagcgggacagggaagttaccaacaagaatgggactaacgtgtttcaggaggagtcacgaaaggattcaggcgactctcctggggacgtctctaacaacgtttcacagaccctcgatattagctcgcctgcaggcaaaatcgtgacctccctttcccttgatgcaccggtcacaggcaccgaacagatcccacctcaccctccaagggatccacagggccagagtcgtgagccacctggtcagggctgtcaggcccaagaacagaagctgttcgttgagctggacctggatccagacttctttctaggtaagcagacagtctcacccgctgtgccccccgaggggataaaagccgaagcccccaatcacgtgactggacaggacatcgcgccccgcgactcccctgagtgggtgtgctttaaccccgagccgagtttgccagagcctttaccctgtccccaggaggacccacacctcgagacttccaatcattgcttgctgtctgaggggaagtccgatagctccagcatatgtttgagtgcggaaaaatcctttctctgcttcgccccagagtcacacccagaggtctcagcctctctaagagtggccacatctttggggttcgccggcatgaatgagatggtcgcgccaagaattggcatggaccagtgctcctgccagttctcctacgccacgtgttttagaggcccgcagcctgagactgaagaggaggatcgggaccttgaagcgcatccaatggcaccacttacttcccctccaagcgctggcagccccgtggttctgccatggcgccctgccagagcgcattcttgcacaacagcccccctgtccaggaagagccacatttggcccgagtactgctcccgcgcgttgagacaactaaaggccactcccgcctctactcccgaaggtttcatccaattgatggaaagcctgttggaattacaggacatcctcgaaaccagctggggcgtgggcaacaagcatccccccgagaaatgtacgtggcatttcactgaatcacggagtagactgtgcatgggatcccaaaagctcctgtccagttgcaggcacgtaatcagaatggatcagagtcccgaggagatgcaaggggcggtccgcgacacattccagcacttggttcagctcgctgggctgtgtttccagtttaccgactgcagccgctgctctgccaggcaccgcgaggctgctggtaacctcagagacgtggtatacacctaccaccagttcatcgaagctgcaaagagcacatgcgagcgtggttaccacgatctgtcagtaaagttgctagcccgacagtgcacagcccttactgccgctgtcttttgcctcacccagaaattcagggcctccaccgcactctag

SEQ ID NO: 183096 - DNA, 1905 bp, Artificial Sequence
  derived and/or modified sequence
atgcccaacgtgctgaagctgtacctggagaacggccagaccaaggctttcaagtttgaagccaacacaactgttaaggacatcattttgacagtgaaagaaaaattgtcaatccgttccattgaatactttgcactggcattggaagaacaatattcaattagccggctgcacctactgcatgaggaagagctgatccagcaggttgtggagcgagaagagtctcacgactaccggtgcctgtttagagtttgtttcgtacccaaagaccctcttgacctgttgaaggaggacccagtggcttttgaatacttgtacctgcagtcatgtagcgatgtcctgcaggaacgcttcgcagtagaaatgaagtgctcttcagctcttcgtcttgctgcgcttcacatccaggagcgtatttacgcttgtgcacagccacagaaaatcagcctgaaatatattgagaaagactggggtatagagaattttataagcccgactctgctgcgcaatatgaaaggaaaagacatcaaaaaagctattagtttccatatgaaacgaaatcagaatctgctggaacctaggcagaaacagctgattagcgccgctcagctgagacttaactacctgcagatactcggcgaacttaagacgtatggtggaagaattttcaatgcaactctgatgctgcaggatagggagtcttacatcgccctgctcgttggcgcgaagtatggaataagccaagtgattaactcaaagctcaacattatgagcacactggcagaattcgccaacatctctagagtcgagttgacagaagagtccgagaaagtgagcgtggttaaggtgtacctacaggacgtgaaagttttgacactcctgctcgaatccaatagtgcaaaagatttggcatgtctgatcgcaggatattatcgtcttttagtcgatcctgtcacgtcgatttttctctggcccgggaataagcagcaggcccatcgggtgagtgcagaagaggggtatgagagcagagcgtgttcagacagtgaggagtctagcgaagtggattgcgtgctcgagcccctgtctgatcgcagacttgtgaagctggccccttgtaggtcgttaatcaaagaggagcagccacctggaaactctccgacacccgaagtggctaggcgcggcccttcaacgtgtggcgcttcgagtactactgatagcgcagaatccgaagcgtcagactcagcgaacacagagtctcggggatatagaacctctggatcctccgagagcatggatgcccttgaggaagatgacctggatacctgcagtagcagcaggtccacgttcttccatttcggctctccgggtctcgcagagtctattgattccgactctcaggaggagcgtagcggaatcgagacttctggcttcctctgtctcctggacttggcacaaagagctaatcctcagtgtcagaagactgaattcagcgaatcagctgcacttgaaacatttggctgggccccagaactgagcaccgttcgtctcgatcccaggctgtacgagggatcacacgccgactactactctctgtgcagcagtgtctctcccgcctcttacctgtccgacagctccgaatccacagcgagtaggcaggggggagccccgccggcttggggccagcagggctggaccgaggcccagcctagcagcatgcttgaacctttggccttacacccgcccttggcgttcgaagacggatcttcagatgaagagtactatgacgctgcagataaactcactccgcctgggcccccctctggagagccgagtttggctgggctgcaaaccagacaggccgcccccgagtgcctgcccgggattaaagcctggggacaagcgtag

SEQ ID NO: 183097 - DNA, 4737 bp, Artificial Sequence
  derived and/or modified sequence
atggaggagctggagaccagcctgttccagacccggaaggcccacagaattgaacagatggtggcacggtggctccggcgcagcagagattctagtgcccgggccaaggtggccgccgccgatggtccagcaagaaatcctacccagactctgatccctgtgcgacatactgtgaaaatcgacaaagatactctgctgcaggattatgggtttcacatctcagagtcgctgccactcactgttgtagcagtgactgccggcggatcagcccacggtaagctattccctggggatcaaatactccagatgaacaatgaacccgctgaggatctgtcctgggaacgagctgtggatatccttagggaggccgaggatagtttgtcaatcaccgtggtgcgctgcacatccggggtgcctaaatcatcttttctgaccgaggaaaaaagagcacggctgaagactaaccccgtaaaagttcacttcgccgaagaagtccttatttcaggccacagccagggcaatagcttactgtgtatgccaaatgtgctgaaactttaccttgaaaacggtcagaccaaagccttcaagtttgaagctaacaccacagttaaagatatcatcctgactgttaaagaaaaactctcaattcgcagcattgaatattttgctcttgccctggaagagcagtactcaatctcccggctgcacctgttacacgaagaagaattgatccagcaggttgtagagcgggaagaatcacatgactatagatgcctctttcgggtatgctttgtgcctaaagacccgctcgacctgctgaaagaggaccctgtggcgttcgaatatctctaccttcagagttgtagtgacgtgctccaggagagattcgctgttgaaatgaagtgctcctctgccctccggctagccgccctccacatccaggagaggatctacgcttgcgcccaaccgcagaaaatctctctgaagtacattgagaaggactggggaattgagaatttcatctcaccaaccctgctgaggaacatgaaggggaaggatatcaagaaggctatcagcttccatatgaaaagaaatcaaaatctgctggagccgagacaaaaacaacttataagcgccgcacagctgaggcttaactacctgcagattctcggagaacttaaaacctacggcggacgcatttttaacgccaccctgatgttacaggatagagagtcttatatagccctcctggtgggcgcgaagtatggcatcagccaggttattaactccaaactgaatattatgagcacgttggcggagttcgccaacattagcagagttgaactgaccgaggagagcgagaaagtctcagttgtgaaggtatatctccaggatgtaaaggtgctcacactgttacttgagtcaaacagcgcaaaggacctcgcctgcctgatcgctggttattatcgcctgctggttgatccagtcacatcgatcttcctctggccagggaacaagcagcaagcccatcgagtgagcgccgaagaggggtacgagtctagagcctgctccgacagcgaagagtcttcggaagtggactgtgtgttggagccattgtccgatcggcgtctggtgaagctcgccccgtgcagaagcctaataaaagaggagcagcccccaggaaacagtccaaccccagaggtggccaggcgcggcccctccacgtgtggcgcaagctctaccacagattctgccgagtcagaggccagtgattcagctaacactgagagcagaggatatcgtacatctggatcaagtgaaagcatggacgcactggaggaggacgacctggatacatgcagcagttctcggtctaccttcttccactttggcagccctggcttggctgaatccatcgattcagattcacaggaagagagatccggtatcgaaacctccggattcctgtgtcttctggatctcgcccagagagcaaacccccagtgccagaaaacggaattttccgaaagtgcagccctggaaactttcggttgggccccggaacttagcaccgttcgcttagatccgaggctctatgaaggatcccatgctgactactattcactgtgctctagtgtaagcccagcgagctatctgtctgactcctccgagagcaccgcatcaaggcagggaggcgctcctcccgcatggggccagcaaggatggactgaagcccagccctcttcgatgctggaaccacttgcattgcatcctcctctggctttcgaagacggatctagcgatgaggagtactacgatgcggctgacaaactgactcctccaggtcccccatccgggccaagagatgtgagcactgctgagccttctgcaaccagcctgcagaacaaggcgtccaccagttctccagagaattccctgccttgtggtccagacggccgccaaccatctagacgaggcggcgtgaaaaaatacgcgaagaccctccggaaaaggaggtcttttcttcagaccgactacacctcacaggtgagcttcccactggtgcctagtgcttcccttgaatctgtggacgatgtatgctattatgatagagaaccatacctagctctgggcgctcctagcccaactgtgtcttccttgcaagacatgcagggggagccagggttactggaaaccaaggccctcggattgcttgctcctcttcgagaaacaaagagtacaaatcccgcctcaagagttatggagatggaacctgaaacaatggagactaagagtgtaattgattctagggtgagctcaatttcagccattagattcaggatcgatcccaacaacaaggaaaattcaggagtggttccggcagcctcctcatctgcgagcaccccgcattgctcaaaccctggatcatctggccctgatacagctcaggcgaggccctcacagatcctgccactgtcacaggatctggatgggatcgctcccaaagagccaacgattgagcacggcgacagtagtttctctctgtcgtcaggagacccaaaccctgatcgagcctgcttggcctctaaccccgggctgaacaatgtgtcccaaggtgataccctagaactccagctcgagccacacgttcagctcgagatgggtttggaatcattctgtacaaatcatattcaggagactgcaccaaagtacacagaacctcttctgtcccctcgcgatgaaccccggagtgacgaatgtggtatcaatccgggcgagaagatcgcctccattcctaccaaagaggagccccagggtcagctgtccctggaaagagacagggaggtaacaaataaaaatggaacaaacgtgtttcaagaagagtctcgcaaggacagtggcgactcacctggggacgtgtctaacaatgtttctcagaccctggacatctcaagtcccgcaggtaagatcgtgacgagcttaagtctggatgctccagtgaccggtactgaacagatccctccccacccccccagagatccccagggacaatcaagggagccaccaggacagggctgtcaggcccaggaacagaagcttttcgtcgagctggatttagacccagatttcttcctcggcaagcagacagtgtccccagcagtgccaccagaaggcataaaagctgaggcacccaaccacgtaacaggtcaggacatcgcgccacgggattcccccgagtgggtgtgtttcaatcctgagccatctcttccagagccattgccttgtcctcaagaggacccacatctggaaacatctaatcattgtttgcttagtgaggggaagagtgatagcagcagtatttgcctgtccgccgaaaaatcctttctttgctttgccccagagtcccacccagaagtgtccgctagtcttagggtggctaccagcttagggttcgccggcatgaatgaaatggtagctccaaggatcggcatggaccagtgctcatgccaattctcatacgctacgtgtttccgggggccccagcccgagacggaagaagaggatagagacctggaagcccatcccatggcacccctgacaagtccccccagtgctggaagtcctgtggtcctcccctggcggcccgctcgggctcactcctgcactaccgctcccttatctcgcaagtctcacatttggcccgaatactgttccagagcactcaggcagctgaaagccaccccagcaagcaccccagagggtttcatccagctgatggagtccttgttagagttacaggacattcttgagacctcatggggtgtgggcaataaacacccccctgaaaagtgtacgtggcacttcacagaaagtagatcgcgactgtgcatgggttctcagaagctgctgtcttcctgcagacacgtcattcggatggatcagtcccctgaagagatgcagggtgcggtgagggataccttccaacacctggtgcagttagcaggcctgtgctttcaattcactgattgctcacgctgcagcgccaggcatcgggaggcagcaggtaacctcagagacgtagtgtatacttaccaccagtttattgaggccgccaagagcacatgtgaaagagggtatcacgatctctcagtgaaactccttgctaggcagtgtaccgctctgaccgccgccgtattttgtcttacccaaaaattccgcgcatccactgctctttag

SEQ ID NO: 183098 - DNA, 2046 bp, Artificial Sequence
  derived and/or modified sequence
atggccgaggtgggcggcgtgcccaagagcagcttcctgaccgaggagaaaagggcccggttaaagactaacccagtgaaagtgcactttgcagaggaggtgctcatcagcggccactctcagggcaactcacttttgtgtatgcctaacgtccttaaattatatctcgaaaatggccaaacaaaagcatttaagttcgaggccaataccactgtgaaggacattatcttgactgtgaaggagaagctgagtataaggagtatcgaatattttgccctagctctcgaggagcagtacagcatttcccggctgcatctgttacacgaagaggagctgatccagcaggtcgtggaacgagaagagagtcacgactacagatgtttgttcagggtatgttttgttccaaaggaccctctggatctgctgaaggaggatccagtcgcgtttgagtacctgtatctgcagagctgcagcgatgtgctacaggagaggtttgctgtggagatgaaatgctccagcgccttgcggctggccgcactccacatacaggaacgcatttatgcgtgtgctcagccccagaaaatctccctcaagtatatcgaaaaggactggggaattgagaatttcatcagtccgacccttctgcggaatatgaaaggaaaggatattaagaaagccataagctttcatatgaagaggaatcagaacttattggaacccagacagaaacaactcatctcagcagcacagctgagacttaattacctccagatactgggggagctcaagacctacggcggaagaatcttcaatgccactctgatgctccaggatcgagaaagttacatagccctccttgtgggcgccaaatatgggatttcccaggttatcaattccaaactgaatattatgagcacactggcagagtttgccaatatcagccgtgtcgaattgacagaggaaagcgagaaggtctcagtggtgaaagtctacctgcaggacgtcaaggtcctcaccctcctcctggagtccaattctgcaaaagacctagcctgtctgatcgcaggctactataggttgctagtggaccccgtgaccagcatattcttgtggcctggtaataaacaacaagcccatagagtgagtgcagaggaagggtatgagagccgggcttgctcagacagcgaagagagcagtgaggttgactgtgttttggaacccctaagtgatcgtcgactggtaaagctcgcaccctgcagatcccttatcaaggaagagcaacctcctgggaattcaccaacccctgaagtggcccgaagggggccttccacctgcggcgctagcagcaccaccgactccgccgagtctgaagcatctgatagtgctaatactgagtcacgggggtatcggacatcaggcagcagcgaatcaatggatgccttagaagaagatgaccttgacacctgctcatcatcaaggtcgacctttttccactttggaagtcccggtctcgcggagtccatcgattccgattcccaggaggagagaagcgggatcgaaacatctggtttcctctgtctgctcgatctggctcaacgagccaatccgcagtgtcaaaagaccgagttttctgagtctgcagctctggagacatttggttgggcaccggaattgtcaactgttcgtcttgatcctcgtctgtatgagggttcacacgccgactactattctctctgttccagtgttagccccgccagctatctaagcgactcttcagagagcaccgcctctcgtcaaggtggagcaccaccggcttggggccagcaaggttggacagaggcacaaccctcctccatgttagagcctcttgctctgcatccaccgttggccttcgaagacggctctagcgatgaggagtattatgacgccgccgataaactgaccccaccagggcctccttctggcgaaccctctctggccgggctgcagacccgccaagccgcccccgaatgccttcccggcatcaaggcatgggggcaagcttag

SEQ ID NO: 183099 - DNA, 189 bp, Artificial Sequence
  derived and/or modified sequence
atggaggaactggaaacaagcctgttccagacccgcaaagcccaccgtattgaacagatggtcgcacgatggctacggcgttcacgggactcttcagctcgtgccaaggtagcagcagctgatggtccagcaaggaatcctacccaaaccttgatacctgtgcggcatactgtcaagatcgacaagtag

SEQ ID NO: 183100 - DNA, 4737 bp, Artificial Sequence
  derived and/or modified sequence
atggaagagctggagacctccctgtttcaaactcgaaaagctcatcgcatcgagcagatggtggccagatggctccgcaggagtagagacagttctgccagagcgaaggtggctgctgccgatggccctgccaggaatcctacccagactctcatacctgtacgccacaccgtgaaaattgacaaggacactttgttacaggactacggttttcacatttctgagtccctccccctgacggtggtcgccgtgaccgccggaggctctgcccacggaaagctgttcccaggcgaccagattctgcaaatgaataacgagcctgctgaagacctgagttgggaacgtgctgtggatattttgcgcgaagctgaggactcattatcaataactgttgttcgctgcacatctggagtcccaaaatcctcatttctgaccgaggagaagcgagctaggcttaaaaccaatccagtgaaggtgcactttgcggaagaggttttaatcagtggccactcgcagggtaattctctactctgcatgccaaacgtgctgaagttatatctggaaaacggccaaacgaaagcgtttaaatttgaagccaataccactgttaaggacattattctgaccgtgaaggagaaactgtccatcagatccatcgagtattttgcccttgctctcgaggagcaatactctatatccaggcttcatttactgcatgaagaggaattgatccagcaggtggtggaaagggaggagagtcacgactaccgatgcctatttcgcgtctgttttgtgcccaaggacccactggatctccttaaagaggaccccgtggcattcgaatatttgtacctgcagtcatgtagcgacgttctccaagaaaggttcgccgtggagatgaagtgctctagtgcacttcgccttgccgcacttcacattcaggagcggatttatgcgtgcgcccagccccagaaaatctctttaaaatacattgagaaagactggggcatagagaacttcatctcccccaccctgttacggaatatgaagggtaaggacattaaaaaggccattagctttcatatgaaaaggaaccagaatcttctggagcctcgccagaaacagctgatctccgcagctcagctgcgacttaactatctacagattctgggggagctaaagacttacggagggagaatcttcaacgcgacactcatgctccaggatagggaatcctacatcgcgcttttggtaggagctaagtatggaatctctcaagttatcaatagcaagttaaatatcatgagcaccttggccgagtttgcaaatatcagccgagtcgagcttacggaggaatctgaaaaagtttcggtggtcaaggtttatctccaggacgtcaaggttctgaccctgctgctagagagtaactcagctaaggatttggcctgcctaatcgctggctactacaggttgctggttgatcccgtaaccagtatattcttgtggccgggaaataagcaacaggcccatagagtgtcagctgaagaggggtacgaaagccgtgcgtgttctgactctgaggagtccagcgaggtcgactgcgtgctcgaaccactgtcagatcgtcggctggttaaactggcaccttgccgttccttgatcaaggaggagcagcccccaggaaactccccaactcccgaggtcgccagaagagggccttcaacctgtggggctagctccacaacagattctgctgagagtgaggcttccgactccgcgaacaccgagtccaggggatatcggacttcgggatccagcgaatccatggacgccctggaggaggatgacttggacacatgcagtagcagcaggagcacgttctttcattttggttctccaggcctggctgaatctattgattcagactcacaggaagaacgaagtgggatagaaacatccggatttctgtgcttactggaccttgctcaacgggcaaatccccagtgccagaaaacggaattttccgagtccgccgctctggagacattcggctgggctcctgagctgtcaacagtgcggctggaccccaggctctatgagggttcgcacgcagattattattccttgtgcagctctgtgtctccagccagctacctgagtgacagttccgagtccacagcctcacgtcagggcggtgctcctcccgcatggggccaacagggatggaccgaggcccagccgtccagcatgctggaacctctggctctccatccacctctggcctttgaagacggaagttcagacgaagaatactacgacgcggcagacaagctcacgcctccgggtcctccttccgggccaagagatgtgagcaccgccgaaccctccgctacctcactgcagaacaaagcctcaacgagttctcctgagaattctttgccgtgtggaccggatggtaggcaacccagcaggcggggaggggttaagaagtacgctaaaacgctgagaaaacgcagatcattcctccagactgactatacatcacaggttagcttcccactggtgcccagcgcttccttagaaagcgttgacgatgtttgttactatgaccgagagccttacctggcactgggggcaccttcccctaccgtgtcatccctgcaggatatgcagggagagcccggactcttagaaaccaaagctctggggctgctcgcacccctccgagagaccaagtctacaaatccagcttcccgggtcatggaaatggagccagaaacaatggagaccaaaagcgtgattgactctcgcgtcagttcaatctctgcgatccggttccggatcgatccaaacaataaggaaaacagtggggttgtgcccgctgcatcttcctcagccagcaccccccactgtagtaaccccggtagttctggaccagacacagcacaagccaggccatcccagatactgccacttagccaggacttagatgggatcgcccctaaagagccgaccatagaacacggtgacagttctttctctctatcgtcaggtgaccctaaccctgaccgagcatgtctggcctcaaaccctgggctgaacaatgtttctcaaggcgatactctcgagctccagctcgaaccacatgtgcagctagaaatgggactcgagagtttctgtacaaatcatatccaagagacggccccaaagtacaccgagccactgcttagtccgagagacgagccaagatcagacgagtgcggaatcaaccccggagaaaaaatcgcaagtataccaactaaagaggagcctcagggtcagctcagtctcgagcgcgatagggaagtgacaaataaaaatgggacgaatgtgtttcaggaagagtctcgcaaggattccggggacagccccggtgatgtcagcaataacgtctctcaaaccctggatataagctcacccgcaggcaagatagttacctctctgagtttggatgcacccgtgaccggtaccgagcagatccctccccacccacctcgggaccctcagggtcaatcccgcgagcctcctggccagggctgtcaggcccaagagcagaaactattcgtggagctggacctcgatccagactttttcctcgggaaacaaaccgtaagccccgctgtgccccctgaaggtattaaggccgaagctccaaaccacgtcacagggcaagatattgctccacgcgatagtcctgagtgggtgtgctttaaccctgaaccttccttacccgagccactgccctgtccccaggaggatcctcatcttgagaccagcaatcactgcctgttgtccgagggcaagtcagacagcagctctatttgcctgagtgcagaaaaatctttcctatgcttcgcgccagagagtcacccggaagtgagtgctagtctgagagtggccacgtccctgggcttcgccggaatgaatgaaatggtcgcccctcgaatagggatggaccagtgcagttgccagttcagctatgcaacatgttttagaggaccgcagcccgagaccgaagaggaagatagagacctcgaggcacatccaatggcccctctcactagccctccctcagctgggagtccagtggtcctgccttggcggcctgcgagagcccacagctgcaccacggctccattgtcaaggaaatcccacatctggccggagtactgttcccgagcgctcagacagctgaaggccacccccgcttccacacccgagggatttatccagctcatggagtctctactcgagttgcaagacatattggagaccagctggggagtaggaaataagcatccacctgaaaaatgtacttggcatttcaccgagagtcgttcacggttgtgcatgggatctcagaaattgctgtctagctgccgacacgtcatacggatggaccagtcccctgaagagatgcagggcgctgtccgggatactttccaacacttggtgcagcttgccggtctgtgctttcaattcactgactgtagccgatgttcagccaggcacagggaggcagccggaaatctgcgcgacgtggtgtatacttaccatcaatttatcgaagccgctaaaagtacctgtgagcggggatatcacgatctctcggtgaagctgctggcgagacagtgtaccgccctgaccgcagcagttttctgtctgacccaaaagttccgggcttcgacggcactctag

SEQ ID NO: 183101 - DNA, 1905 bp, Artificial Sequence
  derived and/or modified sequence
atgccgaacgtcctcaagctataccttgaaaacggccagacaaaggcgtttaaattcgaagctaatactacagttaaagacatcatattgacagttaaggaaaaactatctatccgctccatcgagtatttcgccctggcgctggaggagcaatattccatttctaggctccatttgcttcatgaagaggaacttatacaacaggtcgtcgaaagagaagagtcacacgattatcgctgcctcttccgtgtgtgtttcgtgcccaaagacccgctcgatctcttgaaagaagacccggtggcctttgagtacctgtatctgcagtcatgttctgatgtactccaggagagattcgccgtagagatgaaatgttccagtgccttgcgactggctgctcttcacatccaggagcggatttatgcttgtgctcaacctcagaaaatttcccttaagtatattgagaaggactggggcatcgagaactttatttcacccacacttctgagaaatatgaaaggcaaggacatcaagaaagcaatatctttccacatgaaaagaaaccaaaacttactggaacccaggcagaagcagttaatttccgcggcacaactgcgcttgaactatctgcagatccttggagagctgaagacttatgggggacgaatctttaatgccactctgatgttgcaggacagagagagttatatcgccctgctggtgggcgcaaaatatggtatcagccaggtgataaattcgaagctgaacatcatgagcactctggcagagttcgccaatatttctcgagtcgagctgactgaggaaagcgagaaggtaagcgtagtgaaggtgtacctgcaggatgtgaaggtgctgactctgctgctggagtctaattccgctaaagatctggcctgtctgatcgccggatactatcgtctgctcgtggaccccgtcacctcgattttcctgtggccaggcaataaacaacaggcccatcgtgttagtgccgaagaggggtacgagagcagggcttgtagcgacagtgaggaatccagcgaggtggactgcgtcctggagcccctcagtgaccgacgactcgtgaaactcgcgccttgcaggtccctcatcaaggaggagcaaccacccggtaatagcccaactcctgaggtggccagaaggggaccttccacctgcggagcgtcatctacaactgatagcgccgaaagcgaggcctccgatagcgccaacactgagtccaggggctaccgaacctccgggtcaagtgagtcaatggatgcattagaagaagacgatttggatacttgctccagctcaagaagcaccttcttccattttggttcaccagggctggcagagtcaatagacagcgacagtcaagaagaaagaagcgggattgaaactagcgggttcctatgcctgctggatctggctcagagggcaaatccccagtgccagaagaccgagttcagtgaatccgccgcacttgaaacatttggatgggctccggagcttagtactgtcaggctcgaccccagactgtacgagggcagccacgctgactactattccctttgctctagcgtatcccctgccagctatctgagtgacagctccgaatccaccgccagcaggcaaggcggagcgcctcccgcatggggccaacaaggctggacagaggcccaaccttcttcgatgctggagcctctggcgctgcatccacccctggcatttgaagatgggagttccgacgaagaatattacgatgccgctgacaaactcacccctccgggaccccctagcggcgagccttccctggctggactgcagacgcggcaggccgcacctgagtgtctgcctggaattaaggcatggggacaggcatag

SEQ ID NO: 183102 - DNA, 4737 bp, Artificial Sequence
  derived and/or modified sequence
atggaagaattggaaacatcgctgttccaaacccggaaagcccatcgaatcgagcagatggtggctcgctggctgcgcaggagcagggatagtagtgcaagagcaaaggttgctgccgctgacggccctgccagaaaccctacacagaccctgattcctgtgagacacacggtcaagatagataaggacacactactccaggactacggctttcacatcagtgaatcactgcccttaaccgtggtcgccgtgacagccggaggcagtgcccacggaaaactgttcccaggggatcaaatcctccaaatgaataatgaaccggctgaagatctgtcctgggaacgggctgtagacatccttcgcgaagccgaagattcattgtctatcaccgtagttcggtgcacctccggagttcctaaaagttcctttcttaccgaggagaagagggccaggctaaaaacaaatcccgtgaaggtccatttcgcagaggaggtgttaatctccggccactcacagggcaactccctcttgtgcatgccaaatgtgctgaagctgtatcttgaaaatggccaaaccaaagcgttcaagtttgaagctaatacaacggtgaaggatataattcttaccgtcaaagaaaagctttctattcgctcgattgagtactttgccttggcactggaggagcagtatagcatctccagactgcatttgctgcatgaggaagaactgattcaacaggtggtggaacgcgaagagtcccatgactaccgctgtctattcagggtgtgtttcgttcctaaggacccactcgatttgctcaaggaggatcctgtcgcattcgaatacctgtaccttcagtcctgctcagacgttctgcaggagcgcttcgcagtggagatgaagtgctccagtgccttgcgcctcgccgctctgcatatccaagagcgcatttatgcatgtgcccagccccagaagatttctttgaaatatatcgaaaaagactgggggatagagaacttcattagcccaactttgctaagaaatatgaaaggcaaggacataaaaaaggccattagtttccatatgaagcggaatcaaaatcttcttgagcctcggcagaagcaactgatctcagccgctcaattaagactgaattacctgcagattctgggagagctgaagacttacggtgggaggattttcaacgctaccctgatgctccaggatcgagaatcctatatcgccctgttagtgggcgcaaaatacggtattagtcaagtgataaatagcaagctcaacataatgagtaccttggcagagttcgccaacatcagtagagtagagctgactgaggagtctgaaaaggtctccgttgtgaaggtatatttacaggacgtgaaggtcctgactcttttgcttgagagcaattcggccaaagacctggcgtgcctaatcgccggatattaccgcctcctagttgaccccgtgacgagtatcttcctgtggccaggtaacaagcagcaggcccatagagtgtccgctgaggagggctacgagagtcgcgcatgttccgactccgaggaatctagcgaggtcgattgtgtgctggagcccctgtctgatcggaggctggtgaagttagccccatgtaggagtttaataaaagaggagcaacctcccggaaactcgccgacaccggaagtggccaggcgaggacctagcacctgtggcgcaagctccactacggattctgcggagtcagaggcttctgattccgctaacactgaatcccggggttaccgtacaagcgggagttctgagtctatggacgctctggaagaggatgacctggacacatgctcttctagcagatccacattctttcattttggttcgccagggctcgcggagagtattgacagtgactcgcaggaggaacggagtggtattgagacatcaggtttcctctgtctgctcgatctagcgcaaagagcaaatccacagtgccaaaagacggagttttcggaaagcgcagccctggagacattcgggtgggctcccgagctctccacggtgcggttagatccacgcttgtacgaaggctcccacgcagattattactccctgtgctcctccgtgagccccgctagctatcttagtgattcttctgaatcaactgcctcgcgacaaggaggtgctccgcctgcctgggggcagcagggatggaccgaggcacagccctcatccatgttagagccactggcactccatccacccctcgcttttgaggacggatcaagtgatgaggaatactatgacgctgctgacaagctaacaccgcctgggcctccgtccggcccacgcgatgtatctacagcggaaccgtcggctacctcgttgcaaaacaaggccagtacgtcatccccggagaattccctgccttgcgggccagatggcaggcagccatctcgcagaggcggagtgaaaaaatatgccaaaaccctccgaaaaaggcggtcgttccttcaaaccgattacacctcgcaggtatcattcccactggtgccctccgcaagcttggagagcgttgacgatgtgtgctactatgacagagaaccttatctggcactcggcgcaccttcacccactgtaagttcactgcaagatatgcaaggggaaccaggactgctggaaaccaaagctttggggctgctagcccctttacgagagacaaagagcacaaaccccgcttctagagtcatggagatggaaccagagactatggagaccaaatctgtgattgacagtagagtttcatcaatctccgcgatacggttccggatcgatccaaataataaagaaaacagcggagtggtgccggcagcatcttcaagcgcttcaacgcctcattgctcgaatcccggttcgtctggccctgacacggcccaggctaggccgtcccaaattctgcccctgtcacaggacctcgacggcatcgcccctaaagagcccactattgaacacggtgatagtagcttctctctgagcagtggcgatccaaaccctgatcgagcttgcttggccagcaatccaggtctgaacaatgtctcacaaggtgatacgctagaattgcaactggagccccatgtacagctagaaatgggcctggaatctttctgcaccaatcatattcaagagacagctccaaaatataccgagcctctcctcagccctcgcgacgagccacgcagcgatgagtgtggcataaatccaggtgaaaaaattgcctcaatccccaccaaggaagaaccccaagggcaactatctctggagcgcgacagagaggtgacgaataagaatgggacaaacgtgtttcaggaggaaagcagaaaagattcaggcgactcgcctggagatgtttccaacaatgtgtcacagacactggacattagtagtcccgctgggaagattgtcacgagtcttagtctagatgcccctgtaactggaactgagcagatcccaccacacccccctcgagatccacaggggcagtccagggagccccctggccagggctgtcaggcccaggaacagaaactcttcgttgagttggacctggacccagacttttttcttggaaagcagactgtcagcccagcagtgccacccgaaggcattaaggctgaagctccaaaccatgtcaccgggcaggatatagctcctagagatagccctgagtgggtctgttttaaccccgagcctagtctgcctgaacccctgccatgccctcaggaggacccacacctcgaaaccagcaaccactgcctgttatctgagggcaaatcagattccagctcaatatgcctgtccgctgagaaaagctttttatgcttcgcacccgaatcccaccctgaagtctccgcaagccttcgggtagccacatccctgggatttgctggcatgaatgagatggtggcccctcggatcggaatggaccagtgctcctgtcagttttcttacgctacatgctttagaggccctcagcctgagaccgaggaggaagaccgagacctggaagcccacccaatggccccactcactagccctccctcggccggaagtcccgtagtcctcccttggagacccgcaagagcacactcgtgcactaccgctcctctgtcgcggaaatcacacatatggcccgaatactgttcaagggctctccgccagctgaaggccactcccgcatcgacacccgagggcttcatacagctaatggagagtctgctagagctgcaggatattttagagacctcgtggggggtgggcaataaacatccccctgagaagtgcacttggcacttcacagaatctcgatcaagactgtgtatgggctcccagaaactgctctcctcatgcaggcacgtcattcgtatggaccaaagtcccgaggagatgcagggagccgtccgggatacctttcaacatcttgtccagctggccggtctgtgcttccaattcacagattgcagtagatgttcagctagacaccgcgaggccgcaggaaacctgagagacgtcgtgtacacatatcatcagtttatagaggcagccaaatccacgtgtgagcggggttatcacgacctgagtgtcaagctgctagctcgacagtgcactgcactgactgcagcagtattctgcctgacacagaaattcagggcgtcaacggccctttag

SEQ ID NO: 183103 - DNA, 2046 bp, Artificial Sequence
  derived and/or modified sequence
atggccgaagttggcggagtcccaaaatcctcattcctcacagaagagaagcgagctcgcctaaaaactaacccggtgaaggtgcatttcgcggaggaggtcctgatatctggccactcccaagggaactctttgctttgcatgccgaatgtgctcaaactttacctcgagaacggccaaactaaggcctttaagtttgaggccaatactacggtcaaagatataatccttacagtaaaagagaaactctcgatccgttctatagagtattttgcgttagccttggaggaacagtactctatttcccggttacacctgttacacgaggaagagctgatccagcaagtggtcgagagggaggagtctcacgactatcgctgtctgttccgcgtgtgcttcgtaccaaaggacccactggacctcttgaaggaagaccctgttgcattcgaatacttatacctacagtcctgctcagatgtgctgcaggagcgttttgcagtggagatgaagtgttcctcagccctgcggctggctgccctgcacatacaggagagaatatacgcctgcgcccaacctcagaaaatctctctcaagtacattgagaaagactgggggattgaaaatttcattagtcccaccctactgcggaatatgaagggcaaagatatcaaaaaagccatttcattccacatgaagagaaaccaaaatttactcgaacctcgacagaagcagttgatctctgccgcacaactgcgactgaactatctacaaattctgggggaactgaagacttatggagggagaatcttcaatgccacactgatgctacaggatcgagagtcttacatcgccctgctcgtcggggcaaagtacgggatctcccaggttattaactctaagctgaacatcatgtcaaccctcgccgagtttgccaatatttccagggtggagctaacggaggaaagtgaaaaagtttccgttgtcaaagtgtacctgcaagacgtgaaagtgctgactctactgctcgagtcgaattccgcgaaagacctcgcctgtctgatagccggttattacaggctcctggtcgaccctgtgacgagcatatttctgtggcctggaaataaacagcaggctcatagggtcagcgctgaggagggctacgaaagtcgcgcatgcagcgactcagaggaaagctcggaggtggactgcgtgcttgaaccgttgtctgaccgtcgactggtcaaactggccccttgcagatctctgattaaagaagaacagccccctggtaactctcccaccccggaagtggccaggagaggtccatccacatgcggggcttcaagtacgaccgattccgccgagtctgaagcaagcgatagtgccaacacggagagtcgaggttaccggacgtcaggctcgtcagaaagcatggatgccctggaagaagatgatctggatacttgttcctcatcaaggagcactttttttcatttcggttcccccggactggccgagtctatcgactcagacagccaagaagagaggagcggtattgagaccagcggattcctgtgcctgctcgacctcgctcagagagccaatcctcagtgccaaaagactgaatttagtgagtcggcagctctggaaacatttggctgggctccggaactgtctaccgtgcggctcgacccaaggctgtacgagggcagccatgctgactactattcgctttgctcttctgtctcaccagcaagctacctaagcgacagctccgagagtaccgcatctagacagggaggagcacctcctgcttggggccagcaaggctggacagaggctcagcccagctcaatgctggagccgcttgccctgcaccccccactggcatttgaggatggctcttcggatgaagaatattacgacgctgctgacaaactgacgccgccagggcctccttcaggagaaccatcactcgcagggctccaaaccaggcaagcagcacctgagtgtttaccagggattaaggcttggggtcaggcctag

SEQ ID NO: 183104 - protein, 538 aa, Artificial Sequence
  derived and/or modified sequence
MTRECPSPAPGPGAPLSGSVLAEAAVVFAVVLSIHATVWDRYSWCAVALAVQAFYVQYKWDRLLQQGSAVFQFRMSANSGLLPASMVMPLLGLVMKERCQTAGNPFFERFGIVVAATGMAVALFSSVLALGITRPVPTNTCVILGLAGGVIIYIMKHSLSVGEVIEVLEVLLIFVYLNMILLYLLPRCFTPGEALLVLGGISFVLNQLIKRSLTLVESQGDPVDFFLLVVVVGMVLMGIFFSTLFVFMDSGTWASSIFFHLMTCVLSLGVVLPWLHRLIRRNPLLWLLQFLFQTDTRIYLLAYWSLLATLACLVVLYQNAKRSSSESKKHQAPTIARKYFHLIVVATYIPGIIFDRPLLYVAATVCLAVFIFLEYVRYFRIKPLGHTLRSFLSLFLDERDSGPLILTHIYLLLGMSLPIWLIPRPCTQKGSLGGARALVPYAGVLAVGVGDTVASIFGSTMGEIRWPGTKKTFEGTMTSIFAQIISVALILIFDSGVDLNYSYAWILGSISTVSLLEAYTTQIDNLLLPLYLLILLMA

SEQ ID NO: 183105 - protein, 266 aa, Artificial Sequence
  derived and/or modified sequence
MTRECPSPAPGPGAPLSGSVLAEAAVVFAVVLSIHATVWDRYSWCAVALAVQAFYVQYKWDRLLQQGSAVFQFRMSANSGLLPASMVMPLLGLVMKERCQTAGNPFFERFGIVVAATGMAVALFSSVLALGITRPVPTNTCVILGLAGGVIIYIMKHSLSVGEVIEVLEVLLIFVYLNMILLYLLPRCFTPGEALLVLGGISFVLNQLIKRSLTLVESQGDPVDFFLLVVVVGMVLMGIFFSTLFVFMDSGTRPPPSPESISTSLW

SEQ ID NO: 183106 - DNA, 1617 bp, Artificial Sequence
  derived and/or modified sequence
atgaccagagagtgccccagccccgcccccggccccggcgcccccctgagcggcagcgtgctggccgaggccgccgtggtgttcgccgtggtgctgagcatccacgccaccgtgtgggacagatacagctggtgcgccgtggccctggccgtgcaggccttctacgtgcagtacaagtgggacagactgctgcagcagggcagcgccgtgttccagttcagaatgagcgccaacagcggcctgctgcccgccagcatggtgatgcccctgctgggcctggtgatgaaggagagatgccagaccgccggcaaccccttcttcgagagattcggcatcgtggtggccgccaccggcatggccgtggccctgttcagcagcgtgctggccctgggcatcaccagacccgtgcccaccaacacctgcgtgatcctgggcctggccggcggcgtgatcatctacatcatgaagcacagcctgagcgtgggcgaggtgatcgaggtgctggaggtgctgctgatcttcgtgtacctgaacatgatcctgctgtacctgctgcccagatgcttcacccccggcgaggccctgctggtgctgggcggcatcagcttcgtgctgaaccagctgatcaagagaagcctgaccctggtggagagccagggcgaccccgtggacttcttcctgctggtggtggtggtgggcatggtgctgatgggcatcttcttcagcaccctgttcgtgttcatggacagcggcacctgggccagcagcatcttcttccacctgatgacctgcgtgctgagcctgggcgtggtgctgccctggctgcacagactgatcagaagaaaccccctgctgtggctgctgcagttcctgttccagaccgacaccagaatctacctgctggcctactggagcctgctggccaccctggcctgcctggtggtgctgtaccagaacgccaagagaagcagcagcgagagcaagaagcaccaggcccccaccatcgccagaaagtacttccacctgatcgtggtggccacctacatccccggcatcatcttcgacagacccctgctgtacgtggccgccaccgtgtgcctggccgtgttcatcttcctggagtacgtgagatacttcagaatcaagcccctgggccacaccctgagaagcttcctgagcctgttcctggacgagagagacagcggccccctgatcctgacccacatctacctgctgctgggcatgagcctgcccatctggctgatccccagaccctgcacccagaagggcagcctgggcggcgccagagccctggtgccctacgccggcgtgctggccgtgggcgtgggcgacaccgtggccagcatcttcggcagcaccatgggcgagatcagatggcccggcaccaagaagaccttcgagggcaccatgaccagcatcttcgcccagatcatcagcgtggccctgatcctgatcttcgacagcggcgtggacctgaactacagctacgcctggatcctgggcagcatcagcaccgtgagcctgctggaggcctacaccacccagatcgacaacctgctgctgcccctgtacctgctgatcctgctgatggcctag

SEQ ID NO: 183107 - DNA, 801 bp, Artificial Sequence
  derived and/or modified sequence
atgaccagagagtgccccagccccgcccccggccccggcgcccccctgagcggcagcgtgctggccgaggccgccgtggtgttcgccgtggtgctgagcatccacgccaccgtgtgggacagatacagctggtgcgccgtggccctggccgtgcaggccttctacgtgcagtacaagtgggacagactgctgcagcagggcagcgccgtgttccagttcagaatgagcgccaacagcggcctgctgcccgccagcatggtgatgcccctgctgggcctggtgatgaaggagagatgccagaccgccggcaaccccttcttcgagagattcggcatcgtggtggccgccaccggcatggccgtggccctgttcagcagcgtgctggccctgggcatcaccagacccgtgcccaccaacacctgcgtgatcctgggcctggccggcggcgtgatcatctacatcatgaagcacagcctgagcgtgggcgaggtgatcgaggtgctggaggtgctgctgatcttcgtgtacctgaacatgatcctgctgtacctgctgcccagatgcttcacccccggcgaggccctgctggtgctgggcggcatcagcttcgtgctgaaccagctgatcaagagaagcctgaccctggtggagagccagggcgaccccgtggacttcttcctgctggtggtggtggtgggcatggtgctgatgggcatcttcttcagcaccctgttcgtgttcatggacagcggcaccagacccccccccagccccgagagcatcagcaccagcctgtggtag

SEQ ID NO: 183108 - DNA, 2090 bp, Artificial Sequence
  derived and/or modified sequence
gttgccgcggggcggtgccaagatggcgaggcccaaagaggtgaggagccggcagcgggggcggctgtaactgtgaggaaggctgcagagtggcgacgtctacgccgtaggttggaggctgtggggggtggccgggcgccagctcccaggccgcagaagtgacctgcggtggagttccctcctcgctgctggagaacggagggagaaggttgctggccgggtgaaagtgcctccctctgcttgacggggctgaggggcccgaagtctagggcgtccgtagtcgccccggcctccgtgaagccccaggtctagagatatgacccgagagtgcccatctccggccccggggcctggggctccgctgagtggatcggtgctggcagaggcggcagtagtgtttgcagtggtgctgagcatccacgcaaccgtatgggaccgatactcgtggtgcgccgtggccctcgcagtgcaggccttctacgtccaatacaagtgggaccggctgctacagcagggaagcgccgtcttccagttccgaatgtccgcaaacagtggcctattgcccgcctccatggtcatgcctttgcttggactagtcatgaaggagcggtgccagactgctgggaacccgttctttgagcgttttggcattgtggtggcagccactggcatggcagtggccctcttctcatcagtgttggcgctcggcatcactcgcccagtgccaaccaacacttgtgtcatcttgggcttggctggaggtgttatcatttatatcatgaagcactcgttgagcgtgggggaggtgatcgaagtcctggaagtccttctgatcttcgtttatctcaacatgatcctgctgtacctgctgccccgctgcttcacccctggtgaggcactgctggtattgggtggcattagctttgtcctcaaccagctcatcaagcgctctctgacactggtggaaagtcagggggacccagtggacttcttcctgctggtggtggtagtagggatggtactcatgggcattttcttcagcactctgtttgtcttcatggactcaggcacctgggcctcctccatcttcttccacctcatgacctgtgtgctgagccttggtgtggtcctaccctggctgcaccggctcatccgcaggaatcccctgctctggcttcttcagtttctcttccagacagacacccgcatctacctcctagcctattggtctctgctggccaccttggcctgcctggtggtgctgtaccagaatgccaagcggtcatcttccgagtccaagaagcaccaggcccccaccatcgcccgaaagtatttccacctcattgtggtagccacctacatcccaggtatcatctttgaccggccactgctctatgtagccgccactgtatgcctggcggtcttcatcttcctggagtatgtgcgctacttccgcatcaagcctttgggtcacactctacggagcttcctgtccctttttctggatgaacgagacagtggaccactcattctgacacacatctacctgctcctgggcatgtctcttcccatctggctgatccccagaccctgcacacagaagggtagcctgggaggagccagggccctcgtcccctatgccggtgtcctggctgtgggtgtgggtgatactgtggcctccatcttcggtagcaccatgggggagatccgctggcctggaaccaaaaagacttttgaggggaccatgacatctatatttgcgcagatcatttctgtagctctgatcttaatctttgacagtggagtggacctaaactacagttatgcttggattttggggtccatcagcactgtgtccctcctggaagcatacactacacagatagacaatctccttctgcctctctacctcctgatattgctgatggcctagctgttacagtgcagcagcagtgacggaggaaacagacatggggagggtgaacagtccccacagcagacagctacttgggcatgaagagccaaggtgtgaaaagcagatttgatttttcagttgattcagatttaaaataaaaagcaaagctctccta

SEQ ID NO: 183109 - DNA, 1538 bp, Artificial Sequence
  derived and/or modified sequence
aaagaggtgaggagccggcagcgggggcggctgtaactgtgaggaaggctgcagagtggcgacgtctacgccgtaggttggaggctgtggggggtggccgggcgccagctcccaggccgcagaagtgacctgcggtggagttccctcctcgctgctggagaacggagggagaaggttgctggccgggtgaaagtgcctccctctgcttgacggggctgaggggcccgaagtctagggcgtccgtagtcgccccggcctccgtgaagccccaggtctagagatatgacccgagagtgcccatctccggccccggggcctggggctccgctgagtggatcggtgctggcagaggcggcagtagtgtttgcagtggtgctgagcatccacgcaaccgtatgggaccgatactcgtggtgcgccgtggccctcgcagtgcaggccttctacgtccaatacaagtgggaccggctgctacagcagggaagcgccgtcttccagttccgaatgtccgcaaacagtggcctattgcccgcctccatggtcatgcctttgcttggactagtcatgaaggagcggtgccagactgctgggaacccgttctttgagcgttttggcattgtggtggcagccactggcatggcagtggccctcttctcatcagtgttggcgctcggcatcactcgcccagtgccaaccaacacttgtgtcatcttgggcttggctggaggtgttatcatttatatcatgaagcactcgttgagcgtgggggaggtgatcgaagtcctggaagtccttctgatcttcgtttatctcaacatgatcctgctgtacctgctgccccgctgcttcacccctggtgaggcactgctggtattgggtggcattagctttgtcctcaaccagctcatcaagcgctctctgacactggtggaaagtcagggggacccagtggacttcttcctgctggtggtggtagtagggatggtactcatgggcattttcttcagcactctgtttgtcttcatggactcaggcaccaggcccccaccatcgcccgaaagtatttccacctcattgtggtagccacctacatcccaggtatcatctttgaccggccactgctctatgtagccgccactgtatgcctggcggtcttcatcttcctggagtatgtgcgctacttccgcatcaagcctttgggtcacactctacggagcttcctgtccctttttctggatgaacgagacagtggaccactcattctgacacacatctacctgctcctgggcatgtctcttcccatctggctgatccccagaccctgcacacagaagggtagcctgggaggagccagggccctcgtcccctatgccggtgtcctggctgtgggtgtgggtgatactgtggcctccatcttcggtagcaccatgggggagatccgctggcctggaaccaaaaagacttttgaggggaccatgacatctatatttgcgcagatcatttctgtagctctgatcttaatctttgacagtggagtg

SEQ ID NO: 183110 - DNA, 1617 bp, Artificial Sequence
  derived and/or modified sequence
atgactcgagagtgcccctctcccgccccagggcccggggcccctctttcaggcagcgttctggccgaggctgctgtggtgttcgccgtggtgctgtcgatacacgcaaccgtgtgggatcggtactcttggtgcgctgtggccctcgcggtacaggccttctatgtacagtacaagtgggatagactgctgcagcagggctccgctgtcttccaattccggatgagcgctaatagtggcctgttgcctgcgtccatggtgatgcccctgttgggcctcgtgatgaaagagaggtgccagactgccggaaacccatttttcgaaagattcggtattgttgttgccgccactggcatggcagtggctctgttctcctctgtcctggccctgggtatcacccgacccgtgcctaccaacacgtgtgtcatcctcgggctagccgggggagtgatcatatatataatgaagcattctttatccgtgggtgaggtcattgaagtattagaggtgctattaatcttcgtatacctgaacatgatcctgctgtacctactgccccgttgctttacaccaggcgaggccctcttggttcttgggggaattagttttgttcttaaccagcttattaaaaggtctctgactcttgtcgaatcacagggagacccggtcgacttcttcctgttggtggtggtggtggggatggtcctgatggggattttcttctccacactgtttgtattcatggatagtgggacatgggcttcatctatattttttcatcttatgacatgtgtgctgagtttgggtgtagtgttgccctggcttcaccgactgatccgccgaaatcctctgctgtggctgcttcagtttttatttcagaccgacacccggatctatcttctggcatactggagtctgctggcaacccttgcctgtctggttgttctttaccagaatgctaaacggagcagtagcgagagcaagaaacatcaggcgcccacgatcgccagaaagtattttcatctgattgtggtggccacttatatccccggcatcatctttgacaggcctctactgtacgtcgcagcgacagtgtgcctggcggtcttcatattcctggagtacgtgcgttacttccggatcaagccattggggcacactcttagaagctttctatctctattcctggatgagcgggattctgggccattgattcttacacatatatatttgctgctgggcatgagcttgcccatatggctgattcctaggccatgtacccaaaaaggtagcttaggaggcgcccgtgcactcgtaccatacgccggggtcctagccgtgggggtgggagatactgtcgcttcgatcttcggcagcactatgggcgagatccgatggcctggcacaaagaaaacattcgaaggtactatgacttccattttcgcccaaatcattagcgtggccttgattcttatattcgactcaggcgtcgacctgaactatagctacgcctggattctggggagcatcagtacagtatccctcctcgaggcctacacaacccaaatcgacaatctgctcctgcccttgtacctcctgattctgttgatggcatag

SEQ ID NO: 183111 - DNA, 801 bp, Artificial Sequence
  derived and/or modified sequence
atgaccagagagtgcccctcccctgcccccggacccggtgctcctctctcaggctcggtgctcgcggaggctgcggtggtcttcgccgtggtgttgtccatccacgccactgtttgggacaggtatagctggtgcgccgtggcactggcagtgcaggccttttacgtgcagtataagtgggacaggttgctccaacaagggtctgccgtgttccagtttcgcatgtcagcgaacagcggcctgctccctgcttcgatggtcatgcccctcctcggcctggtgatgaaagagaggtgccagacagccggcaatcctttttttgagaggtttgggattgtggtggccgcgaccgggatggcggtggctctgttttcctccgtgttagctctgggtatcacccgcccagttcccacgaacacatgtgtcattctaggtctggcaggcggcgttattatctacataatgaagcactcactctctgtcggcgaagttatcgaagtgctagaagtacttttgatattcgtgtacctcaatatgattctcctgtacctcctaccaaggtgcttcaccccaggcgaagccctgctagtccttggggggatctcatttgtgctgaatcagttgattaaacgaagcctaaccctggtcgaatcccaaggcgacccggtggacttctttttgctggttgtggtggtcggaatggtacttatgggtatcttctttagtaccctgttcgttttcatggattcagggacccgaccacccccaagcccagaatctatcagcacgtccctgtggtag

SEQ ID NO: 183112 - DNA, 1617 bp, Artificial Sequence
  derived and/or modified sequence
atgacccgggagtgccccagccctgcccctggccctggggcccccctgagcggctctgtgctggccgaggccgctgtggtgtttgctgtggtgctgagcatccacgccaccgtgtgggaccgctacagctggtgtgctgtggccctggccgtgcaggccttctacgtgcagtacaagtgggaccggctgctgcagcagggcagcgctgtgttccagttcaggatgtctgccaacagcggcctgctgcctgcctccatggtgatgcccctgctgggcctggtgatgaaggagcgctgccagacagctggcaaccccttctttgagcgcttcggcatcgtggtggccgccaccggcatggctgtggccctcttcagctctgtgctggccctgggcatcaccaggcctgtgcccaccaacacctgtgtgatcctgggcctggccggcggcgtcatcatctacatcatgaagcacagcctgtctgtgggggaggtgattgaggtgctggaggtgctgctgatctttgtgtacctgaacatgatcctgctgtacctgctgccccgctgcttcaccccaggagaggccctgctggtgctgggcggcatcagctttgtgctgaaccagctgatcaagaggagcctgaccctggtggagagccagggcgaccctgtggacttcttcctgctggtggtggtggtgggcatggtgctgatgggcatcttcttcagcaccctgtttgtgttcatggacagcggcacctgggccagcagcatcttcttccacctgatgacctgtgtgctgagcctgggcgtggtgctgccctggctgcacaggctcatcagaagaaaccccctgctgtggctgctgcagttcctgttccagacagacacccgcatctacctgctggcctactggagcctgctggccaccctggcctgcctggtggtgctgtaccagaatgccaagaggagcagcagcgagagcaagaagcaccaggcccccaccatcgccaggaagtacttccacctgattgtggtggccacctacatccctggcatcatctttgaccggcccctgctgtatgtggccgccaccgtgtgcctggccgtgttcatcttcctggagtatgtgcgctacttccgcatcaagcccctgggccacaccctgcggagcttcctgagcctcttcctggatgagcgggacagcggccccctcatcctgacccacatctacctgctgctgggcatgagcctgcccatctggctgatcccccggccctgcacccagaagggcagcctgggcggggcccgggccctggtgccctatgctggggtgctggccgtgggcgtgggggacacagtggccagcatcttcggcagcaccatgggagagatccgctggccaggcaccaagaagacctttgagggcaccatgaccagcatctttgcccagatcatctctgtggccctgatcctgatctttgattctggagtggacctgaactacagctatgcctggatcctgggcagcatcagcacagtgtccctgctggaggcctacaccacccagattgacaacctgctgctgcccctgtacctgctgatcctgctgatggcctag

SEQ ID NO: 183113 - DNA, 801 bp, Artificial Sequence
  derived and/or modified sequence
atgacccgggagtgccccagccctgcccctggccctggggcccccctgagcggctctgtgctggccgaggccgctgtggtgtttgctgtggtgctgagcatccacgccaccgtgtgggaccgctacagctggtgtgctgtggccctggccgtgcaggccttctacgtgcagtacaagtgggaccggctgctgcagcagggcagcgctgtgttccagttcaggatgtctgccaacagcggcctgctgcctgcctccatggtgatgcccctgctgggcctggtgatgaaggagcgctgccagacagctggcaaccccttctttgagcgcttcggcatcgtggtggccgccaccggcatggctgtggccctcttcagctctgtgctggccctgggcatcaccaggcctgtgcccaccaacacctgtgtgatcctgggcctggccggcggcgtcatcatctacatcatgaagcacagcctgtctgtgggggaggtgattgaggtgctggaggtgctgctgatctttgtgtacctgaacatgatcctgctgtacctgctgccccgctgcttcaccccaggagaggccctgctggtgctgggcggcatcagctttgtgctgaaccagctgatcaagaggagcctgaccctggtggagagccagggcgaccctgtggacttcttcctgctggtggtggtggtgggcatggtgctgatgggcatcttcttcagcaccctgtttgtgttcatggacagcggcacccggcccccacccagccctgagagcatcagcaccagcctgtggtag

SEQ ID NO: 183114 - DNA, 1617 bp, Artificial Sequence
  derived and/or modified sequence
atgacccgggagtgccccagccccgcccccggccccggcgcccccctgtccggctccgtcctcgctgaggctgctgttgtgtttgccgttgtccttagtattcatgctacagtttgggataggtacagttggtgcgccgttgccctagctgtacaggcgttctacgtgcaatataagtgggatcgactgctccaacagggctctgccgttttccagtttagaatgagcgctaacagcggtcttctgccagctagtatggttatgcctttgctggggttggtaatgaaagaaagatgccagacggccggcaatccattttttgagagattcggcatcgtcgtcgctgctacaggcatggcggtggccctgttttcatccgttctcgccttaggcatcacgagacccgttccaacgaatacttgtgtgattctggggctcgccggaggagttattatttatatcatgaagcactccctgagcgtgggcgaggtaattgaagtgctggaggttctgctgatattcgtttatctgaacatgatcctcctgtatctgctcccccggtgctttactcccggtgaagcattgctcgttctcgggggtattagcttcgtgctgaaccagttgattaagaggagcctgaccctggtggaatcacagggggatcccgtggacttctttctcctcgtggtggtcgtgggcatggttctgatgggcattttcttctctacactgtttgtctttatggactctggaacctgggcctcgagcattttttttcatttgatgacctgtgtactgtccctgggcgtggtgctgccttggctgcatcgccttattagacgaaatcctctcctgtggcttttgcaattcctgtttcagaccgacacacggatttacctgttggcctattggtctctgttggctacgctggcttgcctggtagttttatatcaaaatgcgaagcgttcttcctctgagagcaaaaagcaccaggctcccaccatcgcacgaaagtattttcatctcattgttgtggctacatatatacctggcatcattttcgatagacccctgttgtacgttgcggccactgtctgtctggctgtgttcattttcctggaatatgtccgctactttaggatcaagcccctgggacacacactacggtccttcctaagtttgttcctggatgaacgtgattccgggccgctgatcctcacacatatatacctgttactcgggatgagcctccccatatggcttattcccaggccatgtactcagaaaggcagcctcggcggcgctcgtgcattggtcccctacgcgggggttctagcagttggcgtgggtgataccgttgcttccatatttggatccacaatgggtgagataagatggccgggcacaaagaagacatttgagggcaccatgacatccatattcgcccaaattatatcggtcgcgctgatcctcattttcgactccggggtggatcttaactacagttacgcctggatcctgggttctatctctaccgtgtccctgctagaggcatacacgacacaaattgataacttattattacctttgtacctcctcattctgctgatggcatag

SEQ ID NO: 183115 - DNA, 801 bp, Artificial Sequence
  derived and/or modified sequence
atgacccgggagtgccccagccccgcccccggccccggcgcccccctgagtgggtccgtactagctgaggccgccgtggtgtttgccgtagtgctgtccatccatgccaccgtttgggatcggtatagttggtgtgcggtggcactcgccgtgcaggcattttatgtacagtataaatgggaccgtttactccagcaaggatctgctgtcttccagtttcgcatgtccgcgaattcgggactcctcccggcctcaatggtcatgccgcttcttggcttggtgatgaaggagcgctgtcagactgctgggaatcccttctttgagaggttcggtattgttgtggccgcaacaggaatggccgtagcactcttcagtagcgtcctggctcttggtattacacgtccagtacccactaacacctgtgttattttagggctcgcgggcggcgttataatctacattatgaagcattcactcagcgtcggagaagtgatcgaggtactggaggtgctgctgatctttgtctatctgaatatgattttactttacttgctgcccaggtgttttacccctggagaagcgttgcttgtcctggggggaatcagttttgtgctcaaccagctcattaagaggtccctgactctggtggaatctcaaggggacccagttgatttttttctgttggtcgtggtggtgggcatggtgttaatgggcatttttttcagtacactgtttgtattcatggattccggcaccagaccccctcctagtccggagagcatttccacaagtctgtggtag

SEQ ID NO: 183116 - DNA, 1617 bp, Artificial Sequence
  derived and/or modified sequence
atgacacgcgaatgtccttcaccagcgcctgggccaggggctcccctctccggatcagtgttggcagaggccgcagtggtcttcgccgtcgtcctgtctatccacgccacggtgtgggatcgatattcttggtgtgctgtcgccttagcagtgcaagcattttatgttcagtacaaatgggatcgtctgctgcagcaagggtcagctgtatttcagttccggatgagtgcaaactcagggttattgccagcttctatggtgatgcccctgttaggattggttatgaaagaacgctgccaaactgccggtaaccccttcttcgagaggtttggcatagtcgtggccgctacaggcatggctgtcgccctcttcagctccgtcctggccttggggatcactagaccagtgccaacgaatacctgcgtcattctgggactagctggcggtgtgatcatctacatcatgaaacacagcctctcagtaggcgaggtcatcgaggttctcgaagtactcctaatttttgtatacctgaacatgattcttctgtatctcctgccgcgatgctttacgcctggggaagctctgctggtcctgggagggatttcttttgtcctgaatcagctgattaagcgttctcttactctggttgagagtcagggagatcctgtcgacttctttctcctggttgtggtggtagggatggtccttatggggatcttcttctccactttgtttgtgtttatggatagcgggacgtgggcttcatccatcttttttcatttaatgacatgcgtactgtccttgggcgtggtgctgccatggctgcaccgcctgattcgtcgcaatcccctcctctggctgttacagttcctgtttcagacagatacgcgtatatatctgcttgcgtactggtccctgctggctacactggcatgtttggtggtcctgtaccaaaacgctaaacgcagttcttccgaaagcaaaaaacatcaagcacctaccatagccagaaagtactttcacctcattgtcgtggctacctatatcccaggcatcattttcgacagacccctcctgtacgtggccgctactgtttgtctcgcagtgtttatctttctggaatacgttaggtattttaggataaaaccactgggccataccctgcgctcttttctgtcactgttccttgacgagagggacagcggccctctcatcctgacccatatttatctgcttctggggatgtctctccctatctggctgatcccacggccttgtacccaaaaaggatctctgggtggtgctcgcgctctggttccttacgccggagtgcttgcagtaggtgtgggcgataccgtagcctccattttcggctcgacaatgggtgaaatcagatggcccggtaccaagaagacctttgaggggactatgaccagtattttcgcccagataatcagcgtggctctgattcttatctttgattccggggtcgatttgaattacagttatgcatggattctgggctcaatctcgactgttagcctgttagaagcatatacaacccagattgacaaccttctgctgccgctctacctgcttatcttgctcatggcctag

SEQ ID NO: 183117 - DNA, 801 bp, Artificial Sequence
  derived and/or modified sequence
atgacaagggagtgcccgtctcctgcccctggaccaggtgctcccttatcgggttctgtgctggctgaagctgccgtggtcttcgcggttgtactgtctatccacgcgaccgtgtgggacagatacagttggtgcgccgtcgccctcgcagtgcaagctttctacgtccagtataaatgggaccggctgctgcagcagggctctgccgttttccaattcaggatgagcgctaattcaggcttactacccgcaagtatggttatgcctctgctaggactcgtgatgaaagaaagatgtcaaactgcaggaaatccttttttcgaaaggttcggaattgtcgttgccgctaccggtatggccgtggcgcttttcagttcagtacttgctctaggcattacacggccagttcctaccaatacatgtgtgattttgggcctggctgggggagttattatctatattatgaagcactccctgtccgtaggggaggttatagaagtcttagaagtgctgctcatctttgtgtatctgaatatgatcctactgtacttgctccctcgttgctttacgcccggagaggccttgcttgtcttgggaggaatttcatttgtcttgaaccaactgattaagcgcagtctgacgctggtcgagagtcagggggatccagtcgattttttcttactggtcgtggtggtgggcatggtactcatgggaatctttttcagcacattattcgtatttatggacagtgggacgcgcccaccgccaagccctgaaagcataagcacatccctgtggtag

SEQ ID NO: 183118 - protein, 365 aa, Artificial Sequence
  derived and/or modified sequence
MPGGKKVAGGGSSGATPTSAAATAPSGVRRLETSEGTSAQRDEEPEEEGEEDLRDGGVPFFVNRGGLPVDEATWERMWKHVAKIHPDGEKVAQRIRGATDLPKIPIPSVPTFQPSTPVPERLEAVQRYIRELQYNHTGTQFFEIKKSRPLTGLMDLAKEMTKEALPIKCLEAVILGIYLTNSMPTLERFPISFKTYFSGNYFRHIVLGVNFAGRYGALGMSRREDLMYKPPAFRTLSELVLDFEAAYGRCWHVLKKVKLGQSVSHDPHSVEQIEWKHSVLDVERLGRDDFRKELERHARDMRLKIGKGTGPPSPTKDRKKDVSSPQRAQSSPHRRNSRSERRPSGDKKTSEPKAMPDLNGYQIRV

SEQ ID NO: 183119 - protein, 204 aa, Artificial Sequence
  derived and/or modified sequence
MPGGKKVAGGGSSGATPTSAAATAPSGVRRLETSEGTSAQRDEEPEEEGEEDLRDGGVPFFVNRGGLPVDEATWERMWKHVAKIHPDGEKVAQRIRGATDLPKIPIPSVPTFQPSTPVPERLEAVQRYIRELQYNHTGTQFFEIKKSRPLTGLMDLAKEMTKEALPIKCLEAVILGMYPSSPEGEGSGLLWASASCSESEGGVG

SEQ ID NO: 183120 - DNA, 1098 bp, Artificial Sequence
  derived and/or modified sequence
atgcctggcggtaaaaaggtggctggcggagggtcatccggggctacaccaaccagtgcggctgctacagccccttctggagtcagaagacttgaaacttctgagggcacttccgcccagcgcgacgaggaaccagaggaggaaggagaggaggacctgcgagatggaggcgtgcccttctttgtcaaccgcggaggcctccctgtggacgaggcaacttgggaacgtatgtggaaacacgtcgcaaagatccaccccgacggcgagaaagtcgctcagcgcatacgaggggctacagatctgccaaagatacccattccttccgtgccgacctttcagccctcaacccctgtccccgagagactggaagccgtgcagcgctacatcagggagcttcaatacaaccataccggcacccagtttttcgagattaagaaaagtcgccctctcacaggtctcatggatcttgcgaaggagatgaccaaggaggcgctgcccattaagtgtctggaggccgtcatccttgggatatacctcaccaacagtatgcctacccttgaacgttttcccatctcttttaaaacttacttttcgggtaattacttcaggcatattgttctgggagttaacttcgcaggccgatatggggcactgggcatgtccaggagagaagatctaatgtataaacccccagcctttcggacgctgagcgagctggtgctggattttgaagcagcttatggcagatgctggcacgtactgaaaaaggtcaaactagggcagtctgtgagccacgatccccattcagtggaacagattgagtggaagcacagcgtcttggacgtggagcggctgggtcgagatgactttagaaaggaactcgaaagacatgcacgggatatgaggttgaaaatcggtaagggaaccggccctccatctccaactaaggatcggaagaaggacgtgtcgtcaccacagagggcacagagctctccccatagaaggaactccagatctgaacgaagacccagcggggataagaaaacgtcagaacctaaagccatgcctgacctcaatggctaccagatccgagtttag

SEQ ID NO: 183121 - DNA, 1098 bp, Artificial Sequence
  derived and/or modified sequence
atgccaggcggtaagaaggtcgctggaggtgggtcatcaggagctacacccaccagtgccgcagctactgcccccagcggagtgcggcggcttgaaacatcagaaggaacgagtgcccagcgcgatgaggaaccagaagaggagggtgaagaagatctgcgcgatggaggcgttcctttcttcgtgaatcgtggcggtctgccagtcgatgaggcgacctgggagcgaatgtggaagcacgtggccaaaatccatcccgatggagagaaagtcgcacagaggatcaggggagccacagacctgccaaagatacccataccatctgtccccacatttcaaccaagtacacccgttcccgaaaggcttgaggccgtccagcgttacattagagaactccaatacaatcatacaggcacccagttcttcgagatcaaaaagtcccgcccattaacgggtctcatggacctggctaaggagatgactaaggaagccctgcctatcaagtgtttagaggctgtcattctgggcatatatctgaccaattctatgcctactctggagagattcccgatatccttcaaaacttacttttctggaaactatttcagacacatagtactgggtgtcaacttcgccgggcgttacggagccttaggcatgagtcgtcgtgaagacttgatgtataagccaccagcatttcgaacactcagcgagttagtcctggattttgaagccgcgtacggccgttgttggcacgtactcaaaaaagtgaagctcggtcagagcgtatcccacgacccacacagtgtagagcagatagaatggaagcacagcgtccttgacgttgaaagactcgggagggatgatttccggaaggaactcgagaggcacgcacgggatatgcggctcaaaatcggcaagggcacaggccctcctagtccaacaaaagaccgcaagaaggatgtgagtagcccacagcgtgcccagagtagtccccatcgcaggaattcccggtctgagaggcggccttctggggacaagaaaacttccgagccaaaggctatgccagaccttaatggatatcaaatccgggtgtag

SEQ ID NO: 183122 - DNA, 1098 bp, Artificial Sequence
  derived and/or modified sequence
atgccaggcggtaagaaggtcgctggaggtgggtcatcaggagctacacccaccagtgccgcagctactgcccccagcggagtgcggcggcttgaaacatcagaaggaacgagtgcccagcgcgatgaggaaccagaagaggagggtgaagaagatctgcgcgatggaggcgttcctttcttcgtgaatcgtggcggtctgccagtcgatgaggcgacctgggagcgaatgtggaagcacgtggccaaaatccatcccgatggagagaaagtcgcacagaggatcaggggagccacagacctgccaaagatacccataccatctgtccccacatttcaaccaagtacacccgttcccgaaaggcttgaggccgtccagcgttacattagagaactccaatacaatcatacaggcacccagttcttcgagatcaaaaagtcccgcccattaacgggtctcatggacctggctaaggagatgactaaggaagccctgcctatcaagtgtttagaggctgtcattctgggcatatatctgaccaattctatgcctactctggagagattcccgatatccttcaaaacttacttttctggaaactacttcagacatatcgtgctcggagtcaatttcgcaggacggtatggagccctgggaatgagccgaagagaagatctcatgtataaaccacctgcatttaggacactgtctgaacttgtgctggattttgaagccgcttatgggcggtgttggcacgtgcttaaaaaggtgaagctaggtcagagtgtttcccacgacccacattcagtggagcagatcgagtggaaacatagcgttcttgatgtcgaaaggctcggacgggatgactttaggaaggaactggaacgccacgcccgcgatatgaggctgaaaattggaaagggtacaggtccaccatcacctaccaaagataggaagaaggacgtaagctcaccccagcgcgcacagtcctcaccccatcgacgaaatagtagaagcgaacggagaccaagcggtgacaaaaaaactagcgagcccaaagccatgcctgacctgaatggataccagattagagtgtag

SEQ ID NO: 183123 - DNA, 5724 bp, Artificial Sequence
  derived and/or modified sequence
gctcccggccagctgcgagtcttggctcccggacttgtctcgtcgcgtcggagaaatcgccccccagcgccgctctcccgcccgggggtcttggttccgagctcgcgcggccgggagtcgcctcggtcttccttggggcgcgcgcagatgtgagcgtgcgagagttgtgtaggggattttgttccctccgaaactgagacccagggcgcccagtgggcacccgtgccttgactctgtcctttctgcagccgctggtccgagctgtctggcctcagtttccctccgacttttctccgctctgccagccctcactgctgcccgtcattgttctcgcagttagatgggggtgctttgtgacggctgccaagttggggtgtgttctctttattccgtttttcaaacagaacaaggcctccaaggctgaccccagacaacccaccccctcggaccctaattcaccttattgcactgattttttttatcaagtcgtattttattgtacaggagccacgccctgatttcttaaaggcgccttgcactctggccatgtgttatctctgcagccggtgtgtgggaggcctcttgtgagccagttgttttcccgcctccaccacccccctcgaagatttagggatgccaggggggaagaaggtggctgggggtggcagcagcggtgccactccaacgtccgctgcggccaccgccccctctggggtcaggcgtttggagaccagcgaaggaacctcagcccagagagatgaggagccagaagaggaaggggaagaggacctgcgagacggaggcgtccccttctttgtcaaccggggtgggctacctgtggatgaggccacctgggaaaggatgtggaaacacgtggccaagatccaccccgatggagagaaggtggcgcaacggatccgtggggccacagacctgcccaagatccccataccgagtgtgcctacgttccagccgtctacacctgtccctgagcgcctggaagctgtgcagcgctacatcagagagctgcagtacaatcacacagggacacagttctttgaaattaagaagagcagacctctgacagggctgatggacctggccaaggaaatgaccaaagaggccctgccaatcaaatgcctggaagccgtgatcctgggaatttacctcaccaacagcatgcccaccctggagcgcttccccatcagcttcaagacctacttctcagggaactacttccgccacatcgtgctgggggtgaacttcgcgggccgctacggtgcgctgggcatgagtcggcgcgaggacctgatgtacaagccgcccgccttccgcacgctcagcgagctcgtgctggacttcgaggccgcctacggccgctgctggcacgtgctcaagaaggtgaagctgggccagagcgtgtcacacgacccgcacagcgtggagcagatcgagtggaagcactcggtgctggacgtggagcgcctgggccgcgatgacttccgcaaggagctggagcgccacgcccgcgacatgcggctcaagattggcaaagggacgggccctccctctcccaccaaggaccggaagaaggatgtttcttccccgcagcgggcccagtccagcccccaccgcaggaacagccgcagtgaaagacggccctcgggtgacaagaagacttccgagcccaaagccatgccagaccttaacgggtaccagatccgggtctgaggcggatgccagcaccccaggccccacccactcttgggggccaggatccacctgctggaaccagccttatgcatggggaaggcggggctggtgacaaggcagggcaagaggctgcaggaagagtgtgttccagctcagccccccaagctgctctcgctcccactgagccaagccccctaactttgggcctagaggccgttagtattttatttggagtttttaactctacaactgaagtttaaggtatttggggaaaacttagtccaaatggatctgctgatggtgggaaggccagtgcttaacaaatccatgtgtcatggggccaggtgagggaaactgctggttctgctggtgcctctgcccctggcttctctctgggagttgggtgcatcttatcagtgggaaatctcccagccttaccaggcctgtgatggggggtgggggtggggtggagatgtttctccagttctgcctgccctggcagaatcttgacccagggaaagggaagcagggtaggagtccttctgagaaaggtctgtgtagcccattaaccaggagcttggcacaggccacatctgccccaagagcatgagctcgtggctcaggagagccttcaggcccttgaggcccccatgggcagtgctgtgtgggcagaggaggggtgatatgagagcgagcccagggaaggacctctgggcaaaaagttcccaggccctaactgcgtctacttgctcagtcccagctctgcctgttgctctagcccacaggctccctgcggagggtctgggcttggcggaggacccagaatggcactgaggccagcatggctgtgggagttgagcaaaccctgggtgccagtccaggagctgtggctggacatggggtgatggggcgggatgcttgggcctgggtctctccgccagcagtgccaggagcccttgctggggaaatcaagaccagactaggatgcttctgccccaggcctgccttccattctttaacagcccatcttggcttggggttgcaatgatggctgggccagtcacttgtggcagggcatcagggccctggcagggaagaacctaggcacctggggttgtccccagcctgcccgtcagcatgagatacccagtgggaaagtgagaggatgcggagaggttggcagagccaggggtaggttctggaggctcaagcaacaaggaggtgcaggtaaagggtgcagtgcagccactgagggacagctgggaactgggggatgcaagtgagaaagggatgtgggggagagttcaggatcaggctgcttgaggagtaatgggttacctacagcagagacgagatggctgtttgtcaggaggcggtagaaaggtagaaaggattcagattgtggaagggtaaacggatgagatgaccattaaggttttgttttactgagaggctgtaagtctgccagggacagctgtcagtaaggctgcagaagggctggggggctacacaaggaagagcagaactagggttgtaagctcaaatgacgagcaaacggtgagaaggaggcctgaagggctgtgtggggactatggctacctgaagagggcacaccctgttaaaggggccacagctgctcagctgttcttacagtgccggccctgtgttgccagattgtctgctttgtcagaggccagaattctgactttttatgtgaaataggatttttaaatgctggtgatcacttaaaaaaaacttaaaaacccaatactggcaaaagaggatgccagtttgcaatccctgaagtagagagagctcgtgctggggagaagtccaccaagatgctttgaggcgggctgtagcaaagtcctgtttctcagagctgggctgggctggggtaggatccttgcagctgaggaggaggaaaagccactgagtctcctcccagagcgggacaaaccagaggccctttgcagttgctgggtcaccagcgggggtggcgcatggagtacagacagtgtagctcttggcctgccagggagacggatggtgcctttgaagcaaagaggaagggaaggcagaaccagggatgcctttgctgatgagagtgcctgtcagggaaggcgccacaggctggcagctcttcaaaccagcagcgcttgacccagagccagatccagcatggcctggccagaggcaccctgggaggccagctggtcagtcccttgcctccccaagttccccctggggtcaatgagccctgggaggatgcctaacctaactccagccagactaataggggcatggtgacccttgactcaccatcccatcccagctttcagggagtgggggtagtgtggtctccatgttcctactatgcctaagaagagatggctcaccttgggaggtgccaggctgaaactaggtcctttccgggtctggatgctgccgctcaggagcaggggcgtggcctcagctgcctctgggagcttcccgggaatgacagggtttgaggggagtagatatgagagggagccgctcctggttctggagtcttaggaggttccaacttgcaggatcctttcccagagccctccatggagaaaacagcaaaatgaagcccttacctgcttgctgtctgcaagggagggagccgagccccagctgataatcccccagcactcacccttcctgagctgagacttcggggctgtggagaccagcacaggacatagtggtgctttttaaatttatttttaactgtttctcatatgtagcaacccctcctcccctcctgggcatgtttacacaggctctgctctgggggctggcctggctgtgaggtttctggggaggcagagaggcagggactttggggccttagtcaccatccatggtatcacctcatctcacttcctgtgagggacagggcctggctgatgtgatcccagctccccccagttcaggactgtctttcagctcctttgcccctggaggtgggggctgctggctgaggaggggtcaaggtgagttcaagaaagctacctgtggaaaatggaccaggttgggggggtgattgcaaagtctccccaaagcctggctcctcatgctcagtgccaggggcagaacactggggagccaggtatagagagccttcctgtcataactgccagtcctcttcctccaaggcctctgcatattctcatgttcccctcacccatcatgccagccacccctatccctcttctagcagggccaagatggggacagcagcagccctctggccttgggatgtgatgataaagcaagcctagggccagggtttggggagcagagagagccaagaagttgaccacgtgtgatttccagcccttcccactgggacttgacttcccaggtcaaggagtccgtctcattctggctggtcgagtgaccagaggcctgtgtgaatgtgtgcacctgcttttcctgcctggaatgttttctggctcagctgcagcaacatctgtgagcccagtgtctgccctgtgtccctgggctcgctccaagtgcaggaacatacatgcagggcccaacatgatgatggtgtgaagggcaggaaacagtcctctgaaggagtggggaggtgggcagtctgcccccgccaggtaccatcgcctcctgccagcttccttagaccaggcagggctgccatggtgctagctgcaagtccatcagtattgaccgtctcgctccatcttggtcctccggagtcccaagtttccttttcatcaaatctgacaagagagaagaaacatgggtgtgcttggcccacagggcctggtggtgatggacctccccgctccctcaagctctggatggctgcagtgttgtactagactttgttcaggctgttctcatctcagtattgccccttcctttcactttcacacttcatctcattcctgttgtcactttccccgaaacgaataaagtctccccagctcctgctgtgtaggctgggcagaaacc

SEQ ID NO: 183124 - DNA, 1098 bp, Artificial Sequence
  derived and/or modified sequence
atgcccggcggcaagaaggtggccggcggcggcagcagcggcgccacccccaccagcgccgccgccaccgcccccagcggcgtgagaagactggagaccagcgagggcaccagcgcccagagagacgaggagcccgaggaggagggcgaggaggacctgagagacggcggcgtgcccttcttcgtgaacagaggcggcctgcccgtggacgaggccacctgggagagaatgtggaagcacgtggccaagatccaccccgacggcgagaaggtggcccagagaatcagaggcgccaccgacctgcccaagatccccatccccagcgtgcccaccttccagcccagcacccccgtgcccgagagactggaggccgtgcagagatacatcagagagctgcagtacaaccacaccggcacccagttcttcgagatcaagaagagcagacccctgaccggcctgatggacctggccaaggagatgaccaaggaggccctgcccatcaagtgcctggaggccgtgatcctgggcatctacctgaccaacagcatgcccaccctggagagattccccatcagcttcaagacctacttcagcggcaactacttcagacacatcgtgctgggcgtgaacttcgccggcagatacggcgccctgggcatgagcagaagagaggacctgatgtacaagccccccgccttcagaaccctgagcgagctggtgctggacttcgaggccgcctacggcagatgctggcacgtgctgaagaaggtgaagctgggccagagcgtgagccacgacccccacagcgtggagcagatcgagtggaagcacagcgtgctggacgtggagagactgggcagagacgacttcagaaaggagctggagagacacgccagagacatgagactgaagatcggcaagggcaccggcccccccagccccaccaaggacagaaagaaggacgtgagcagcccccagagagcccagagcagcccccacagaagaaacagcagaagcgagagaagacccagcggcgacaagaagaccagcgagcccaaggccatgcccgacctgaacggctaccagatcagagtgtag

SEQ ID NO: 183125 - DNA, 1098 bp, Artificial Sequence
  derived and/or modified sequence
atgccaggcgggaaaaaggtagccggcggaggatctagcggggccacacctacctcggccgcagctaccgcgcccagcggggtccgccggctcgagactagtgaggggacctccgctcagcgcgacgaggagcccgaagaggagggagaagaggacctgagagatgggggagtaccgttcttcgtcaatcgaggaggtctgccagtcgacgaggcgacgtgggagcggatgtggaaacacgttgcaaaaatccatcctgacggggagaaagttgcccagagaatccggggagctacagatctgcctaagattcctattcctagcgtgcctactttccagccatccacccctgtacctgaacggctcgaagctgtgcagcggtatatacgggaactgcaatacaatcacactggtactcagttcttcgaaatcaaaaaaagccgacctctgacgggcctcatggatctcgcgaaagaaatgacaaaagaagccttgccaatcaagtgtctagaagcagtgattctggggatttacctgacaaactcaatgccaactctggagcggtttcccatatcatttaaaacgtatttctccggtaactactttcgacatattgttctgggtgtgaacttcgccggccgctatggagcgttgggcatgtccaggcgcgaagatctgatgtacaagcccccggccttcaggactctctctgagctggtgttggattttgaggccgcctacgggagatgctggcacgtgctcaaaaaggtgaaactcggccagagcgtctctcacgaccctcattccgttgagcagattgagtggaaacactcggtacttgacgtcgagcggctgggacgtgacgacttccgcaaggagctggagcggcatgccagagacatgaggctgaagattggtaaggggacagggccaccatcacccacaaaggaccgcaaaaaggacgtgagctcacctcagagggcccaaagctctccccatcggaggaactcccggagtgagcgacgcccctccggcgataagaagaccagtgagcctaaagctatgcctgatttaaatggctaccagattcgcgtgtag

SEQ ID NO: 183126 - DNA, 1098 bp, Artificial Sequence
  derived and/or modified sequence
atgcctgggggcaagaaggtggccggcggcggcagcagcggggccacccccaccagcgctgctgccacagcccccagcggcgtgcggcggctggagaccagcgagggcaccagcgcccagagagatgaggagcctgaggaggagggggaggaggacctgagagatggaggagtgcccttctttgtgaacagaggaggcctgcctgtggatgaggccacctgggagaggatgtggaagcacgtggccaagatccacccagatggagagaaggtggcccagaggatccggggggccacagacctgcccaagatccccatccccagcgtgcccaccttccagcccagcacccctgtgcctgagcggctggaggccgtgcagcgctacatccgggagctgcagtacaaccacacaggcacccagttctttgagatcaagaagagccggcccctgaccggcctgatggacctggccaaggagatgaccaaggaggccctgcccatcaagtgcctggaggccgtcatcctgggcatctacctgaccaacagcatgcccaccctggagcgcttccccatctccttcaagacctacttcagcggcaactacttccgccacatcgtgctgggcgtgaactttgctggccgctatggagccctgggcatgagccggcgggaggacctgatgtacaagcccccagccttccgcaccctgtctgagctggtgctggactttgaagctgcctacggccgctgctggcacgtgctgaagaaggtgaagctgggccagagcgtgtcccatgacccccacagcgtggagcagatcgagtggaagcacagcgtgctggatgtggagcggctgggcagagatgacttcaggaaggagctggagagacatgcccgggacatgaggctgaagattggaaaaggaactggaccacccagccccaccaaggacaggaagaaggatgtgagcagcccccagagggcccagagcagcccccacagaagaaacagccgctcagaaagaagacccagcggggacaagaagaccagcgagcccaaggccatgccagacctgaatggctaccagatccgggtgtag

SEQ ID NO: 183127 - DNA, 1098 bp, Artificial Sequence
  derived and/or modified sequence
atgcccggcggcaagaaggtggccggcggcggcagcagcggcgccacacccacaagcgccgcggccactgctcccagcggagttcggcggcttgaaacgagtgaaggaacatcggcccagagagatgaggaacctgaggaagagggcgaggaggacttgagggacgggggcgtaccctttttcgtcaatagaggtggactgcccgtggacgaggcaacctgggagcggatgtggaagcacgtcgccaaaattcaccctgatggagagaaggtggcccaaagaatcaggggcgccactgaccttcccaaaattcccatcccctcagtgccgacatttcaaccttcaaccccagtgcctgaaagactggaagccgtccagagatatattcgggagctacagtataatcatacagggacccaatttttcgagattaaaaagtctcgacctctcaccgggctcatggacttagcaaaggaaatgacgaaagaggcactgcccatcaagtgtctggaggcagtgatcctggggatttacttaacaaatagtatgccaacattggaaagattccctatttcttttaagacttacttctctggcaactacttccggcatatcgtgctgggggtgaactttgcaggccggtacggcgctctcggaatgtcaagacgagaggacttaatgtacaagcctcccgcttttcgcacactgagtgaactagttcttgactttgaggctgcttatgggagatgctggcatgtgctgaagaaggtgaagcttggccaaagcgtgtcccatgacccccatagcgtcgaacagattgagtggaaacatagtgtcctagacgtggaaagattgggccgggacgattttcgaaaagagcttgagcgccacgccagggacatgaggttgaagatcggaaagggcaccgggcccccgtcaccgaccaaagacaggaagaaggatgtatcatccccacagagggctcagtcttcaccccacaggcgcaactctaggagcgaacgacgcccctcgggggacaagaagacatcagagccaaaagcaatgcccgacttgaacggatatcagatccgcgtctag

SEQ ID NO: 183128 - RNA, 1098 nt, Artificial Sequence
  derived and/or modified sequence
augccaggcgguaagaaggucgcuggaggugggucaucaggagcuacacccaccagugccgcagcuacugcccccagcggagugcggcggcuugaaacaucagaaggaacgagugcccagcgcgaugaggaaccagaagaggagggugaagaagaucugcgcgauggaggcguuccuuucuucgugaaucguggcggucugccagucgaugaggcgaccugggagcgaauguggaagcacguggccaaaauccaucccgauggagagaaagucgcacagaggaucaggggagccacagaccugccaaagauacccauaccaucuguccccacauuucaaccaaguacacccguucccgaaaggcuugaggccguccagcguuacauuagagaacuccaauacaaucauacaggcacccaguucuucgagaucaaaaagucccgcccauuaacgggucucauggaccuggcuaaggagaugacuaaggaagcccugccuaucaaguguuuagaggcugucauucugggcauauaucugaccaauucuaugccuacucuggagagauucccgauauccuucaaaacuuacuuuucuggaaacuauuucagacacauaguacugggugucaacuucgccgggcguuacggagccuuaggcaugagucgucgugaagacuugauguauaagccaccagcauuucgaacacucagcgaguuaguccuggauuuugaagccgcguacggccguuguuggcacguacucaaaaaagugaagcucggucagagcguaucccacgacccacacaguguagagcagauagaauggaagcacagcguccuugacguugaaagacucgggagggaugauuuccggaaggaacucgagaggcacgcacgggauaugcggcucaaaaucggcaagggcacaggcccuccuaguccaacaaaagaccgcaagaaggaugugaguagcccacagcgugcccagaguaguccccaucgcaggaauucccggucugagaggcggccuucuggggacaagaaaacuuccgagccaaaggcuaugccagaccuuaauggauaucaaauccggguguag

SEQ ID NO: 183129 - RNA, 1098 nt, Artificial Sequence
  derived and/or modified sequence
augccaggcgguaagaaggucgcuggaggugggucaucaggagcuacacccaccagugccgcagcuacugcccccagcggagugcggcggcuugaaacaucagaaggaacgagugcccagcgcgaugaggaaccagaagaggagggugaagaagaucugcgcgauggaggcguuccuuucuucgugaaucguggcggucugccagucgaugaggcgaccugggagcgaauguggaagcacguggccaaaauccaucccgauggagagaaagucgcacagaggaucaggggagccacagaccugccaaagauacccauaccaucuguccccacauuucaaccaaguacacccguucccgaaaggcuugaggccguccagcguuacauuagagaacuccaauacaaucauacaggcacccaguucuucgagaucaaaaagucccgcccauuaacgggucucauggaccuggcuaaggagaugacuaaggaagcccugccuaucaaguguuuagaggcugucauucugggcauauaucugaccaauucuaugccuacucuggagagauucccgauauccuucaaaacuuacuuuucuggaaacuacuucagacauaucgugcucggagucaauuucgcaggacgguauggagcccugggaaugagccgaagagaagaucucauguauaaaccaccugcauuuaggacacugucugaacuugugcuggauuuugaagccgcuuaugggcgguguuggcacgugcuuaaaaaggugaagcuaggucagaguguuucccacgacccacauucaguggagcagaucgaguggaaacauagcguucuugaugucgaaaggcucggacgggaugacuuuaggaaggaacuggaacgccacgcccgcgauaugaggcugaaaauuggaaaggguacagguccaccaucaccuaccaaagauaggaagaaggacguaagcucaccccagcgcgcacaguccucaccccaucgacgaaauaguagaagcgaacggagaccaagcggugacaaaaaaacuagcgagcccaaagccaugccugaccugaauggauaccagauuagaguguag

SEQ ID NO: 183130 - protein, 863 aa, Artificial Sequence
  derived and/or modified sequence
MKKFFDSRREQGGSGLGSGSSGGGGSTSGLGSGYIGRVFGIGRQQVTVDEVLAEGGFAIVFLVRTSNGMKCALKRMFVNNEHDLQVCKREIQIMRDLSGHKNIVGYIDSSINNVSSGDVWEVLILMDFCRGGQVVNLMNQRLQTGFTENEVLQIFCDTCEAVARLHQCKTPIIHRDLKVENILLHDRGHYVLCDFGSATNKFQNPQTEGVNAVEDEIKKYTTLSYRAPEMVNLYSGKIITTKADIWALGCLLYKLCYFTLPFGESQVAICDGNFTIPDNSRYSQDMHCLIRYMLEPDPDKRPDIYQVSYFSFKLLKKECPIPNVQNSPIPAKLPEPVKASEAAAKKTQPKARLTDPIPTTETSIAPRQRPKAGQTQPNPGILPIQPALTPRKRATVQPPPQAAGSSNQPGLLASVPQPKPQAPPSQPLPQTQAKQPQAPPTPQQTPSTQAQGLPAQAQATPQHQQQLFLKQQQQQQQPPPAQQQPAGTFYQQQQAQTQQFQAVHPATQKPAIAQFPVVSQGGSQQQLMQNFYQQQQQQQQQQQQQQLATALHQQQLMTQQAALQQKPTMAAGQQPQPQPAAAPQPAPAQEPAIQAPVRQQPKVQTTPPPAVQGQKVGSLTPPSSPKTQRAGHRRILSDVTHSAVFGVPASKSTQLLQAAAAEASLNKSKSATTTPSGSPRTSQQNVYNPSEGSTWNPFDDDNFSKLTAEELLNKDFAKLGEGKHPEKLGGSAESLIPGFQSTQGDAFATTSFSAGTAEKRKGGQTVDSGLPLLSVSDPFIPLQVPDAPEKLIEGLKSPDTSLLLPDLLPMTDPFGSTSDAVIGKVIISVSSVMHDMCACFKNDKYLVNQSLGNSPATPEAKAI

SEQ ID NO: 183131 - protein, 961 aa, Artificial Sequence
  derived and/or modified sequence
MKKFFDSRREQGGSGLGSGSSGGGGSTSGLGSGYIGRVFGIGRQQVTVDEVLAEGGFAIVFLVRTSNGMKCALKRMFVNNEHDLQVCKREIQIMRDLSGHKNIVGYIDSSINNVSSGDVWEVLILMDFCRGGQVVNLMNQRLQTGFTENEVLQIFCDTCEAVARLHQCKTPIIHRDLKVENILLHDRGHYVLCDFGSATNKFQNPQTEGVNAVEDEIKKYTTLSYRAPEMVNLYSGKIITTKADIWALGCLLYKLCYFTLPFGESQVAICDGNFTIPDNSRYSQDMHCLIRYMLEPDPDKRPDIYQVSYFSFKLLKKECPIPNVQNSPIPAKLPEPVKASEAAAKKTQPKARLTDPIPTTETSIAPRQRPKAGQTQPNPGILPIQPALTPRKRATVQPPPQAAGSSNQPGLLASVPQPKPQAPPSQPLPQTQAKQPQAPPTPQQTPSTQAQGLPAQAQATPQHQQQLFLKQQQQQQQPPPAQQQPAGTFYQQQQAQTQQFQAVHPATQKPAIAQFPVVSQGGSQQQLMQNFYQQQQQQQQQQQQQQLATALHQQQLMTQQAALQQKPTMAAGQQPQPQPAAAPQPAPAQEPAIQAPVRQQPKVQTTPPPAVQGQKVGSLTPPSSPKTQRAGHRRILSDVTHSAVFGVPASKSTQLLQAAAAEASLNKSKSATTTPSGSPRTSQQNVYNPSEGSTWNPFDDDNFSKLTAEELLNKDFAKLGEGKHPEKLGGSAESLIPGFQSTQGDAFATTSFSAGTAEKRKGGQTVDSGLPLLSVSDPFIPLQVPDAPEKLIEGLKSPDTSLLLPDLLPMTDPFGSTSDAVIEKADVAVESLIPGLEPPVPQRLPSQTESVTSNRTDSLTGEDSLLDCSLLSNPTTDLLEEFAPTAISAPVHKAAEDSNLISGFDVPEGSDKVAEDEFDPIPVLITKNPQGGHSRNSSGSSESSLPNLARSLLLVDQLIDL

SEQ ID NO: 183132 - DNA, 2592 bp, Artificial Sequence
  derived and/or modified sequence
atgaagaagttcttcgacagcagaagagagcagggcggcagcggcctgggcagcggcagcagcggcggcggcggcagcaccagcggcctgggcagcggctacatcggcagagtgttcggcatcggcagacagcaggtgaccgtggacgaggtgctggccgagggcggcttcgccatcgtgttcctggtgagaaccagcaacggcatgaagtgcgccctgaagagaatgttcgtgaacaacgagcacgacctgcaggtgtgcaagagagagatccagatcatgagagacctgagcggccacaagaacatcgtgggctacatcgacagcagcatcaacaacgtgagcagcggcgacgtgtgggaggtgctgatcctgatggacttctgcagaggcggccaggtggtgaacctgatgaaccagagactgcagaccggcttcaccgagaacgaggtgctgcagatcttctgcgacacctgcgaggccgtggccagactgcaccagtgcaagacccccatcatccacagagacctgaaggtggagaacatcctgctgcacgacagaggccactacgtgctgtgcgacttcggcagcgccaccaacaagttccagaacccccagaccgagggcgtgaacgccgtggaggacgagatcaagaagtacaccaccctgagctacagagcccccgagatggtgaacctgtacagcggcaagatcatcaccaccaaggccgacatctgggccctgggctgcctgctgtacaagctgtgctacttcaccctgcccttcggcgagagccaggtggccatctgcgacggcaacttcaccatccccgacaacagcagatacagccaggacatgcactgcctgatcagatacatgctggagcccgaccccgacaagagacccgacatctaccaggtgagctacttcagcttcaagctgctgaagaaggagtgccccatccccaacgtgcagaacagccccatccccgccaagctgcccgagcccgtgaaggccagcgaggccgccgccaagaagacccagcccaaggccagactgaccgaccccatccccaccaccgagaccagcatcgcccccagacagagacccaaggccggccagacccagcccaaccccggcatcctgcccatccagcccgccctgacccccagaaagagagccaccgtgcagccccccccccaggccgccggcagcagcaaccagcccggcctgctggccagcgtgccccagcccaagccccaggccccccccagccagcccctgccccagacccaggccaagcagccccaggccccccccaccccccagcagacccccagcacccaggcccagggcctgcccgcccaggcccaggccaccccccagcaccagcagcagctgttcctgaagcagcagcagcagcagcagcagcccccccccgcccagcagcagcccgccggcaccttctaccagcagcagcaggcccagacccagcagttccaggccgtgcaccccgccacccagaagcccgccatcgcccagttccccgtggtgagccagggcggcagccagcagcagctgatgcagaacttctaccagcagcagcagcagcagcagcagcagcagcagcagcagcagctggccaccgccctgcaccagcagcagctgatgacccagcaggccgccctgcagcagaagcccaccatggccgccggccagcagccccagccccagcccgccgccgccccccagcccgcccccgcccaggagcccgccatccaggcccccgtgagacagcagcccaaggtgcagaccacccccccccccgccgtgcagggccagaaggtgggcagcctgaccccccccagcagccccaagacccagagagccggccacagaagaatcctgagcgacgtgacccacagcgccgtgttcggcgtgcccgccagcaagagcacccagctgctgcaggccgccgccgccgaggccagcctgaacaagagcaagagcgccaccaccacccccagcggcagccccagaaccagccagcagaacgtgtacaaccccagcgagggcagcacctggaaccccttcgacgacgacaacttcagcaagctgaccgccgaggagctgctgaacaaggacttcgccaagctgggcgagggcaagcaccccgagaagctgggcggcagcgccgagagcctgatccccggcttccagagcacccagggcgacgccttcgccaccaccagcttcagcgccggcaccgccgagaagagaaagggcggccagaccgtggacagcggcctgcccctgctgagcgtgagcgaccccttcatccccctgcaggtgcccgacgcccccgagaagctgatcgagggcctgaagagccccgacaccagcctgctgctgcccgacctgctgcccatgaccgaccccttcggcagcaccagcgacgccgtgatcggcaaggtgatcatcagcgtgagcagcgtgatgcacgacatgtgcgcctgcttcaagaacgacaagtacctggtgaaccagagcctgggcaacagccccgccacccccgaggccaaggccatctag

SEQ ID NO: 183133 - DNA, 2886 bp, Artificial Sequence
  derived and/or modified sequence
atgaagaagttcttcgacagcagaagagagcagggcggcagcggcctgggcagcggcagcagcggcggcggcggcagcaccagcggcctgggcagcggctacatcggcagagtgttcggcatcggcagacagcaggtgaccgtggacgaggtgctggccgagggcggcttcgccatcgtgttcctggtgagaaccagcaacggcatgaagtgcgccctgaagagaatgttcgtgaacaacgagcacgacctgcaggtgtgcaagagagagatccagatcatgagagacctgagcggccacaagaacatcgtgggctacatcgacagcagcatcaacaacgtgagcagcggcgacgtgtgggaggtgctgatcctgatggacttctgcagaggcggccaggtggtgaacctgatgaaccagagactgcagaccggcttcaccgagaacgaggtgctgcagatcttctgcgacacctgcgaggccgtggccagactgcaccagtgcaagacccccatcatccacagagacctgaaggtggagaacatcctgctgcacgacagaggccactacgtgctgtgcgacttcggcagcgccaccaacaagttccagaacccccagaccgagggcgtgaacgccgtggaggacgagatcaagaagtacaccaccctgagctacagagcccccgagatggtgaacctgtacagcggcaagatcatcaccaccaaggccgacatctgggccctgggctgcctgctgtacaagctgtgctacttcaccctgcccttcggcgagagccaggtggccatctgcgacggcaacttcaccatccccgacaacagcagatacagccaggacatgcactgcctgatcagatacatgctggagcccgaccccgacaagagacccgacatctaccaggtgagctacttcagcttcaagctgctgaagaaggagtgccccatccccaacgtgcagaacagccccatccccgccaagctgcccgagcccgtgaaggccagcgaggccgccgccaagaagacccagcccaaggccagactgaccgaccccatccccaccaccgagaccagcatcgcccccagacagagacccaaggccggccagacccagcccaaccccggcatcctgcccatccagcccgccctgacccccagaaagagagccaccgtgcagccccccccccaggccgccggcagcagcaaccagcccggcctgctggccagcgtgccccagcccaagccccaggccccccccagccagcccctgccccagacccaggccaagcagccccaggccccccccaccccccagcagacccccagcacccaggcccagggcctgcccgcccaggcccaggccaccccccagcaccagcagcagctgttcctgaagcagcagcagcagcagcagcagcccccccccgcccagcagcagcccgccggcaccttctaccagcagcagcaggcccagacccagcagttccaggccgtgcaccccgccacccagaagcccgccatcgcccagttccccgtggtgagccagggcggcagccagcagcagctgatgcagaacttctaccagcagcagcagcagcagcagcagcagcagcagcagcagcagctggccaccgccctgcaccagcagcagctgatgacccagcaggccgccctgcagcagaagcccaccatggccgccggccagcagccccagccccagcccgccgccgccccccagcccgcccccgcccaggagcccgccatccaggcccccgtgagacagcagcccaaggtgcagaccacccccccccccgccgtgcagggccagaaggtgggcagcctgaccccccccagcagccccaagacccagagagccggccacagaagaatcctgagcgacgtgacccacagcgccgtgttcggcgtgcccgccagcaagagcacccagctgctgcaggccgccgccgccgaggccagcctgaacaagagcaagagcgccaccaccacccccagcggcagccccagaaccagccagcagaacgtgtacaaccccagcgagggcagcacctggaaccccttcgacgacgacaacttcagcaagctgaccgccgaggagctgctgaacaaggacttcgccaagctgggcgagggcaagcaccccgagaagctgggcggcagcgccgagagcctgatccccggcttccagagcacccagggcgacgccttcgccaccaccagcttcagcgccggcaccgccgagaagagaaagggcggccagaccgtggacagcggcctgcccctgctgagcgtgagcgaccccttcatccccctgcaggtgcccgacgcccccgagaagctgatcgagggcctgaagagccccgacaccagcctgctgctgcccgacctgctgcccatgaccgaccccttcggcagcaccagcgacgccgtgatcgagaaggccgacgtggccgtggagagcctgatccccggcctggagccccccgtgccccagagactgcccagccagaccgagagcgtgaccagcaacagaaccgacagcctgaccggcgaggacagcctgctggactgcagcctgctgagcaaccccaccaccgacctgctggaggagttcgcccccaccgccatcagcgcccccgtgcacaaggccgccgaggacagcaacctgatcagcggcttcgacgtgcccgagggcagcgacaaggtggccgaggacgagttcgaccccatccccgtgctgatcaccaagaacccccagggcggccacagcagaaacagcagcggcagcagcgagagcagcctgcccaacctggccagaagcctgctgctggtggaccagctgatcgacctgtag

SEQ ID NO: 183134 - DNA, 2592 bp, Artificial Sequence
  derived and/or modified sequence
atgaaaaagttcttcgattcccgacgcgaacaaggggggtctggactgggcagcggctcctctggtggcggaggcagcactagcggcctgggctccggatatattgggagggtgtttggcattgggaggcaacaggtcaccgtcgatgaggtgctcgcagaggggggtttcgccatcgtctttctggtgagaacctccaatggtatgaaatgtgccttaaaacgtatgtttgtgaacaacgagcacgacttgcaggtctgcaagagggagatccagataatgagggatctgagtggtcacaagaatatcgtgggctatatagactccagcatcaacaatgtctcttcaggagatgtgtgggaagttctgatcctgatggacttttgtcggggcgggcaggtggtgaacctaatgaaccagcggctgcaaactggcttcactgagaatgaggtactgcaaattttttgcgacacttgcgaggctgtcgccaggcttcaccagtgcaagaccccaatcatccatagggatttgaaggtagagaacattctattacacgataggggacattatgttctgtgtgattttggctctgccacgaataagttccagaacccccaaacagagggtgtgaatgctgtcgaggatgagatcaaaaaatatacaaccctgtcttatagggctcccgaaatggttaacctatattccgggaagataatcaccacaaaagctgacatttgggctctgggctgtctcctctataaactatgttactttactcttcccttcggagagagccaggtggcaatttgtgatggcaattttaccatccctgataatagtcgttattctcaggacatgcactgcctaatccgctacatgttggagccagaccccgacaagaggcctgatatataccaagtctcgtatttttctttcaagctgctaaaaaaagaatgtccaatccccaacgtccagaactcccccataccagcaaagcttcctgaaccagtgaaagcctctgaggctgccgctaaaaaaacccagccaaaggctagactaacagatcctataccaaccacagaaaccagcatcgcgccacgccagcgcccaaaggcgggtcagacacagccaaaccccggcatcctgcctattcaacccgctctaactcctagaaagcgagccacagtccagcccccacctcaagccgccgggagctcaaatcaacctgggctgctggctagcgtcccgcagcctaagccacaggcccctcccagccagcccctgccacagacacaggctaagcagccccaggccccccccacgcctcagcaaaccccctcaacccaggctcaagggttacccgcacaggcccaggccactcctcagcaccagcagcagctattcctcaaacaacagcagcaacagcagcagccaccacccgcgcaacagcagcctgcaggcaccttttatcaacaacagcaggcacagacccaacagtttcaagctgttcacccagctactcagaagcctgcgattgctcagttcccagtcgtctctcagggcggcagccaacagcagttaatgcaaaacttctatcagcagcagcagcaacaacagcagcaacaacagcagcagcagttagccaccgcgctccatcagcagcagcttatgacacagcaggccgcacttcaacaaaagcctacaatggcagctgggcagcagccgcagcctcagcctgccgccgctccacagcctgctcctgcccaggagcccgcaattcaggccccagtgcggcagcagccaaaagtccagacaaccccgcccccagccgtgcagggccagaaggttggaagcctaacgccgccatcatcaccaaaaacccaaagagccgggcacaggcgaatactctcggatgtaacccactctgccgttttcggagtgcccgcttccaaaagcacacagctacttcaggccgctgctgcagaggccagccttaacaagtccaaaagtgctacgacaaccccgtctggatctcccagaacgagccagcagaacgtctacaatccttcagaaggctccacctggaatccttttgatgacgataatttctcgaagcttaccgccgaagaactcctgaataaagatttcgctaagctcggtgagggaaaacatcccgagaagctggggggatcagccgagtccctcattccaggctttcagagcacccagggggatgcattcgctaccactagcttcagtgcaggtacagcagagaaaagaaagggcgggcaaacagtagacagcggtctgccactgctttctgtgtcagacccgtttattcctctccaggtgccagacgcgccagagaagttaatagaaggcctgaagtcccccgacacttcactgcttctccccgatctcctcccaatgactgacccctttggtagcacttccgatgcagtaattggtaaggtgatcataagtgtgagctccgtcatgcacgacatgtgcgcctgtttcaagaatgacaaatatctggtgaatcaatcccttggtaacagcccggcaactccggaagccaaagctatctag

SEQ ID NO: 183135 - DNA, 2886 bp, Artificial Sequence
  derived and/or modified sequence
atgaaaaagttctttgactcccgaagagaacagggaggctctggtcttgggtcagggagctctggaggcggaggctcaactagcggcttaggtagtggatacataggtagagtgttcggcatcggcaggcaacaggtcacagtggacgaggtgttggcagaaggcggcttcgccatcgtttttttggtccggacaagcaatgggatgaagtgtgccctgaagcgaatgtttgtgaacaatgagcatgatcttcaagtgtgcaagcgggagattcagataatgcgagacctgagcggtcacaagaatatcgtagggtatatcgattcctcaatcaataacgtctcctccggtgatgtctgggaagtgttaatcctcatggatttttgtagagggggacaggtcgtgaacctaatgaatcaaagactccaaaccgggttcacagagaatgaggtattgcaaattttttgtgatacatgcgaggccgtggctagactacaccaatgcaagacacccatcatccatagggatttaaaggtcgagaatatcctgcttcacgatagaggacattacgtactatgcgactttgggagcgcaactaataagttccaaaaccctcaaaccgaaggtgtcaacgccgtcgaagatgagatcaagaagtacaccaccctatcatacagagccccagagatggttaatctgtacagcgggaagattatcactactaaagcagacatctgggcgttaggttgccttctgtacaagttatgttacttcaccttgccatttggtgaatctcaggtggctatctgtgacggaaacttcactatccctgataactcccggtatagccaggacatgcactgcctgattcgttacatgctggagccagacccagacaagagacctgacatctatcaagtatcctatttttccttcaagttgctgaagaaggaatgtcctatcccaaatgtgcagaattcaccaatccccgccaagctgccagagcctgttaaggcctccgaggcagcagccaagaagacccaacctaaggcaagattaactgaccccatccccactacagaaacatctatcgcacctcgccagagacctaaggcgggccaaacacagcccaaccctggaatcttgcctatacagcctgctctcactccccgcaagagggctactgtacagcctccaccgcaggcagccggctcttctaatcagcccggacttctggctagcgttccacaaccgaaaccccaggccccaccttctcagcccttgccccagactcaggccaaacagccgcaggccccacctacacctcagcagacaccatctactcaggcacaggggctccccgcacaagctcaggccaccccacagcatcagcagcagctttttctaaagcagcagcaacagcaacagcagccaccaccagcccaacagcagccagcgggtacgttttatcaacagcaacaagcccagacacaacagtttcaggccgtgcaccctgccacccagaaaccagctatcgcccaatttcctgtagtgtctcaaggcgggtctcaacagcagctgatgcaaaatttttatcagcagcagcagcagcagcaacagcagcaacagcagcagcagctcgccacagccctccaccagcagcagttaatgacccaacaggccgccctccagcagaagcccactatggcagcaggccagcagccacaaccccaaccggccgccgcgccacaaccggcacccgcccaggagcctgccattcaagcccccgtccgacagcagcctaaggttcagactacgcccccccctgcggtccagggacagaaagtcggtagccttactccaccctcatctcccaaaacacagagggccgggcatcgtcgaatcttgagcgatgttacacactccgccgtgttcggcgtaccggcaagcaagtccacacagctgctacaagccgccgcagcagaagccagcctcaataagtccaagtctgccacgaccacccctagcggcagccctagaacatcacagcagaatgtctacaatccatccgagggttctacatggaacccctttgacgatgataacttttctaaactgacagctgaagagttgcttaataaagacttcgctaaattgggcgaggggaaacatcctgagaagctcgggggcagcgcggagtcactgatcccaggattccagtccacacagggcgacgcctttgccactacatcattctccgcggggactgccgaaaaacgcaagggcgggcaaacggtggacagcggactgcccctgttgtccgtctccgacccattcattccgcttcaggtacccgatgcccctgagaagttgattgagggtctgaagtcacccgataccagtctcctcctccccgatctcctccctatgaccgatccatttgggagcactagtgatgcagtgattgaaaaggctgatgtggccgtcgagagcctgatcccagggctggaaccacccgtgccacagcggctccccagccaaaccgagagcgtgacatccaatagaacagatagtttgaccggagaagactcactgttggactgcagcctgctgtcgaatccaaccactgacctgttggaagaattcgcgcccactgcaataagcgcgccggtccacaaggctgctgaagattccaacctcatcagtgggttcgacgtgcctgaaggtagcgataaagtcgccgaagacgagttcgatccaatacccgtgctgattaccaaaaacccacaaggtggacactctaggaatagcagcgggtccagtgagtcttccctgccaaaccttgcgaggtctttacttcttgtcgatcagctcatcgatctttag

SEQ ID NO: 183136 - DNA, 2592 bp, Artificial Sequence
  derived and/or modified sequence
atgaagaagttctttgacagccggcgggagcagggcggcagcggcctgggcagcggcagcagcggcggcggcggcagcaccagcggcctgggcagcggctacatcggccgggtgtttggaattggccggcagcaggtgacagtggatgaggtgctggccgagggcggctttgccatcgtgttcctggtgaggaccagcaatggcatgaagtgtgccctgaagaggatgtttgtgaacaatgaacatgacctgcaggtgtgcaagcgggagatccagatcatgagggacctgagcggccacaagaacatcgtgggctacatcgacagcagcatcaacaacgtgtcctctggagatgtgtgggaggtgctgatcctgatggacttctgccggggcggccaggtggtgaacctgatgaaccagaggctgcagacaggcttcacagaaaatgaggtgctgcagatcttctgtgacacctgtgaggccgtggcccggctgcaccagtgcaagacccccatcatccaccgggacctgaaggtggagaacatcctgctgcatgaccggggccactacgtgctgtgtgactttggaagtgccaccaacaagttccagaacccccagacagaaggagtgaatgctgtggaggatgagatcaagaagtacaccaccctgagctaccgggcccctgagatggtgaacctgtacagcggcaagatcatcaccaccaaggctgacatctgggccctgggctgcctgctgtacaagctgtgctacttcaccctgccctttggagagagccaggtggccatctgtgatggcaacttcaccatcccagacaacagccgctacagccaggacatgcactgcctgatccgctacatgctggagccagaccctgacaagaggccagacatctaccaggtgtcctacttctccttcaagctgctgaagaaggagtgccccatccccaacgtgcagaacagccccatcccagccaagctgcctgagcctgtgaaggccagcgaggccgccgccaagaagacccagcccaaggcccggctgacagaccccatccccaccacagagaccagcatcgccccccggcagaggcccaaggccggccagacccagcccaaccctggcatcctgcccatccagcctgccctgacccccaggaagagggccaccgtgcagcccccaccccaggccgccggcagcagcaaccagcccggcctgctggcctctgtgccccagcccaagccccaggccccacccagccagcccctgccccagacccaggccaagcagccccaggccccacccaccccccagcagacccccagcacccaggcccagggcctgcctgcccaggcccaggccaccccccagcaccagcagcagctgttcctgaagcagcagcagcagcagcagcagcccccaccagcccagcagcagcctgctggcaccttctaccagcagcagcaggcccagacccagcagttccaggccgtgcacccagccacccagaagccagccatcgcccagtttcctgtggtgtcccagggcggcagccagcagcagctgatgcagaacttctaccagcagcagcagcagcagcagcagcagcagcagcagcagcagctggccacagccctgcaccagcagcagctgatgacccagcaggccgccctgcagcagaagcccaccatggctgctggccagcagccccagccccagcctgctgctgccccccagcctgccccagcccaggagcccgccatccaggcccctgtgcggcagcagcccaaggtgcagaccaccccacctcctgctgtgcagggccagaaggtgggcagcctgaccccacccagcagccccaagacccagagagctggccaccggcgcatcctgagtgatgtgacccacagcgctgtgtttggagtgcctgccagcaagagcacccagctgctgcaggccgctgctgctgaggccagcctgaacaagagcaagagcgccaccaccacccccagcggcagccccaggaccagccagcagaatgtgtacaaccccagcgagggcagcacctggaacccctttgatgatgacaacttcagcaagctgacagctgaggagctgctgaacaaggactttgccaagctgggggagggcaagcaccctgagaagctgggcggcagcgctgagagcctcatccctggcttccagagcacccagggagatgcctttgccaccaccagcttctctgctggaacagctgagaagaggaaaggaggccagacagtggacagcggcctgcccctgctgtctgtgtctgaccccttcatccccctgcaggtgcctgatgcccctgagaagctgattgagggcctgaagagcccagacaccagcctgctgctgcctgacctgctgcccatgacagaccccttcggcagcaccagtgatgctgtgattggcaaggtgatcatctctgtgtcctctgtgatgcatgacatgtgtgcctgcttcaagaatgacaagtacctggtgaaccagagcctgggcaacagccctgccaccccagaggccaaggccatctag

SEQ ID NO: 183137 - DNA, 2886 bp, Artificial Sequence
  derived and/or modified sequence
atgaagaagttctttgacagccggcgggagcagggcggcagcggcctgggcagcggcagcagcggcggcggcggcagcaccagcggcctgggcagcggctacatcggccgggtgtttggaattggccggcagcaggtgacagtggatgaggtgctggccgagggcggctttgccatcgtgttcctggtgaggaccagcaatggcatgaagtgtgccctgaagaggatgtttgtgaacaatgaacatgacctgcaggtgtgcaagcgggagatccagatcatgagggacctgagcggccacaagaacatcgtgggctacatcgacagcagcatcaacaacgtgtcctctggagatgtgtgggaggtgctgatcctgatggacttctgccggggcggccaggtggtgaacctgatgaaccagaggctgcagacaggcttcacagaaaatgaggtgctgcagatcttctgtgacacctgtgaggccgtggcccggctgcaccagtgcaagacccccatcatccaccgggacctgaaggtggagaacatcctgctgcatgaccggggccactacgtgctgtgtgactttggaagtgccaccaacaagttccagaacccccagacagaaggagtgaatgctgtggaggatgagatcaagaagtacaccaccctgagctaccgggcccctgagatggtgaacctgtacagcggcaagatcatcaccaccaaggctgacatctgggccctgggctgcctgctgtacaagctgtgctacttcaccctgccctttggagagagccaggtggccatctgtgatggcaacttcaccatcccagacaacagccgctacagccaggacatgcactgcctgatccgctacatgctggagccagaccctgacaagaggccagacatctaccaggtgtcctacttctccttcaagctgctgaagaaggagtgccccatccccaacgtgcagaacagccccatcccagccaagctgcctgagcctgtgaaggccagcgaggccgccgccaagaagacccagcccaaggcccggctgacagaccccatccccaccacagagaccagcatcgccccccggcagaggcccaaggccggccagacccagcccaaccctggcatcctgcccatccagcctgccctgacccccaggaagagggccaccgtgcagcccccaccccaggccgccggcagcagcaaccagcccggcctgctggcctctgtgccccagcccaagccccaggccccacccagccagcccctgccccagacccaggccaagcagccccaggccccacccaccccccagcagacccccagcacccaggcccagggcctgcctgcccaggcccaggccaccccccagcaccagcagcagctgttcctgaagcagcagcagcagcagcagcagcccccaccagcccagcagcagcctgctggcaccttctaccagcagcagcaggcccagacccagcagttccaggccgtgcacccagccacccagaagccagccatcgcccagtttcctgtggtgtcccagggcggcagccagcagcagctgatgcagaacttctaccagcagcagcagcagcagcagcagcagcagcagcagcagcagctggccacagccctgcaccagcagcagctgatgacccagcaggccgccctgcagcagaagcccaccatggctgctggccagcagccccagccccagcctgctgctgccccccagcctgccccagcccaggagcccgccatccaggcccctgtgcggcagcagcccaaggtgcagaccaccccacctcctgctgtgcagggccagaaggtgggcagcctgaccccacccagcagccccaagacccagagagctggccaccggcgcatcctgagtgatgtgacccacagcgctgtgtttggagtgcctgccagcaagagcacccagctgctgcaggccgctgctgctgaggccagcctgaacaagagcaagagcgccaccaccacccccagcggcagccccaggaccagccagcagaatgtgtacaaccccagcgagggcagcacctggaacccctttgatgatgacaacttcagcaagctgacagctgaggagctgctgaacaaggactttgccaagctgggggagggcaagcaccctgagaagctgggcggcagcgctgagagcctcatccctggcttccagagcacccagggagatgcctttgccaccaccagcttctctgctggaacagctgagaagaggaaaggaggccagacagtggacagcggcctgcccctgctgtctgtgtctgaccccttcatccccctgcaggtgcctgatgcccctgagaagctgattgagggcctgaagagcccagacaccagcctgctgctgcctgacctgctgcccatgacagaccccttcggcagcaccagtgatgctgtgattgagaaggcagatgtggccgtggagagcctcatccctggcctggagccccctgtgccccagaggctgcccagccagacagagagcgtgaccagcaacagaacagacagcctgaccggggaggacagcctgctggactgcagcctgctgagcaaccccaccacagacctgctggaggagtttgcccccacagccatcagcgcccctgtgcacaaggctgctgaggacagcaacctgatcagcggctttgatgtgcctgagggcagtgacaaggtggctgaagatgaatttgaccccatccctgtgctgatcaccaagaacccccagggcggccacagcaggaacagcagcggcagcagcgagagcagcctgcccaacctggcccggagcctgctgctggtggaccagctgattgacctgtag

SEQ ID NO: 183138 - DNA, 2592 bp, Artificial Sequence
  derived and/or modified sequence
atgaagaagttcttcgacagccggcgggagcagggcggcagcggcctgggatcgggcagctctggcggtggaggatctacatcgggacttgggtccggctacattggaagggtttttggaattggcaggcagcaggtgacggtggatgaagtgctagcagaaggaggcttcgccatagtgttcctcgtgcggaccagcaatggtatgaagtgcgcgctcaagcggatgtttgtcaacaacgagcatgacctgcaggtgtgtaagcgcgagatacagattatgcgagacctctctggacacaaaaacatcgtgggctatatcgatagctcaatcaataatgtctcatccggggacgtctgggaggttctcatactgatggacttctgcagaggcggccaggtggtaaatttaatgaaccaaagactccagaccgggtttaccgaaaacgaggtcctgcagatattctgtgatacttgtgaggcagtcgccaggctgcaccagtgtaagaccccaattattcatagggacctcaaggtggagaacatcctcttacatgaccgaggacattatgttctttgtgactttggttccgctacgaacaaattccaaaaccctcagactgagggagtgaatgccgtcgaggacgaaattaaaaaatacaccactctctcctatagggctcccgagatggtgaatctgtactcaggcaagatcatcacaactaaagcggatatttgggctttaggttgcttattgtataaactgtgttactttaccctgccattcggcgagtcccaggttgccatatgtgacggcaatttcaccatccctgataattctaggtactcacaggacatgcactgcctgataagatacatgctagagcctgaccctgacaaaaggccagacatataccaggtgtcatacttttcatttaaactccttaaaaaagaatgccccattcccaatgtgcagaactcccccatccctgccaaacttccagaacctgttaaggcctcggaggccgccgcaaaaaaaacacaacctaaggctaggctgaccgatccgatccctaccacagaaacatcgattgccccacggcaaaggcctaaagctggccaaacccaacccaaccctgggatcttacccattcagcctgcactgacaccacgtaagcgggctacagtgcagcccccaccccaggcagccggtagctccaaccagccagggctcctcgccagcgtcccccaacctaagcctcaggcgccaccgtcacagcctttgcctcaaacccaagcaaaacagccccaggcaccgcccactccacaacagaccccatcgacacaggcacaaggcctgcccgctcaggcgcaggccacccctcaacatcagcagcagctgtttctgaagcagcagcaacaacagcagcagccccctccagcgcaacagcaacctgcaggcactttctaccaacagcagcaggctcagacccagcaatttcaggccgtccatcccgccacgcagaagccggccatcgcccagtttccagtggtgtcacagggcggctctcagcaacagctgatgcagaatttttatcaacaacaacagcagcaacagcagcaacagcaacaacagcaactcgccactgcgctgcaccagcagcagctcatgacccaacaggctgcgttacagcagaagccaacaatggctgctggacagcagccacagcctcagccggctgctgcccctcagccggcgccagcacaagagcctgcaattcaggccccagtgaggcagcagccaaaggtgcaaactactccgccaccagccgtccagggtcagaaggtgggctccttgactccccccagttctcccaaaacacagagagcaggtcacagacgtatcctgtccgacgtgactcacagcgccgtattcggagtgccggcttccaagagcactcagctgctgcaggcagccgcggctgaggcctcactgaacaagtccaagtcagcaactacaaccccctccggcagtcccaggacttcacagcagaacgtgtataatccctccgagggctccacctggaatccatttgatgacgataacttcagtaagctcactgccgaagagctgctcaataaggacttcgcaaaattaggtgaagggaaacacccagagaagctcggggggtcagccgagtcccttatcccagggttccaaagtacccagggcgatgcatttgcgaccacatcctttagtgctgggactgccgaaaagagaaagggggggcagacagtagatagcggcctcccactcctgagcgttagtgatccattcataccattgcaagtcccggatgccccggaaaaactgattgaaggactgaagtcccccgatacatcccttctgctccctgatctgttgcccatgaccgatccctttggtagcacatcggatgctgtaatcggcaaggtcatcataagcgtgagctctgtgatgcatgatatgtgcgcgtgcttcaagaatgacaagtacctcgtcaatcagagcttgggaaattccccagctacacctgaggccaaagctatctag

SEQ ID NO: 183139 - DNA, 2886 bp, Artificial Sequence
  derived and/or modified sequence
atgaagaagttcttcgacagccggcgggagcagggcggcagcggcctgggctccggctcgtctgggggagggggcagcacctctggcttagggagtgggtacatcgggagggtcttcggaatcggcaggcaacaggttactgttgatgaagtgctggccgaggggggctttgccatcgtctttctggttcgtacgtcaaatggaatgaagtgtgccctaaagaggatgttcgtgaacaatgagcacgacttacaggtgtgcaaaagagaaattcagatcatgcgggatctgtcgggccataagaatattgtcggctatattgatagcagtataaacaatgtgtcatcaggcgacgtctgggaggtactgattctcatggacttttgtaggggagggcaggttgtaaacctgatgaaccagcgcctgcaaacaggattcacggaaaacgaggtcctgcagattttctgcgacacttgtgaagccgtggccagactgcatcagtgcaagaccccgataattcatcgcgatctcaaagtagagaacatcctgcttcatgaccgggggcattacgtgttgtgtgactttggatccgcaactaacaaattccagaacccgcagaccgagggggtaaatgcagtggaagacgaaattaagaagtacacgacactgagttacagagcaccagaaatggtaaacctttacagcggcaaaatcattaccactaaggcagatatttgggcactcggatgtctcctgtacaaattgtgttacttcacgctgcctttcggcgaaagtcaggtagccatctgtgatgggaacttcacaatacccgataactctcgttattctcaggacatgcattgtctgatccgctacatgctcgaaccggaccctgataaaagaccagacatctaccaagtttcgtacttctcctttaagcttctcaagaaagagtgcccgattcctaacgttcaaaactccccaataccagccaagctgcccgagccggtcaaggccagcgaagcggccgccaagaagactcagccgaaggcaaggctcacagaccctatccccactaccgaaacttccattgcccctaggcaaagaccaaaagccggacagacacagcctaatcctgggatccttcccatccagccggccctcacaccccgtaagcgagccaccgtgcagcccccaccccaagcagccggctcctcgaaccagcctggcctcttggcttcggtgcctcagcccaagcctcaggccccgccaagtcagcccttgccacagacacaggccaaacagccccaggctccccccaccccccagcagactcctagtacccaagctcaggggctacctgcacaggcccaggctacaccccaacaccaacagcagctgttcctgaagcagcaacagcaacaacaacagcctcctccagcgcaacaacagcccgccggcaccttctatcagcaacagcaggcccagactcaacagttccaggccgtccatccagccacccagaagcccgctatcgctcagttccccgttgtgtcccagggagggtcccagcaacagctgatgcagaacttttaccaacagcagcagcagcagcagcaacagcagcagcagcagcaactggccaccgcgctgcatcagcaacaattaatgacacaacaggccgccttgcagcaaaaaccgaccatggctgctggccagcagccacaaccacagccagctgccgccccccagcctgccccagcacaggagcccgccatccaggcacccgtgcggcaacagcctaaggtccaaacgaccccacctccagccgttcaaggacagaaagtcggctcacttacaccaccaagctcccccaagacccagcgggccgggcacagacgcattctcagtgatgtcactcactccgccgtttttggcgttcccgcgtccaaaagcacacaactgttacaggctgcagcggccgaggccagtctaaacaaaagtaagtccgcaaccaccacaccgtcagggtctcccagaacaagtcagcaaaatgtttacaatccctcagaaggctctacctggaacccgtttgatgatgacaacttcagcaagttgaccgccgaggaactgcttaacaaggacttcgctaaattgggcgagggcaaacatcccgaaaagctcggaggtagtgcagagtctctgatacctggttttcagtctactcaaggcgatgccttcgccactacaagcttctctgccggaactgcggaaaagaggaagggcgggcagacagtcgatagcggcttgccgctgctttctgtcagtgacccctttattccgctgcaagtgcctgatgcccccgaaaagcttatcgaaggtctgaagtccccagacacctcccttctattgccggacctgctcccaatgactgaccctttcggcagcacttctgacgcagtgatcgagaaggcggatgtcgccgtcgaatcgctcatccctggcctcgaaccccctgtacctcaaagactcccgtctcaaacggagagcgtgacttccaatcgtaccgatagcttaacaggagaagattcgcttttggattgtagcctcctgtctaacccaaccacagacctcttggaagaattcgcacccactgctatttccgcccccgttcataaagccgccgaagatagcaacctcattagcgggtttgacgtgccagaaggctccgataaggtagctgaggacgagtttgaccctattccagtgcttattacgaaaaacccgcaaggcggccattctagaaacagtagtggaagttcggaaagttcattacctaatctggcgcggagtctgctgctcgtagaccagcttatcgacttgtag

SEQ ID NO: 183140 - DNA, 4499 bp, Artificial Sequence
  derived and/or modified sequence
gatcagctggcgggcgggcgggagccgagcgcggccccggctctcgctgcagcgccgcctcttctctgcgtcgcaggccggcccggcggccgtgacaatgtcgcggggctggtagcagggcgccggccgccgagccgtctcaagtttaaacttacacgaatcgctttctggaggaggaggggacccgctgcgcgattgacacgcatattcctataggcatcctccctcagcccccacccccacggccggattcgggtggctcctctccgaggtgaaatctgagaagaaatccttggatctcttttcttaaaaaaaaaaaaaaaaaaaaaaaatctagaaaccatcggtattttgctttgctgctccctattcgcaagatgaagaagtttttcgactcccggcgagagcagggcggctctggcctgggctccggctccagcggaggagggggcagcacctcgggcctgggcagtggctacatcggaagagtcttcggcatcgggcgacagcaggtcacagtggacgaggtgttggcggaaggtggatttgctattgtatttctggtgaggacaagcaatgggatgaaatgtgccttgaaacgcatgtttgtcaacaatgagcatgatctccaggtgtgcaagagagaaatccagataatgagggatctttcagggcacaagaatattgtgggttacattgattctagtatcaacaacgtgagtagcggtgatgtatgggaagtgctcattctgatggacttttgtagaggtggccaggtggtaaacctgatgaaccagcgcctgcaaacaggctttacagagaatgaagtgctccagatattttgtgatacctgtgaagctgttgcccgcctgcatcagtgcaaaactcctattatccaccgggacctgaaggttgaaaacatcctcttgcatgaccgaggccactatgtcctgtgtgactttggaagcgccaccaacaaattccagaatccacaaactgagggagtcaatgcagtagaagatgagattaagaaatacacaacgctgtcctatcgagcaccagaaatggtcaacctgtacagtggcaaaatcatcactacgaaggcagacatttgggctcttggatgtttgttgtataaattatgctacttcactttgccatttggggaaagtcaggtggcaatttgtgatggaaacttcacaattcctgataattctcgatattctcaagacatgcactgcctaattaggtatatgttggaaccagaccctgacaaaaggccggatatttaccaggtgtcctacttctcatttaagctactcaagaaagagtgcccaattccaaatgtacagaactctcccattcctgcaaagcttcctgaaccagtgaaagccagtgaggcagctgcaaaaaagacccagccaaaggccagactgacagatcccattcccaccacagagacttcaattgcaccccgccagaggcctaaagctgggcagactcagccgaacccaggaatccttcccatccagccagcgctgacaccccggaagagggccactgttcagcccccacctcaggctgcaggatccagcaatcagcctggccttttagccagtgttccccaaccaaaaccccaagccccacccagccagcctctgccgcaaactcaggccaagcagccacaggctcctcccactccacagcagacgccttctactcaggcccagggtctgcccgctcaggcccaggccacaccccagcaccagcagcaactcttcctcaagcagcaacagcagcagcaacagccaccgccagcacagcagcagccggcaggcacgttttaccagcagcagcaggcccagactcagcagtttcaggcagtacatccagcaacccagaaaccagcaattgctcagttccctgtggtgtcccaaggaggctctcaacagcagctaatgcagaatttctaccagcagcagcagcagcagcaacaacaacagcaacagcaacagctggccacagccctgcatcaacaacagctgatgactcagcaggctgccttgcagcaaaagcccactatggcagcaggacagcagccccagccacagccagctgcagccccacagccagcccctgcccaggagccagcgattcaagccccagtaagacaacagccaaaggttcagacaaccccacctcctgccgtccaggggcagaaagttggatctctcactccaccctcatcccccaaaacccaacgtgctgggcacaggcgtattctcagtgacgtaacccacagtgcagtctttggggtccctgccagcaaatcaacccagctgctccaggcagctgcagctgaggccagtctcaataagtccaagtctgcaaccaccactccatcaggctctcctcggacctctcaacaaaacgtttataatccttcagaagggtctacgtggaatccctttgatgacgataatttctccaaactcacagctgaagaactgctaaacaaggactttgccaagcttggggaaggcaaacatcccgagaagcttggaggctcagctgagagtttgatcccaggctttcaatcaacccaaggtgatgcttttgctacgacctcattttctgctggaactgctgaaaaaaggaagggtgggcagactgtggactctggcctcccgcttctaagcgtgtctgatcctttcattcctcttcaagtacctgatgcaccagaaaaactaattgagggactcaaatctcctgacacttctcttctgctccctgacctcttgcctatgacagatccttttggtagcacttctgatgctgtaattggtaaagtcatcatctctgtttcttcagtcatgcatgatatgtgtgcctgtttcaagaatgacaagtacctagttaaccaatccctggggaatagccctgccaccccagaagccaaggctatttaatctcacttgtatcactccaaatgaagtgttttccttgcttttcgggggtacaacgtctattttttgcctttcttgatatctggagatttctagagtggatctcttatgaatgaggaggaatgtggaaagtttcacatttagttagaagaactttaaaaaattggtttctaactagactacctttactgaacttaatgaaatttagcagattcttcttttttttttttttgtttgagacagagtttcactcttgttgcctaggctggagtgcaatggcaagatctcagctcactgcaacctccatctcccgggttcaagcaattctcctgcctcagcctcccgagtagctgagattacaggcatgcaccaccatgcctggctaatttttatatttttagtagagatagggtttctccatgttggtcaggctggtctcgaactcctgacctcaggtgatccacctgccttggcctcccaaagtgctgggattacaggggtgagccaccatgcccagcccagattcttctttagaaggcccatgtacatccagctgcagtgggacgagcctgggaagcataggaagaccccatccctacaaaaaaaatgttgttagttagccaggtgtgggggtgcacacctgtgctaccagctctttgggaggctgagacggaagatcactttgagccagggggtttgaggctgcagtgagccctgatcatgccactgccctccagcttaagtgacagagacccatcttaaacaaaattaaaaaatttaaaaaggtccatgtatataccaagtatcagtaactgagaaaacattttgcccactggttaagccccataaatagaatccagggcaggggcttggtctgcttcctctctcacattttcctatgttccaacagcaaggcaggcaagatttgcaaaatgtccaaggcccctgtactccaggagggtccaatcatgaggcacctaataatgcctttgggcagaaagtcctagaactcagaagtgccatgaccttgcataggggtaggcctgcagctgaggggtgtcacgtggtgcaaaaggcctcccagctacatcctgggatggggtttgagatggattaatggcctttgcatggcacagaggatgtttgcccccaggtttatcccttaataaaagtgaaattaccagaaaaaattaaggtgcctttcagcccatctcttctgacatggaagaggtttgctgagcggcttatgttctgaatttgtttatgagaactgatcattagtgagactggccacagtatttaaccttgcacatgcatgctcagtgaagcctagacattcagagcagcagaaataaagtaacttatttttctttccaccttgcctgagactggcattttagagacctgttaaaagaaagtcttcacatggctgggtgcagtggctcacacttgtaaccacaggactttgggaggccaaggtgggatagatcgcttgagctcaggagcaagacaccatctcaaaaaatgagaatt

SEQ ID NO: 183141 - DNA, 3412 bp, Artificial Sequence
  derived and/or modified sequence
gatcagctggcgggcgggcgggagccgagcgcggccccggctctcgctgcagcgccgcctcttctctgcgtcgcaggccggcccggcggccgtgacaatgtcgcggggctggtagcagggcgccggccgccgagccgtctcaagtttaaacttacacgaatcgctttctggaggaggaggggacccgctgcgcgattgacacgcatattcctataggcatcctccctcagcccccacccccacggccggattcgggtggctcctctccgaggtgaaatctgagaagaaatccttggatctcttttcttaaaaaaaaaaaaaaaaaaaaaaaatctagaaaccatcggtattttgctttgctgctccctattcgcaagatgaagaagtttttcgactcccggcgagagcagggcggctctggcctgggctccggctccagcggaggagggggcagcacctcgggcctgggcagtggctacatcggaagagtcttcggcatcgggcgacagcaggtcacagtggacgaggtgttggcggaaggtggatttgctattgtatttctggtgaggacaagcaatgggatgaaatgtgccttgaaacgcatgtttgtcaacaatgagcatgatctccaggtgtgcaagagagaaatccagataatgagggatctttcagggcacaagaatattgtgggttacattgattctagtatcaacaacgtgagtagcggtgatgtatgggaagtgctcattctgatggacttttgtagaggtggccaggtggtaaacctgatgaaccagcgcctgcaaacaggctttacagagaatgaagtgctccagatattttgtgatacctgtgaagctgttgcccgcctgcatcagtgcaaaactcctattatccaccgggacctgaaggttgaaaacatcctcttgcatgaccgaggccactatgtcctgtgtgactttggaagcgccaccaacaaattccagaatccacaaactgagggagtcaatgcagtagaagatgagattaagaaatacacaacgctgtcctatcgagcaccagaaatggtcaacctgtacagtggcaaaatcatcactacgaaggcagacatttgggctcttggatgtttgttgtataaattatgctacttcactttgccatttggggaaagtcaggtggcaatttgtgatggaaacttcacaattcctgataattctcgatattctcaagacatgcactgcctaattaggtatatgttggaaccagaccctgacaaaaggccggatatttaccaggtgtcctacttctcatttaagctactcaagaaagagtgcccaattccaaatgtacagaactctcccattcctgcaaagcttcctgaaccagtgaaagccagtgaggcagctgcaaaaaagacccagccaaaggccagactgacagatcccattcccaccacagagacttcaattgcaccccgccagaggcctaaagctgggcagactcagccgaacccaggaatccttcccatccagccagcgctgacaccccggaagagggccactgttcagcccccacctcaggctgcaggatccagcaatcagcctggccttttagccagtgttccccaaccaaaaccccaagccccacccagccagcctctgccgcaaactcaggccaagcagccacaggctcctcccactccacagcagacgccttctactcaggcccagggtctgcccgctcaggcccaggccacaccccagcaccagcagcaactcttcctcaagcagcaacagcagcagcaacagccaccgccagcacagcagcagccggcaggcacgttttaccagcagcagcaggcccagactcagcagtttcaggcagtacatccagcaacccagaaaccagcaattgctcagttccctgtggtgtcccaaggaggctctcaacagcagctaatgcagaatttctaccagcagcagcagcagcagcaacaacaacagcaacagcaacagctggccacagccctgcatcaacaacagctgatgactcagcaggctgccttgcagcaaaagcccactatggcagcaggacagcagccccagccacagccagctgcagccccacagccagcccctgcccaggagccagcgattcaagccccagtaagacaacagccaaaggttcagacaaccccacctcctgccgtccaggggcagaaagttggatctctcactccaccctcatcccccaaaacccaacgtgctgggcacaggcgtattctcagtgacgtaacccacagtgcagtctttggggtccctgccagcaaatcaacccagctgctccaggcagctgcagctgaggccagtctcaataagtccaagtctgcaaccaccactccatcaggctctcctcggacctctcaacaaaacgtttataatccttcagaagggtctacgtggaatccctttgatgacgataatttctccaaactcacagctgaagaactgctaaacaaggactttgccaagcttggggaaggcaaacatcccgagaagcttggaggctcagctgagagtttgatcccaggctttcaatcaacccaaggtgatgcttttgctacgacctcattttctgctggaactgctgaaaaaaggaagggtgggcagactgtggactctggcctcccgcttctaagcgtgtctgatcctttcattcctcttcaagtacctgatgcaccagaaaaactaattgagggactcaaatctcctgacacttctcttctgctccctgacctcttgcctatgacagatccttttggtagcacttctgatgctgtaattgaaaaagctgatgttgctgttgagagtctcataccaggactggagcccccagttccccagcgcctcccatctcagacggaatctgtgacctcgaatcgcacagattctctcaccggggaagattccctgcttgattgctctctgctctctaaccctactactgaccttctggaagagtttgcccccacagcaatctctgctccagtccataaagctgcagaagatagtaatctcatctcaggttttgatgtccctgagggctcggacaaggtggctgaagatgagtttgaccctattcctgtattgataaccaaaaacccacaaggtgggcactctagaaacagcagtgggagctctgagtccagtcttcccaacctagccaggtctttactgctggtggatcagctcatagacctgtagccgtgacccagtagcagatgcagttctgtaaccttcataccgtaaaatacattttcattacggagttatgaaaaaaatgatttttttaaaaaaatctgcaaataaggggccctccagcccttttctcctaccccttgccttctcctgta

SEQ ID NO: 183142 - DNA, 2592 bp, Artificial Sequence
  derived and/or modified sequence
atgaaaaagttctttgactctcggagagagcaaggcggttcagggctaggaagcggatcatcaggaggaggcggatctacctcaggactgggttctgggtacatcgggcgagtcttcggaataggccgtcagcaagtgacagtagatgaggtcctggccgaaggtggcttcgcgattgtgttcctggtcagaacgtcaaacgggatgaaatgcgccctgaaacgcatgtttgtcaataatgaacacgatctgcaggtgtgtaagagagagattcagataatgcgagacctttctggccataaaaatatcgtcggctacatagattcttcaattaacaatgtttcttcaggagacgtctgggaggtattaatcctcatggatttttgcagaggaggccaggtggtcaatctgatgaaccagcggctccaaaccgggtttacggagaacgaagtgctgcagatattctgtgacacctgcgaggccgtcgccagactccatcagtgcaagacacctatcatccatagggacctgaaggtggagaatattctcctccacgataggggccactacgtgctttgtgactttggcagtgccaccaataagtttcagaatccccagacggaaggagtgaatgctgtggaggacgagattaagaaatacaccactctgtcatatcgcgctccagagatggtgaacctatactctgggaagataataacaaccaaggccgatatttgggccttgggctgcctgctgtataagctgtgttatttcactctgcctttcggagaaagccaagttgcaatctgcgacggaaatttcactatccccgataattccagatattcccaggatatgcactgtctgatcagatacatgctggagccagaccctgacaaacgccctgatatctatcaggttagctattttagcttcaagttgcttaaaaaggagtgccctattccgaacgtgcagaacagccctattcctgcgaagctccccgagcctgttaaagcatcagaagcggctgcgaaaaaaacacagccaaaagcccgtctgactgaccccattccaactactgagacttcaattgcaccaaggcaaaggcctaaggccggtcaaacacagcccaatcccggaattctgcctattcagccggcattgactcctcggaagagggcgaccgtgcagccacctccgcaggccgctggatcgtcaaatcagccaggccttttggcgtctgtgcctcagcccaaacctcaggctcccccttcccagcccctccctcagacacaggccaagcaaccacaggctccaccaactccacaacagaccccttcaactcaagcccaggggctgcctgcacaggctcaggctacgcctcaacaccagcagcaactctttttgaaacagcagcagcagcagcagcagcctccacccgctcaacagcagcctgccggtaccttttaccagcagcagcaggctcagactcagcagttccaggccgttcatcctgctacacagaaacccgcaatcgcccagttcccggtggtctcccagggcggttctcagcagcaattgatgcaaaatttctaccaacagcagcagcagcagcaacagcagcagcagcagcagcaattggccacagcgctgcaccagcaacagcttatgactcagcaagcagcactgcagcaaaagcccacaatggcagccggacagcaaccccagcctcagcctgcagctgctcctcagcccgctcctgcccaagagccagctattcaagcccctgttagacaacagccaaaggtccagactacacctccgccagcagtgcagggtcagaaagtggggtctctgacaccacccagctcgcccaagacccagagagctggacaccgacgcattctcagtgatgtcacccatagtgcggtgttcggagttccagcatctaaatccacgcagttgctccaggcagccgcagccgaggcgtcattgaataaaagcaaatcagcgactaccaccccctctggttcaccgcgtacgagccagcagaacgtgtacaacccttctgagggctccacctggaatccctttgacgacgataattttagtaaactgactgcagaggaactgttgaacaaagacttcgccaaactgggtgaggggaaacaccccgaaaagcttggaggaagtgctgagagcctgatccccggatttcagagcacccagggcgacgcctttgctacaaccagtttctccgccggtacagccgagaagcggaaggggggtcaaactgtggatagcggattgcctttactctctgtatcagatcccttcattcctctccaagtccctgacgccccagagaagctgatcgagggcctcaagtctcctgacacctccctgcttttgccggacctcctgcccatgaccgatccatttggctccacttctgatgctgtgatcggaaaggtcatcataagcgtttcttccgtgatgcatgacatgtgtgcctgtttcaagaatgacaagtacctggtcaaccagtctttgggaaattcaccagcgacacctgaggctaaagcgatttag

SEQ ID NO: 183143 - DNA, 2886 bp, Artificial Sequence
  derived and/or modified sequence
atgaagaagtttttcgatagtaggcgagaacagggcggatctgggcttggcagtggttcctcgggcggaggaggaagcaccagcggccttggctcaggctatattgggcgtgtcttcggaattggacgccagcaggtgacagttgacgaagtcctggcggaaggcggatttgccatcgtgttcctggtgcgcaccagcaacggcatgaagtgcgctctgaaaagaatgttcgtgaataacgagcatgaccttcaggtgtgtaaacgggaaattcaaatcatgagggacttgagtgggcacaaaaacattgtgggctacatagactcctctatcaacaacgtcagctctggagacgtatgggaggttttgatactgatggatttttgcaggggagggcaggtcgtcaatctgatgaatcagaggctccagacagggtttactgagaacgaggttcttcaaatcttttgtgatacttgcgaagccgttgccaggctgcatcaatgtaagacccctatcatccacagggatttgaaggtggagaacatcctgctacacgatcgaggacattacgttctgtgcgactttggcagtgctaccaacaagtttcaaaacccccagactgaaggcgttaacgcagtggaggatgagattaaaaagtataccaccctctcttaccgggctcccgaaatggtgaatttatacagcggtaaaattatcactaccaaagccgatatttgggcactcggttgtcttctatacaaactttgctactttactctgccatttggtgagtcccaggtagcaatttgtgacggcaacttcactatccccgacaattcccgctatagccaggacatgcactgtttaatccggtatatgctggagccagatcctgacaagagacccgatatttaccaggtgagctacttttcattcaaactgctcaagaaggagtgcccaatccccaatgttcagaactcccctatccctgctaaacttcccgaacctgtcaaagcttctgaagccgctgctaagaaaactcaacctaaggctaggttgaccgatccaatcccaactactgaaacctcaattgctcccagacaacggccaaaagccggtcaaacccagcctaacccgggaatacttcctattcagccagcacttactcccaggaaacgagccacagtgcagcctccgccacaggcagcagggtcatctaatcagccaggattgctagcctccgtgccccagcctaagccccaggcaccacctagtcagcctctcccccagactcaggccaagcagccgcaggctcccccaactccccagcagacaccctccacccaagcccagggcctgcccgcacaagcacaagcgaccccccaacatcaacagcagctgttccttaagcaacaacagcagcagcaacagcccccaccggcacagcagcagccggctggcactttctatcagcagcagcaggcgcaaacccaacagtttcaggctgtgcatcctgccacacagaaacccgcaattgcccaattccccgttgtgagccagggcggatcacaacagcagctgatgcaaaatttctatcagcaacagcagcagcaacaacagcagcagcagcagcagcagctggctactgctcttcaccagcagcagttaatgacccaacaagccgctctccagcagaaaccgacgatggcagccggacagcagcctcagccccagcctgcggcagcacctcaaccggcaccagcccaggaaccagctatccaggctcccgtccgccagcagcccaaggtgcaaacaactcctccaccagccgtacaaggccaaaaggtaggcagtctgacgcctccctcttcacctaagacccagcgggctggccaccggagaatcctctccgatgtgacgcatagcgcggtgttcggagtccctgccagtaagagtactcaattgttacaggcggcagccgctgaggcctccctgaacaagagtaagagcgccaccacgacccccagtggaagccctagaacttctcagcagaacgtctacaatccgtccgaggggagcacgtggaaccctttcgacgacgacaacttttctaagctcaccgcagaggaattactgaacaaagactttgccaaactgggcgaaggcaagcaccccgagaagctggggggaagcgccgaatctctgatacccggttttcaaagtactcagggggacgccttcgcgaccacaagcttcagtgcaggaaccgctgagaagcgaaaaggcggtcagaccgtagactcaggactcccactgctgtcagtgagtgatccctttatacccttgcaggtgcctgatgcaccggagaagctaattgaaggattgaagtccccagacacaagcctgctactacctgacttgctgccaatgacggatccatttggaagcacatccgatgccgtcattgaaaaggcagatgtcgccgtggagtcactgattccagggttagaacctcccgtaccccaacgcctcccaagccagacagagtctgttacgagcaataggactgattcattaacgggcgaagacagccttctcgattgctcacttctgagcaaccccaccactgacctgctagaggagttcgcccctaccgccatatcagctccagtgcacaaagcagccgaagactctaaccttatcagcggctttgacgtgcctgaagggagtgataaagtggccgaggatgaattcgatcctattcccgtgctaataacaaaaaatccccaaggtggccattcacgcaatagtagcgggtcatccgaatcttcccttccgaacctagcaaggagcctgcttctggtcgatcaactaatcgatctatag

SEQ ID NO: 183144 - DNA, 618 bp, Artificial Sequence
  derived and/or modified sequence
atgaacagctggccctggctgtttgacagcaacttctgcagcgctgtggagatcatcctggagcctgagaagaagatccccaacagcaccctgcacttctgtgaggagctggtgcccaacagcggcagcctgtttgggaagaacatctgctgcggcaagcagtgctgcatctgtgacctgaagagcctgctggagctggacagagatggagagttccagcctgagcggcccaagaacagctgcccagccctgctgaatgccatcagcaggaggaccagcatcttccccccacccaccagcctgctgctgcctgtgaccctggccagcagccagtgctgctgggccaccagcggcagcgctgggggccggggcatcgcccccaccccaggcggccagccctgtggcagcagcaggaagagcggcagcagctgtgcctggcgctggagccccagcggcggcagcccctggccctgcagcagagctggaggagcctggaggcggctgggcaccagcctggacacccaccctgctggcagccgggcctgcagagctgtgcaccagctggccggggagagccccaccccccggcaggcccggcggccccccttccccacctag

SEQ ID NO: 183145 - protein, 698 aa, Artificial Sequence
  derived and/or modified sequence
MQDDLLMDKSKTQPQPQQQQRQQQQPQPESSVSEAPSTPLSSETPKPEENSAVPALSPAAAPPAPNGPDKMQMESPLLPGLSFHQPPQQPPPPQEPAAPGASLSPSFGSTWSTGTTNAVEDSFFQGITPVNGTMLFQNFPHHVNPVFGGTFSPQIGLAQTQHHQQPPPPAPAPQPAQPAQPPQAQPPQQRRSPASPSQAPYAQRSAAAAYGHQPIMTSKPSSSSAVAAAAAAAAASSASSSWNTHQSVNAAWSAPSNPWGGLQAGRDPRRAVGVGVGVGVGVPSPLNPISPLKKPFSSNVIAPPKFPRAAPLTSKSWMEDNAFRTDNGNNLLPFQDRSRPYDTFNLHSLENSLMDMIRTDHEPLKGKHYPPSGPPMSFADIMWRNHFAGRMGINFHHPGTDNIMALNNAFLDDSHGDQALSSGLSSPTRCQNGERVERYSRKVFVGGLPPDIDEDEITASFRRFGPLVVDWPHKAESKSYFPPKGYAFLLFQEESSVQALIDACLEEDGKLYLCVSSPTIKDKPVQIRPWNLSDSDFVMDGSQPLDPRKTIFVGGVPRPLRAVELAMIMDRLYGGVCYAGIDTDPELKYPKGAGRVAFSNQQSYIAAISARFVQLQHNDIDKRVEVKPYVLDDQMCDECQGTRCGGKFAPFFCANVTCLQYYCEYCWASIHSRAGREFHKPLVKEGGDRPRHVPFRWS

SEQ ID NO: 183146 - DNA, 2097 bp, Artificial Sequence
  derived and/or modified sequence
atgcaggatgacctgctgatggacaaaagcaagacccaaccccagccccagcagcaacagcgccagcagcaacaaccccagccagaatcaagcgtcagtgaagctccctccacccccttgtcctcagagactccgaagccagaggagaattctgccgtacctgctctttctccagccgccgccccgcccgcgcctaacgggccagacaagatgcaaatggaatcccctctcttgccaggcctctcattccaccagccaccccaacagcctcctcctccgcaggagcctgcagccccaggcgcctctctctccccttctttcggaagtacatggtccacgggaaccacaaacgccgtcgaggactctttttttcagggcattacccccgtgaacggtaccatgctgttccagaactttccacatcacgtcaaccctgtttttggggggaccttttctccccagatcggcctggcccagactcagcaccatcagcagccacccccaccagcccccgcgcctcagccagctcagccagcccagccaccccaggcacaaccgccccagcaaaggaggtcccctgcttcacccagccaggctccatatgcccaaaggtccgctgctgcggcctatggccaccaacccattatgactagtaaaccgtcaagttcgtcagcagtcgccgctgcagccgccgcagccgctgccagctctgcatcgtcatcctggaacactcaccaatcagtgaacgcagcttggtcagcccctagtaacccttggggcggactgcaagcaggaagagaccccaggagggctgtgggcgtgggagtgggtgtgggagtcggagtgccttcccctctgaatccgatctcacctcttaagaagcccttcagctcgaacgtcatcgctcctccgaagtttccacgggcagcccctttaacatcaaaatcctggatggaggacaatgccttcagaacagataacgggaataacttactcccatttcaggaccggtctcgaccgtacgatacctttaatctccacagcctggaaaactctctcatggacatgatccggacagaccacgagcccttaaaaggtaaacactaccccccatccggccccccaatgtcctttgcagatattatgtggcgtaatcatttcgccggtcgcatgggaattaattttcatcaccccggcacggacaacataatggccctcaacaatgcgttccttgatgactcccacggcgatcaggccctgagctccggtcttagctccccaaccaggtgccagaatggggagagagtcgaacgatatagccggaaggtgtttgtcggggggctcccccctgacatcgatgaagacgaaataaccgcttccttccgccgctttggccccttagtagtggattggcctcacaaggccgagagtaaaagttattttcctcccaagggatacgcatttctcctgtttcaagaggagtcatcggtgcaggcactgatcgatgcatgccttgaagaagacggaaaactgtatctgtgcgtaagctctcccacaatcaaggacaagcccgtgcaaatacgaccctggaacctgtccgacagtgactttgtaatggacgggtctcaaccattagatccccggaaaactatctttgtcggcggggtgccacgcccgcttagagctgtcgagttagcgatgatcatggaccggttatacgggggcgtgtgttacgccggcattgacactgatcctgagctgaagtacccgaagggggccggacgtgttgccttttccaaccagcagagctatattgcagccatctccgcaaggtttgtccaattgcagcataacgatattgacaaaagagttgaagtaaagccatacgtgttggacgatcaaatgtgcgacgagtgtcagggaacgaggtgcgggggtaaattcgctccgtttttctgcgcaaacgtgacgtgtctgcaatattactgcgaatactgttgggccagcatccacagtagggccgggagggagttccataagccgctggttaaggaaggaggtgaccgcccccgccacgttccatttcggtggtcctag

SEQ ID NO: 183147 - DNA, 2097 bp, Artificial Sequence
  derived and/or modified sequence
atgcaggatgacctgctgatggacaagagcaagacccagccccagccccagcagcagcagaggcagcagcagcagccccagcctgagagctctgtgtctgaggcccccagcacccccctgagcagcgagacccccaagccagaagaaaattctgctgtgcctgccctgagccctgctgctgcccccccagcccccaacggccctgacaagatgcagatggagagccccctgctgcccggcctgtccttccaccagcccccccagcagcccccaccaccccaggagcctgctgcccctggggccagcctgagccccagctttggcagcacctggagcacaggcaccaccaatgctgtggaggacagcttcttccagggcatcacccctgtgaatggcaccatgctgttccagaacttcccccaccacgtgaaccctgtgtttggaggcaccttcagcccccagatcggcctggcccagacccagcaccaccagcagcccccacctccagccccagccccccagcctgcccagcctgcccagcccccccaggcccagcccccccagcagaggaggagccctgccagccccagccaggccccctatgcccagaggtctgctgctgctgcctacggccaccagcccatcatgaccagcaagcccagcagcagcagcgctgtggccgctgctgctgctgctgctgctgccagcagcgccagcagctcctggaacacccaccagagcgtgaatgctgcctggagcgcccccagcaacccctggggcggcctgcaggccggccgggaccccaggagagctgtgggcgtgggcgtgggcgtgggcgtgggcgtgcccagccccctgaaccccatcagccccctgaagaagcccttcagcagcaatgtgattgccccacccaagttccccagggctgcccccctgaccagcaagtcctggatggaggacaatgccttcagaacagacaatggaaacaacctgctgcccttccaggacaggagccggccctatgacaccttcaacctgcacagcctggagaacagcctgatggacatgatcagaacagaccacgagcccctgaagggcaagcactacccacccagcggcccccccatgagctttgctgacatcatgtggaggaaccactttgctggccgcatgggcatcaacttccaccaccctggaacagacaacatcatggccctgaacaatgccttcctggatgacagccatggagaccaggccctgagcagcggcctgagcagccccacccgctgccagaatggagagcgggtggagcgctacagcaggaaggtgtttgtgggcggcctgcccccagacattgatgaagatgagatcacagccagcttccgccgcttcggccccctggtggtggactggccccacaaggccgagagcaagagctacttcccccccaagggctacgccttcctgctcttccaggaggagagctctgtgcaggccctgattgatgcctgcctggaggaggatggcaagctgtacctgtgtgtgagcagccccaccatcaaggacaagcctgtgcagatccggccctggaacctgagtgacagcgactttgtgatggatggcagccagcccctggaccccaggaagaccatctttgtgggcggcgtgccccggcccctgcgggctgtggagctggccatgatcatggaccggctgtatggaggagtgtgctacgccggcatcgacacagatcctgagctgaagtaccccaagggagctggccgggtggccttcagcaaccagcagagctacatcgccgccatcagcgccaggtttgtgcagctgcagcacaatgacatcgacaagagggtggaggtgaagccctacgtgctggatgaccagatgtgtgatgagtgccagggcacccgctgtggcggcaagtttgcccccttcttctgtgccaacgtgacctgcctgcagtactactgtgagtactgctgggccagcatccacagccgggccggccgggagttccacaagcccctggtgaaggagggcggggaccggcccaggcatgtgcccttccgctggagctag

SEQ ID NO: 183148 - DNA, 2097 bp, Artificial Sequence
  derived and/or modified sequence
atgcaggacgacctgctgatggacaagagcaagacccagccccagcctcagcaacagcagaggcaacagcaacagccccagccagaaagttcagtcagcgaggctccttctactccactctcttccgagactccaaaacctgaggaaaactcagccgtcccggccttaagcccagcagctgcccccccggcccccaatggccccgacaagatgcagatggagagccctctcttgcccggccttagctttcatcagccaccacaacagccacctcctccacaggaacccgcggcccccggtgcatccctaagtccaagcttcggcagcacatggtccaccggtactacgaacgccgtagaagactcattcttccagggaatcacacccgtcaacggcaccatgctgttccaaaactttcctcatcatgttaatcctgtgttcgggggcaccttttcgcctcagataggtttggcgcagacccagcatcaccaacagcccccacctccagctccagctcctcagcccgcccagccagcccaacctcctcaagctcaacctccgcagcagagacgttctccagcgtctccctcacaagccccttacgcacaacgttctgcagctgcagcatatggtcaccaacctattatgacatccaagccatcatcaagctctgccgtggctgcagccgctgctgctgccgccgcctctagcgccagcagtagttggaatacccaccagtccgtgaacgcagcttggagcgctcccagtaacccttggggggggctgcaagcaggccgcgatcctcggagagctgtaggtgttggagtaggggtgggtgtcggtgtaccttcacccctgaatccgatatctcctttgaagaaaccgtttagctccaacgtcatcgcaccgccaaagtttcctcgagccgcccccctcactagcaagtcatggatggaagataacgcatttagaaccgataacgggaataatctcctgccatttcaggaccgctcacgaccgtatgacaccttcaatctgcacagtttggagaatagcctcatggacatgattcggaccgaccacgagcccctgaaagggaagcactatcctccaagtggtccacctatgtcttttgctgacattatgtggaggaaccactttgccggccgaatgggcatcaattttcaccatccagggacagacaacatcatggccttgaataatgccttcctggatgactcgcacggagaccaggcactctccagcggcttatcctctccaaccaggtgtcagaacggtgaaagggtggagcgctatagtaggaaggtcttcgtgggcggcctgcctcccgacatagatgaagacgaaattaccgctagtttccgccggtttggcccactggtggtggactggccacacaaggccgaaagtaagtcatattttcctcctaagggctatgcattcctcttatttcaggaggaatcttccgtgcaagccctcatagacgcttgtctggaggaggatggcaagctttacctgtgcgttagttcacctacaatcaaggacaaacccgttcagataagaccatggaacttgagtgactctgacttcgtgatggatgggtcccagccactggatcctcgaaagactatttttgttgggggggtgccgcggcctctgagggccgtagaactcgctatgatcatggaccgcctgtacggtggcgtatgttacgcagggattgacaccgacccggaactcaaataccctaagggagctgggcgcgtcgctttttcaaaccagcagtcatacatcgctgcaattagtgctcgatttgtccagctgcagcacaacgatatagataagagagtggaggtcaaaccctatgtgctcgatgatcagatgtgcgatgaatgccagggcactcgctgtggagggaagttcgccccctttttttgcgccaacgtcacatgcttgcagtattattgtgagtattgttgggcgagtatccactcacgcgccggtagagagttccataaacccctcgtcaaagaaggaggggaccgacccaggcacgtgccctttcgctggagttag

SEQ ID NO: 183149 - DNA, 2097 bp, Artificial Sequence
  derived and/or modified sequence
atgcaggacgatctactgatggacaaaagcaagactcaaccacaaccacagcagcagcaaagacaacaacagcagccacagcccgaatcctcagtgagtgaggccccttccactccgctgtcctcagaaacccccaaacccgaggaaaacagtgctgttccagcgcttagtcccgcagctgcacccccagcgccaaatggaccggacaagatgcaaatggaatccccattgctcccaggcctcagctttcaccagcctccgcagcaacctcccccacctcaggagcctgccgctccaggagcctctttgagcccctcctttggatctacttggagcactgggaccaccaacgccgtcgaagattctttcttccagggaatcacccctgtgaacgggacgatgttgtttcagaactttcctcatcacgtgaaccctgtcttcggcggaactttctctccccagattggcctcgcccagacacagcaccaccagcaaccgcctccaccagccccagcccctcagcccgctcagcctgcccagccaccccaggctcagccgccacagcagcgcagaagtcctgctagtccaagccaggccccatacgcacaacgatcagctgcagcagcttacggccatcagccgattatgaccagtaagccgtccagttcttcagcagttgccgcagcggcagcagcagcggctgcctcatctgctagcagtagctggaacactcatcagtctgtaaatgccgcatggagcgcgccatctaatccttggggtgggctgcaagccggacgggacccgaggagggccgtaggggttggcgttggggtcggcgttggcgtacccagtcctcttaatccaattagtcctttaaaaaaacctttttcctcaaatgtgattgctccccctaaatttcccagggccgctcctctgacctctaaaagttggatggaggacaatgcgttcagaaccgacaacggcaacaacctgcttcctttccaagaccgttcacgaccttatgacacatttaatctgcactcccttgaaaatagcctgatggatatgatcaggaccgatcacgagcccttgaaaggtaagcattatccaccctcagggccaccgatgagctttgcggatataatgtggcggaaccacttcgctggacgcatgggaattaatttccaccatcctggtaccgataacattatggcccttaataatgcatttctagatgattcacatggagaccaggccctgtcaagcggcctgagcagtccaacccggtgtcagaatggagaaagggtcgagagatattcacggaaggtttttgtcggaggactcccacctgatattgacgaagacgaaatcacggctagcttccgcagatttggtccgttagtggtagactggccacacaaagctgaaagcaaatcttacttccccccaaaaggctatgcctttctactgttccaggaggaatcctcagtccaggcactgattgacgcctgcctggaggaagatggcaaactgtatttgtgcgtgtcctccccaaccatcaaggacaaacccgttcagatccgcccttggaatctgagcgactcagactttgtaatggatggctcccagccgcttgaccctaggaaaacaatttttgtggggggagtcccacgtccacttcgcgctgtcgaactggcaatgattatggaccgattgtacggaggtgtttgctacgctgggatcgacaccgatccagaacttaaataccccaagggcgctggtcgtgttgctttcagcaaccagcagtcctacatagctgctattagtgcccgtttcgtgcagctgcagcacaacgatattgacaaacgtgtcgaagtaaaaccttatgtgttggacgatcagatgtgcgacgaatgtcagggcacgaggtgcggtggaaagtttgcgccttttttttgcgcaaacgtcacctgcctgcagtactactgtgagtattgttgggcttctatccactctcgggctggtagggagttccacaagcctctggtgaaggaaggcggagaccgaccaaggcacgtgcctttccgctggtcatag

SEQ ID NO: 183150 - DNA, 4851 bp, Artificial Sequence
  derived and/or modified sequence
gtctccactagaggctgcacagcccgcccggaccaacgcctccgcgcctgccgccgtctggccggcgccctcccgtttccttcctccagggggaaaaaatgtctttcgggccgctttccaggaagcagcaggatgcgccgctccactgtcggtagcaacaagctgcgcaaaccatgcaggatgatttactgatggacaaaagcaaaacccagccccagccccagcagcagcagcggcagcagcagcagccccaacctgagtccagcgtatccgaagccccgtccacgcccctctcctcagagacccccaagccggaggaaaacagcgcagtgccggccctcagcccagccgctgcccccccggcccccaacggcccggacaagatgcagatggaatcaccgctcctgccaggcttgagtttccatcagcctcctcagcagccgccgccgcctcaggagcccgcggcaccgggcgcgtcgctgtcgccgtccttcggcagcacctggtccacgggcaccaccaacgcggtagaggacagcttcttccaggggatcaccccagtcaacgggaccatgctcttccagaacttcccgcaccatgtcaacccagtcttcggaggcactttctccccgcagatcggcctggcgcagacccagcaccaccagcagccgccgccgcctgcgcccgcgccgcagccggcacagccagcgcagccaccacaggcgcagcccccgcagcagcgccgctcacccgccagccccagccaggcgccctacgcgcagaggagcgccgccgcggcgtacggccaccagcccatcatgaccagcaagccgtcctcgtcttcggcggttgcagccgctgctgccgcagccgccgcctcgtcggcctcgtccagctggaacacgcaccaaagcgtgaatgcagcctggagcgcaccgtccaacccctggggcggcctgcaggcgggccgggaccctcgccgggcggtcggtgtgggcgtgggtgtgggtgtcggggtgccttccccgctcaaccccatctcgccgctcaaaaagcccttctccagcaacgtgatcgcgccgcccaagttccctcgcgcggcccctctcacttccaagtcctggatggaggataacgctttccggaccgataatggtaacaatctgttgccatttcaggaccggagtaggccctatgatacttttaacttgcactcgttggagaactccttaatggatatgataaggactgatcatgaacctctgaaaggtaaacactaccctcccagtggcccaccaatgagtttcgctgatataatgtggaggaatcattttgcaggacgcatggggataaatttccatcatccaggaacagataatattatggcacttaacaatgccttcctggatgatagccatggtgatcaagccttgtcatctggcttaagttctcccactcgctgtcaaaatggggaacgagtagaacgctactctagaaaggtgtttgttggaggacttcctcctgatattgatgaagatgagatcactgccagctttcgcaggtttggacctctcgtagtagactggcctcacaaagctgaaagcaagtcttattttcctcctaaaggctatgcctttctgctgttccaagaggaaagctcagtacaagctttgatagatgcctgcctagaagaagatgggaaactctacctgtgtgtgtcaagccccaccatcaaggacaagccagtgcaaattcgaccatggaacctaagtgacagtgactttgtaatggatggttctcagcctttggaccccagaaaaactatctttgttgggggagttccacgaccccttcgagctgttgaactggcaatgatcatggaccgtttgtatggtggtgtctgctatgctggcattgatacggacccagagctgaagtaccccaaaggtgctggccgcgtggcattctccaatcagcagagttacattgcagccatcagcgctcgttttgtgcagcttcagcacaatgacattgacaaacgggttgaagtaaagccatatgtgctggatgatcagatgtgtgatgagtgccagggcacacgctgtggtgggaagtttgccccgttcttctgtgccaacgtcacctgtctgcagtattactgtgaatactgctgggcgagcatacattcccgagccgggcgggagttccacaaaccgctggtgaaggagggaggcgaccgccctcgtcacgtcccgttccgctggagctgagccacgggccgacccagccacaagtactggagtagataacaaggagggaaaagagagggcactgcctcagggcttacagtgttctggaaatctgtgcattcgttctcgatttttaaagaagaattgggtctttttattattattattattatttacagtcatattactgaactcagtgtccagtataatgcagaattgcagagtgtagaatggtactgatttgcactttgattcacacctttgtctgcttggtaccttaattttttatacctgatttgtcactcgtgacagtatgtagactgccattctcatcagcggccgtcaggctactgtctgtgattcttttgtttgttgttgtggtgttgttctgattgttttgaactggagcatgcacttattttcagaaacttagagagttgcccctaggacaagacttaccaaaggtaatactcgtgagtaggtggcagatgtagcaaaaacttcacaacaattcagcaatcattagctcgggtcacttagagtaaggataacccttcatgaaaataagcctttagttgctctctattttgacttgtaaggatacctcataagctggatcttttatttttccttcatgtttgatttttgttttgccgaggattttggttagatcttttagtattatgtaaatttatgctgcaatagcttttgctgctattaaaatggtattattaataccataatactctattcaggctaggatatcaattaaacacaaaaacccaacaacacacttttgtgattttagggatagagtcagctgccgaacggagatcagaatagacttcagaaagcttcggtggaaggtcactatttctgactgcatgtttacttaatcaggttgctgcatgcaataaattttatatccaatgtctagtataaaacgttcccacaatgcacaaattaagaatctatataagctataaaaatactcattttttaaaaaaagtttttttcattcaaagaattggtaattgaccggaggaaggcatgcctcaataaatggaatgctctgaatgggaagagcccataacagaatgacctatattacaaccgatataaaacctaggtgtaggatattcttcaagcaaatttgtggatggtagatgaagtactttgcggtgctctgttatatattgtgaaatttattttatatagtaaagtgattatgtctaactgtgatcaaacttaactgtttaaagcctctgtcagacattaatgaacttgacagttcataactgatatattataaactaacacatgagctcttagttacaatctcttagtgcttgcaccattttacatagcttcagaccttgtccagaaaaccaaagagctcatcttagcttacaaacactaagaatatatacaggatatagagataagttgtcagattgacaaactaggcacatttttaagaaagttgtgtaatggtgatgctaaagaaatgtctgtacaaaataagatggcctgggcagagttggttgtctgagtgagaaactaactacttaattccctggatttatcctgttaagcttgagtagaatgaaggcctgctagcactagcgtggtctagaatgaaggcctgctagcactagcgtggacatttttctagcattcacccttgggctgcagatagtaatatataaacacacacaatgattgcaagactatgtaaatctttttttaatcttcttcctatgttttggaattctggggacaatctgactggatatgacactgcagaatagatttaagtcgctgtgttttctgtgctgtgatgtccttgtactgtcttaagttagtgttgcttgtttttgttttgttctcccatgtttagttgcaattactggctctcaagctatagtttgttttcaaaaaggaaaaacaaaatagttttttactggattaaaaatgcttattttagaatcctcccctttttgaggctttttggtaataattgcttttttccagcccaggtgtggttttgtttgtttttttctatgtttgtgggttttttttcatctgtacaagaaattttgttatgcactactactttttgtattctagacagttttcaaaagttggcagatttttttttttgtttttaaggaaaaaggcatgctttctgactgacatgatcttttgcaatacctcaattttgaaatataggaaagaaaatgatattttctaagtaagtttattcagaaaaatatatattaatttaattctgcaagaaaatgatttaacagatgggtaactttatttttttcatgcttatttgtgttttttgaaaatgaagaagttagagctttataactataatattaaagatcatatctaacctacagaaatctacctaattatgtgaaagaagcaaaactttttgaagaagcacccctctttcatgtattaaaataacactgagatttttttaaaagctggaagattgtacagcataaagctaaagtgaaggcaaaaaacattgtcctgaagaataggttacaaaaaataaactccatttggtgctgaaagttgtgaa

SEQ ID NO: 183151 - DNA, 2097 bp, Artificial Sequence
  derived and/or modified sequence
atgcaggacgacctgctgatggacaagagcaagacccagccccagccccagcagcagcagagacagcagcagcagccccagcccgagagcagcgtgagcgaggcccccagcacccccctgagcagcgagacccccaagcccgaggagaacagcgccgtgcccgccctgagccccgccgccgccccccccgcccccaacggccccgacaagatgcagatggagagccccctgctgcccggcctgagcttccaccagcccccccagcagcccccccccccccaggagcccgccgcccccggcgccagcctgagccccagcttcggcagcacctggagcaccggcaccaccaacgccgtggaggacagcttcttccagggcatcacccccgtgaacggcaccatgctgttccagaacttcccccaccacgtgaaccccgtgttcggcggcaccttcagcccccagatcggcctggcccagacccagcaccaccagcagccccccccccccgcccccgccccccagcccgcccagcccgcccagcccccccaggcccagcccccccagcagagaagaagccccgccagccccagccaggccccctacgcccagagaagcgccgccgccgcctacggccaccagcccatcatgaccagcaagcccagcagcagcagcgccgtggccgccgccgccgccgccgccgccgccagcagcgccagcagcagctggaacacccaccagagcgtgaacgccgcctggagcgcccccagcaacccctggggcggcctgcaggccggcagagaccccagaagagccgtgggcgtgggcgtgggcgtgggcgtgggcgtgcccagccccctgaaccccatcagccccctgaagaagcccttcagcagcaacgtgatcgccccccccaagttccccagagccgcccccctgaccagcaagagctggatggaggacaacgccttcagaaccgacaacggcaacaacctgctgcccttccaggacagaagcagaccctacgacaccttcaacctgcacagcctggagaacagcctgatggacatgatcagaaccgaccacgagcccctgaagggcaagcactacccccccagcggcccccccatgagcttcgccgacatcatgtggagaaaccacttcgccggcagaatgggcatcaacttccaccaccccggcaccgacaacatcatggccctgaacaacgccttcctggacgacagccacggcgaccaggccctgagcagcggcctgagcagccccaccagatgccagaacggcgagagagtggagagatacagcagaaaggtgttcgtgggcggcctgccccccgacatcgacgaggacgagatcaccgccagcttcagaagattcggccccctggtggtggactggccccacaaggccgagagcaagagctacttcccccccaagggctacgccttcctgctgttccaggaggagagcagcgtgcaggccctgatcgacgcctgcctggaggaggacggcaagctgtacctgtgcgtgagcagccccaccatcaaggacaagcccgtgcagatcagaccctggaacctgagcgacagcgacttcgtgatggacggcagccagcccctggaccccagaaagaccatcttcgtgggcggcgtgcccagacccctgagagccgtggagctggccatgatcatggacagactgtacggcggcgtgtgctacgccggcatcgacaccgaccccgagctgaagtaccccaagggcgccggcagagtggccttcagcaaccagcagagctacatcgccgccatcagcgccagattcgtgcagctgcagcacaacgacatcgacaagagagtggaggtgaagccctacgtgctggacgaccagatgtgcgacgagtgccagggcaccagatgcggcggcaagttcgcccccttcttctgcgccaacgtgacctgcctgcagtactactgcgagtactgctgggccagcatccacagcagagccggcagagagttccacaagcccctggtgaaggagggcggcgacagacccagacacgtgcccttcagatggagctag

SEQ ID NO: 183152 - protein, 804 aa, Artificial Sequence
  derived and/or modified sequence
MNYQQQLANSAAIRAEIQRFESVHPNIYSIYELLERVEEPVLQNQIREHVIAIEDAFVNSQEWTLSRSVPELKVGIVGNLASGKSALVHRYLTGTYVQEESPEGGRFKKEIVVDGQSYLLLIRDEGGPPEAQFAMWVDAVIFVFSLEDEISFQTVYHYYSRMANYRNTSEIPLVLVGTQDAISSANPRVIDDARARKLSNDLKRCTYYETCATYGLNVERVFQDVAQKIVATRKKQQLSIGPCKSLPNSPSHSSVCSAQVSAVHISQTSNGGGSLSDYSSSVPSTPSTSQKELRIDVPPTANTPTPVRKQSKRRSNLFTSRKGSDPDKEKKGLESRADSIGSGRAIPIKQGMLLKRSGKSLNKEWKKKYVTLCDNGVLTYHPSLHDYMQNVHGKEIDLLRTTVKVPGKRPPRATSACAPISSPKTNGLSKDMSSLHISPNSDTGLGDSVCSSPSISSTTSPKLDPPPSPHANRKKHRRKKSTSNFKADGLSGTAEEQEENFEFIIVSLTGQTWHFEATTYEERDAWVQAIESQILASLQSCESSKNKSRLTSQSEAMALQSIRNMRGNSHCVDCETQNPNWASLNLGALMCIECSGIHRNLGTHLSRVRSLDLDDWPVELIKVMSSIGNELANSVWEESSQGRTKPSVDSTREEKERWIRAKYEQKLFLAPLPCTELSLGQHLLRATADEDLRTAILLLAHGSRDEVNETCGEGDGRTALHLACRKGNVVLAQLLIWYGVDVTARDAHGNTALAYARQASSQECIDVLLQYGCPDERFVLMATPNLSRRNNNRNNSSGRVPTII

SEQ ID NO: 183153 - DNA, 2415 bp, Artificial Sequence
  derived and/or modified sequence
atgaactaccagcagcagctggccaacagcgccgccatcagagccgagatccagagattcgagagcgtgcaccccaacatctacagcatctacgagctgctggagagagtggaggagcccgtgctgcagaaccagatcagagagcacgtgatcgccatcgaggacgccttcgtgaacagccaggagtggaccctgagcagaagcgtgcccgagctgaaggtgggcatcgtgggcaacctggccagcggcaagagcgccctggtgcacagatacctgaccggcacctacgtgcaggaggagagccccgagggcggcagattcaagaaggagatcgtggtggacggccagagctacctgctgctgatcagagacgagggcggcccccccgaggcccagttcgccatgtgggtggacgccgtgatcttcgtgttcagcctggaggacgagatcagcttccagaccgtgtaccactactacagcagaatggccaactacagaaacaccagcgagatccccctggtgctggtgggcacccaggacgccatcagcagcgccaaccccagagtgatcgacgacgccagagccagaaagctgagcaacgacctgaagagatgcacctactacgagacctgcgccacctacggcctgaacgtggagagagtgttccaggacgtggcccagaagatcgtggccaccagaaagaagcagcagctgagcatcggcccctgcaagagcctgcccaacagccccagccacagcagcgtgtgcagcgcccaggtgagcgccgtgcacatcagccagaccagcaacggcggcggcagcctgagcgactacagcagcagcgtgcccagcacccccagcaccagccagaaggagctgagaatcgacgtgccccccaccgccaacacccccacccccgtgagaaagcagagcaagagaagaagcaacctgttcaccagcagaaagggcagcgaccccgacaaggagaagaagggcctggagagcagagccgacagcatcggcagcggcagagccatccccatcaagcagggcatgctgctgaagagaagcggcaagagcctgaacaaggagtggaagaagaagtacgtgaccctgtgcgacaacggcgtgctgacctaccaccccagcctgcacgactacatgcagaacgtgcacggcaaggagatcgacctgctgagaaccaccgtgaaggtgcccggcaagagaccccccagagccaccagcgcctgcgcccccatcagcagccccaagaccaacggcctgagcaaggacatgagcagcctgcacatcagccccaacagcgacaccggcctgggcgacagcgtgtgcagcagccccagcatcagcagcaccaccagccccaagctggaccccccccccagcccccacgccaacagaaagaagcacagaagaaagaagagcaccagcaacttcaaggccgacggcctgagcggcaccgccgaggagcaggaggagaacttcgagttcatcatcgtgagcctgaccggccagacctggcacttcgaggccaccacctacgaggagagagacgcctgggtgcaggccatcgagagccagatcctggccagcctgcagagctgcgagagcagcaagaacaagagcagactgaccagccagagcgaggccatggccctgcagagcatcagaaacatgagaggcaacagccactgcgtggactgcgagacccagaaccccaactgggccagcctgaacctgggcgccctgatgtgcatcgagtgcagcggcatccacagaaacctgggcacccacctgagcagagtgagaagcctggacctggacgactggcccgtggagctgatcaaggtgatgagcagcatcggcaacgagctggccaacagcgtgtgggaggagagcagccagggcagaaccaagcccagcgtggacagcaccagagaggagaaggagagatggatcagagccaagtacgagcagaagctgttcctggcccccctgccctgcaccgagctgagcctgggccagcacctgctgagagccaccgccgacgaggacctgagaaccgccatcctgctgctggcccacggcagcagagacgaggtgaacgagacctgcggcgagggcgacggcagaaccgccctgcacctggcctgcagaaagggcaacgtggtgctggcccagctgctgatctggtacggcgtggacgtgaccgccagagacgcccacggcaacaccgccctggcctacgccagacaggccagcagccaggagtgcatcgacgtgctgctgcagtacggctgccccgacgagagattcgtgctgatggccacccccaacctgagcagaagaaacaacaacagaaacaacagcagcggcagagtgcccaccatcatctag

SEQ ID NO: 183154 - DNA, 5427 bp, Artificial Sequence
  derived and/or modified sequence
cgcggcttgcaaggcgcctgcgactcggtcccaggtcggcgggcggcgcacggcgggctcgcgcgggggccccggcgcgccgggcggcgcagtacgcagcgcgcggacccacgccacggccaggagcccagagcagcgcggccacactgcccaggggtcggccctcggccccggcgctcggagcgcggcggctgcctgggctttaatggctgctccgcggagcagcgcctagggctggaaggcggctgcggctcaggaagtcacccgagcaagcctccttcggggccggccgcacccgccgcggcgcgctccatgggggcgcgctccccccgggcggcccgctgacccgggacgccggggcccgctcgctcgccggccgcgcgtcccggccatgaactgagcccgcgggccagccccgcgcctgctccgcccgcgcctttcttctcgcgcctcctccgcccgccgccggcgggcccggctccccgggggctgcggcgccccgggctcggcggcccgcgggccccggggcgcggggcggcggcggcggggggcgcgcggctccgggcgcggcgcctgcaccatgaactaccagcagcagctggccaactcggctgccatccgggccgagatccagcgcttcgagtcggtccaccccaacatctactccatctacgagctgctggagcgcgtggaggagccggtgctgcagaaccagatccgggagcacgtcatcgccatcgaagatgccttcgtgaacagccaggaatggacgctgagtcgatctgtcccggagctcaaagtgggaattgtgggtaacttggccagcggcaagtctgccctggtgcaccggtacctgacgggcacatatgtccaggaggagtctccggaaggtggcaggttcaagaaagagattgtcgttgatggacagagctatctgctgctgatcagagatgaagggggccccccggaggcgcagtttgccatgtgggtggacgctgttatatttgtcttcagcttggaggatgaaataagtttccagaccgtttaccactactacagtcgaatggccaactatcggaacacgagcgagattcctctggttctggtgggaacccaggatgccataagttctgctaacccgagggtcatcgatgacgccagggcgaggaagctctccaacgacctgaaacggtgcacgtactacgagacgtgtgctacatacgggctgaatgtggagagggtcttccaggacgttgcccagaagattgttgccacaaggaagaagcagcagctgtccataggaccctgcaagtcgctacctaattctcccagccattcctccgtctgttccgcgcaggtgtctgccgtgcacatcagccagacaagtaatggaggtgggagtttaagcgactattcctcctccgttccatcgactcccagcaccagccagaaggaacttcggatcgatgttcctcccactgccaacacgcccacgcccgttcgcaagcagtctaagcgccggtccaacctgttcacctctcggaaagggagcgacccagacaaagagaagaaaggcctggagagtcgtgcggacagcattgggagcggccgagccatcccaattaaacagggcatgctgttgaagcgaagtggcaaatcgttgaataaagagtggaaaaagaaatatgtcaccctgtgtgacaatggcgtgctgacctatcatcccagtttacatgattacatgcagaatgttcatggtaaggagattgaccttctgagaaccactgtgaaagtcccagggaagaggccaccccgagccacgtcagcctgcgcacccatctccagccctaaaaccaatggcctatccaaggacatgagcagtttacacatctcacccaattcagacacagggctgggtgactccgtatgctccagccccagtatctccagcaccaccagccccaagctcgacccgcccccctcccctcacgccaacagaaagaagcaccgaaggaagaaaagcactagcaacttcaaagccgacggcctgtccggcactgctgaagaacaagaagaaaattttgagtttatcattgtgtccctcactggccaaacatggcactttgaagccacgacgtatgaggagcgggacgcctgggtccaagccatcgagagccagatcctggccagcctgcagtcgtgcgagagcagcaagaacaagtcccggctgacgagccagagcgaggccatggccctgcagtcgatccggaacatgcgcgggaactcccactgtgtggactgcgagacccagaatcccaactgggccagtttgaacttgggagccctcatgtgcatcgaatgctcagggatccaccggaatcttggcacccacctttcccgagtccgatctctggacctggatgactggccagtcgagctcatcaaggtgatgtcatccatcgggaacgagctagccaacagcgtctgggaagagagcagccaggggcggacgaaaccatcggtagactccacaagggaagagaaggaacggtggatccgtgccaagtacgagcagaagctcttcctggccccgctgccctgcacggagctgtccctgggccagcacctgctgcgggccaccgccgacgaggacctgcggacggccatcctgctgctggcacacggctcccgggacgaggtgaacgagacctgcggggagggagacggccgcacggcgctgcatctggcctgccgcaaggggaatgtggtcctggcgcagctcctgatctggtacggagtggacgtcacggcccgagatgcccacgggaacacagctctggcctacgcccggcaggcctccagccaggagtgcatcgacgtgctgctgcagtacggctgccccgacgagcgcttcgtgctcatggccacccctaacctgtccaggagaaacaataaccggaacaacagcagtgggagggtgcccaccatcatctgaggaacagccgtgcccgcctgctcgccgcacctgggacgcggcagcctcgccgcattctcgctcagaagtcgcagcacgtgagtcccgtcgcatcccctccctcttcctggtggccacctccctcccgcccacccactctcaccccaaacaaaatcacaaaacctggacatccctcaaggggcgaagaggcggccgggagactgcagaagtggctccttttcataaactcccctaaaccacacacaggagagagcgacgggcctcggccctttgatgatagcacatggcgcaggacccttgtcctggtggcacaagggatggggacgcgagggggaggggaggcgaggaacaaggagaaggggcaactttccttaactggcagttgagcacatagtacatttcccctctaccaaacggaacacttggattccatctcttctctgaggagctcgacggcataaatcagaagcaagcacagagtttgtcaggtttgaagcccctatgatggtgtgtgtcaaatcagttgtagctaatctgtccagggagaatactggcttcattacacttgtacagccgagttcttcccgcattactgctgtttaatagaacgtgattagtcatcgccgagaagaaagcatattagccgaggaggtagtcacgcggcacgcgccggtgattgccacgatgtgattgcaatactcttagaagcaccatattatcccagacatgttctttcaagcccttggagccctctctaaattcactgtcatcatttagtatctgtttaatttttcagtccaaagagaggaaatcagtcgctgagtattatttgactccggtctccttggtgcaaaaacaaaatgggaaaaataaataagaataactcagaaactcaaaaggaaaccacaaattcagctaataatagcatttcgagtatatttcgtaaactaaggaaatacacaaaaggctgttttttccgactgtaagagatatttgatgtccttttgccgaggtggatgtgttagtctcaggccctcctggaccacgttgcccaagtcacacaggcttctgtgttatgtatttagataagatgtgtgaaaatatatttgaataaaagaagttcataaatatgcattgatttttgtacagacaaatggcacctctcttaatttataaattgaactggatgtgaactaataatgtgcaactagttgagataagagggttacagatcattgtacatggaaaatattcccagcagtaaacacttccattaatgtgatctacggcttttgaaaaggagcatctcagaataagatggtggtacaatttgcttattaaaattgagaaagaaaaaaaaagacacactggagtatattagaaaggaaaaagaaggaatgtggtctctcatgattgaaagcatgatttagatcggatacggcttttgctaaccaaggaccaagggactctggcaagatggggtggttttccgaatgccagaccgaggtgccttacgaaggcagctgccaatggttctgtggcacagactggctcctgagaacccagacgaccttgacctggcagcccggccctccacgctagtacctcgcctgattttccatcgttgcggtatccagccgcttcagacgtccgccgccttcagtggtggtagtcaaatgtagtcaaccaaaccacagcatcccttaggttaaaagcaaacggggcagctttgcctagagctcattgacagtgtgatggggggagaagggttgtcacaatggaagatgaggacactagactcatgtagcacagaaacatgaagccacacgcaccggcagcctccggggtgttcctcgctctctcgtatgttaaaccttatattttataagagtttttcctcttatttcactttttaaaaaaaattaaagtaggtggggaaaaaaataaagctttacacagaatttatatgtgggtaagtgtttcatggaaatttctaatcttaacgaagctaagtggagctcactcgtatccaaaagtataacaggtgcagaagccacaagtctgagaaccttgacgacagttccatcgtcctgccatttgatttttcagtctgcgtttcatcactgtgtagctattgtaaatgtgaatagaaaaaaacaggtcattgcctatttttgaagaacgcgttggtgttcgagtccactagacacactcgctccacacagccttcaccgtagactctgtagtggacacagatatagcataaatgaaattgttaaattatttcattgtagttaattcccactataggaatgctttatcatagtgaagtttcttttgagaagaaacggaactccttgaggcttctctttgggatgtatatgagcgtgtacatattattctatgtgtttataatataatattttcccaaa

SEQ ID NO: 183155 - DNA, 2415 bp, Artificial Sequence
  derived and/or modified sequence
atgaactaccagcagcaactcgccaactcagcagcgattagggccgagatacaacgttttgagagtgttcaccctaatatctatagcatttatgagctcctggagagagttgaagagcctgtgctgcagaatcagattcgggagcacgtgatcgccattgaagacgccttcgtgaatagccaggagtggaccctgtcccgttccgttcctgaactgaaggtcggcatagtgggcaacctagcttctgggaagtccgccctagtgcatcgctatctgacgggtacttacgtacaggaggaaagtcccgaaggaggccggtttaagaaagagatcgtggtcgacgggcagtcctacctgctcctaatacgggatgaaggaggccccccagaggctcagtttgcgatgtgggtagacgcagtcatcttcgtgttctcgcttgaggacgaaatctcatttcaaaccgtatatcattattatagtcgcatggccaattatcggaataccagtgagatcccactcgtgcttgtcggcacccaggatgcaatctcaagtgcaaatccaagagtgatcgacgatgccagagccagaaaacttagcaacgacctcaaaaggtgtacatactatgagacttgtgctacatatggactgaatgtggagcgtgtgtttcaggacgtcgcacagaaaatagtcgctacacgtaagaaacagcagctgagcattgggccatgtaagtccctgcccaattctccctcgcatagctccgtctgttcagcacaggtctcagccgtacacatctcccagacatccaatggaggtggcagtctcagcgattatagttcatctgttccctctacaccttccacctcccaaaaggagttacgtatcgatgtgccgcctacagcaaatacccctactccagtgcggaaacagtctaagcgcaggagcaatctgttcacatccaggaaaggctctgaccccgataaggaaaagaagggcctcgagtccagagccgattccatcggctctgggcgtgccatccctatcaaacaggggatgctactgaagagatcaggcaagagtctgaataaagagtggaaaaagaagtacgtcactctctgcgacaatggtgtgctgacataccatccctccttgcatgactacatgcagaatgtgcacggtaaggagatagacctgctccgcacgactgtgaaggtgcccggaaagagaccccccagagccaccagcgcctgtgctcctatcagcagtccgaaaaccaatgggctctctaaggacatgtcctccctacatatcagccctaatagtgatacgggattgggggatagtgtctgctcttctccttcaatctctagcaccacctccccaaagctagacccaccaccatctccgcacgcgaataggaaaaagcatcgccggaagaagtcgacatccaacttcaaagctgacggactgtctggcaccgccgaggagcaggaggagaacttcgagttcattatagtgtctttaaccggccagacgtggcacttcgaggctactacctacgaagaacgggatgcatgggtgcaggctatcgagagtcaaattctggcttcactccagagttgcgagtccagcaaaaataagtcccggctgaccagtcagagtgaggcaatggctcttcaatcaattcgcaacatgagagggaatagtcactgcgtggactgtgagacgcagaatcccaactgggcaagcctcaatctcggggctctcatgtgtatcgagtgctcgggcatccaccggaatctggggactcacctttctcgcgtgcggagtctggacctcgacgattggccagtggaattgattaaggtgatgagttccatcggcaatgagttagccaattctgtctgggaagagagttcacaaggacgaactaagcccagcgtggattcaacgcgagaggagaaggagcgctggatacgagccaagtacgagcaaaagctgttccttgcccctctcccttgtactgagctaagtttgggtcagcacctgcttcgcgctaccgcggacgaagacctccgcaccgcaatcctgctgctcgcccacggcagtcgcgacgaagtgaatgaaacatgtggggagggtgatggacggacagcactgcacctggcttgtcgaaaaggaaacgttgtgctggctcagttgttgatttggtacggggttgacgtcacagcccgcgacgctcacgggaacacggctctggcatatgccaggcaagcaagctctcaggaatgcatagacgtgctcctccaatacgggtgtccagatgagcgctttgtgttaatggccactcctaacctgtcccggaggaataacaatcgtaataactcctcgggccgtgttcctacgataatttag

SEQ ID NO: 183156 - DNA, 2415 bp, Artificial Sequence
  derived and/or modified sequence
atgaactaccagcagcagctggccaacagcgctgccatccgggcagagatccagagatttgagagcgtgcaccccaacatctacagcatctatgagctgctggagcgggtggaggagcctgtgctgcagaaccagatccgggagcacgtgattgccattgaagatgcctttgtgaacagccaggagtggaccctgagccgctctgtgcctgagctgaaggtgggcatcgtgggcaacctggccagcggcaagagcgccctggtgcaccgctacctgaccggcacctacgtgcaggaggagagccctgagggcggccgcttcaagaaggagatcgtggtggatggccagagctacctgctgctgatcagagatgagggcggccccccagaggcccagtttgccatgtgggtggatgctgtgatctttgtgttcagcctggaggatgagatctccttccagacagtgtaccactactacagcaggatggccaactacagaaacaccagcgagatccccctggtgctggtgggcacccaggatgccatcagcagcgccaacccccgggtgattgatgatgcccgggccaggaagctgagcaatgacctgaagcgctgcacctactatgagacctgtgccacctacggcctgaatgtggagagggtcttccaggatgtggcccagaagatcgtggccaccaggaagaagcagcagctgagcatcggcccctgcaagagcctgcccaacagccccagccacagctctgtgtgcagcgcccaggtgtctgctgtgcacatcagccagaccagcaatggaggcggcagcctgagtgactacagcagctctgtgcccagcacccccagcaccagccagaaggagctgagaattgatgtgcccccaacagccaacacccccacccctgtgaggaagcagagcaagagaagaagcaacctcttcaccagcaggaagggcagtgaccctgacaaggagaagaagggcctggagagcagagctgacagcatcggcagcggccgggccatccccatcaagcagggcatgctgctgaagaggtctgggaagagcctgaacaaggagtggaagaagaagtatgtgaccctgtgtgacaatggagtgctgacctaccaccccagcctgcatgactacatgcagaatgtgcacggcaaggagattgacctgctgcggaccaccgtgaaggtgcctgggaagaggcctccccgggccaccagcgcctgtgcccccatcagcagccccaagaccaacggcctgagcaaggacatgagcagcctgcacatcagccccaacagcgacaccggcctgggggacagcgtgtgcagcagccccagcatcagcagcaccaccagccccaagctggaccccccacccagcccccacgccaacaggaagaagcacaggaggaagaagagcaccagcaacttcaaggcagatggcctgtctggaacagctgaggagcaggaggagaactttgagttcatcatcgtgtccctgaccggccagacctggcactttgaggccaccacctatgaggagagagatgcctgggtgcaggccatcgagagccagatcctggccagcctgcagagctgtgagagcagcaagaacaagagccggctgaccagccagagcgaggccatggccctgcagagcatccggaacatgaggggcaacagccactgtgtggactgtgagacccagaaccccaactgggccagcctgaacctgggcgccctgatgtgcattgaatgttctggcatccacaggaacctgggcacccacctgagccgggtgcgcagcctggacctggatgactggcctgtggagctgatcaaggtgatgagcagcattggaaatgagctggccaacagcgtgtgggaggagagcagccagggccgcaccaagcccagcgtggacagcacccgggaggagaaggagcgctggatccgggccaagtatgagcagaagctgttcctggcccccctgccctgcacagagctgagcctgggccagcacctgctgcgggccacagcagatgaggacctgaggacagccatcctgctgctggcccacggcagcagagatgaggtgaatgagacctgtggggagggagatggccgcacagccctgcacctggcctgcaggaaaggaaatgtggtgctggcccagctgctgatctggtacggcgtggatgtgacagccagagatgcccacggcaacacagccctggcctatgcccggcaggccagcagccaggagtgcattgatgtgctgctgcagtatggctgcccagatgaaagatttgtgctgatggccacccccaacctgagcagaagaaacaacaacagaaacaacagcagcggccgggtgcccaccatcatctag

SEQ ID NO: 183157 - DNA, 2415 bp, Artificial Sequence
  derived and/or modified sequence
atgaactaccagcagcagctggccaacagcgccgccatccgggccgagatacaacggttcgagtcagtgcacccaaatatttatagcatatatgaactgttggagagggtggaagaacccgttctccaaaaccagatccgcgaacacgtgatcgctattgaagatgcttttgtgaatagccaagaatggaccctatcaaggagcgtccccgagctgaaggttggaatagttgggaatctagcgtctgggaaatctgcactggtacataggtatctgacagggacctacgtgcaagaggagagccccgaaggcggtcgctttaagaaggaaatcgtggttgatgggcagagctatctcctcttgatcagagacgaggggggccccccagaggcacagttcgctatgtgggtggacgctgttatatttgtattttccctcgaggacgaaatcagtttccagaccgtctaccactactatagccgaatggcaaattatcggaacacttcggagataccactcgtgcttgtgggcactcaagatgcaatcagcagcgccaacccacgggtgatcgatgatgcacgggcaagaaaactgtctaatgacttaaaaagatgtacatattatgaaacctgtgctacatacggcctgaatgtagagagagtatttcaagatgtggcacaaaagattgtggccacccggaaaaaacagcagctttctatagggccttgtaagtctctccctaatagcccttcgcattcatctgtctgttcggctcaggtctctgcagtgcacattagtcaaacatctaatggcggtggaagtctgtcagattatagctcatcagtgcctagcaccccaagcacatctcagaaggaacttcggatcgacgtcccaccaaccgcaaatacccctacacccgtgaggaaacagagcaaacgccgctcaaacctgttcacctccagaaagggaagcgatccagacaaggaaaaaaagggcctagagagtagagccgactccattgggagcgggcgggcaataccgataaaacaagggatgctcttgaagcggtctggaaagtcattaaataaggagtggaagaagaaatatgtcactctctgcgacaatggcgtgttaacttatcacccctcactgcatgattatatgcagaacgtccacgggaaagaaatagacctgctgcggacaacagtgaaagtcccaggtaaaagaccaccaagggccacatctgcgtgcgctcctatttcttctcctaagaccaacggactctccaaggatatgagttcattgcatatctcaccgaatagcgatactgggctaggagattccgtgtgctcatcaccctctattagctccaccacttctcccaagttggatcctccaccctccccccacgccaaccgcaaaaagcacagaaggaagaagtcaacctcaaactttaaagctgatgggctgagtggcaccgccgaggaacaagaggagaattttgagttcataatcgtgtctctgactggtcaaacttggcactttgaagctacaacctacgaagagcgcgacgcttgggtccaggccattgagtctcagatattggccagcctgcaatcatgtgaatccagcaaaaacaagagtcggttgaccagtcagtcagaggcaatggctctgcaaagcatccggaacatgaggggcaattcccactgcgtcgattgtgagactcagaaccccaattgggctagtctgaacttgggcgctttgatgtgcattgagtgttctggcattcaccgcaacctcgggacccatctgtcccgtgtgagatccctggacctagatgactggcccgtggagctgattaaagtgatgtcgagcatcggaaatgagttagctaattcagtgtgggaagagtctagtcagggcagaaccaaacctagtgttgactctactcgggaggagaaggagcgctggatccgggcaaaatacgagcaaaagctattccttgcacccttgccctgtaccgagctgtctctgggccaacatctgttgcgagctacagcagatgaagatctccggactgccatcctcctgctggcccacggttcaagagatgaagtaaatgagacctgtggcgaaggagatggaaggaccgccctgcaccttgcttgtcgcaaagggaacgtggtgctggcacaattgcttatctggtacggggtcgacgttaccgcccgtgacgcccacggcaataccgccctcgcttatgctagacaggcgtcctctcaggaatgtattgatgttctccttcagtacggatgccctgacgagcggttcgtactgatggccacccccaacctgtcgcgcagaaataataaccggaataatagctcaggccgagttccaacaatcatctag

SEQ ID NO: 183158 - DNA, 2415 bp, Artificial Sequence
  derived and/or modified sequence
atgaactaccagcagcagctggctaatagcgccgcaattagggctgagatacaaagatttgagtctgtgcacccaaacatttactccatttacgagctcttggagcgcgttgaggaaccggtcttacagaaccaaattagagagcacgtaatcgccattgaggacgcgtttgtgaattcgcaggaatggactttgagtagatcagtgcccgagctcaaagtgggcattgtggggaacctggcatctggaaagagcgccttggttcaccgatatctcaccggaacctatgttcaggaggaatctccagagggaggccgattcaagaaagaaatagttgtggacggtcagtcctatctgttgcttatccgcgacgagggcggacccccagaggcacaattcgctatgtgggtggacgcagtcatcttcgtgttttctctggaggatgagatcagctttcaaactgtgtaccactactattcaaggatggcaaattatcggaacaccagtgagattccactggtgctggtggggacccaggatgccatttccagcgccaatcccagagtgattgacgacgcccgtgccagaaagttaagtaacgacttaaaacggtgtacctactacgaaacctgcgcaacctatggcttgaacgttgagcgcgtatttcaagacgtggcacagaagatcgtagccacacgcaagaagcagcagctgtccatcggtccttgtaaaagtctgcccaattccccctcacactcatccgtgtgttccgcacaggtctctgccgttcacatcagccagactagcaatggagggggatcactgtcggattactcatctagcgtgccaagcacaccttccacatcacagaaggaattacgcatcgacgtgccccctaccgccaatacccccacaccggtgagaaagcaatctaagcggcgtagcaacttatttactagtcgtaagggctctgatcctgacaaagaaaagaagggcctggaatccagggcagactcaattggaagcggccgtgctatccctataaagcagggcatgttactcaagcgcagcggaaaaagtcttaataaggaatggaaaaagaagtatgtgacgttgtgcgacaatggtgttctgacctaccatcccagcctccatgattatatgcagaacgtacacggtaaagaaatcgacttacttcggactactgttaaagtccctggaaagagaccgccacgcgcaacctcagcttgtgcacccatttcgagccctaagaccaacggactgagcaaggacatgtcaagtctgcacatttctcccaactctgatactggtctgggcgacagcgtttgtagcagccctagcatcagcagtacaaccagccccaagttggatcctcccccttcccctcatgcaaacagaaagaagcacagaagaaaaaagtccacttcaaatttcaaggccgacgggttgtctgggacagcggaagaacaggaggaaaacttcgagtttatcatcgtgtccctcactgggcagacatggcacttcgaggcgacaacatatgaagagagagacgcatgggtgcaggccatcgagtcacaaatccttgcctctctgcagagctgcgaatcctcaaagaacaaatctcggttaacaagccagtccgaggcaatggccttgcagtcaatacgcaatatgagaggaaactcacattgtgtggattgcgagacccagaaccctaattgggcatccctcaatctgggagcactgatgtgcatcgagtgtagtggcatacatcgaaatctagggacccacctgtccagggttcggtccctagacctggatgactggccagtcgagcttattaaggtgatgagctctattggtaacgaacttgccaattcagtctgggaagaaagttcccagggcaggactaagcccagtgtggattcaactcgcgaagagaaggagcggtggataagggcaaagtacgagcaaaagctgtttctggccccactcccatgcaccgagctgagtttgggccagcacctcctcagggccactgctgacgaagacctgcggaccgctatcttgctcctggctcatggcagcagggatgaggtcaacgagacctgcggcgaaggcgatggcagaacagccctccacctggcatgccgcaaagggaacgtcgtcctggcacagctgttgatatggtatggagtggacgtgaccgctcgtgacgcccacggcaacacggccctggcttacgctcgccaagcatcctcccaagagtgtatagacgtgctgttacaatatggctgccccgacgagaggttcgtcctgatggccacgccgaatctcagtcgtaggaacaataacagaaataattcgtctggcagggtgcctaccatcatctag

SEQ ID NO: 183159 - protein, 1710 aa, Artificial Sequence
  derived and/or modified sequence
MKKIFSKKGESPLGSFARRQRSSAGGGGEPGEGAYSQPGYHVRDRDLGKIHKAASAGNVAKVQQILLLRKNGLNDRDKMNRTALHLACANGHPEVVTLLVDRKCQLNVCDNENRTALMKAVQCQEEKCATILLEHGADPNLADVHGNTALHYAVYNEDISVATKLLLYDANIEAKNKDDLTPLLLAVSGKKQQMVEFLIKKKANVNAVDKLESSHQLISEYKEERIPKHSSQNSNSVDESSEDSLSRLSGKPGVDDSWPTSDDEDLNFDTKNVPKPSLAKLMTASQQSRKNLEATYGTVRTGNRTLFEDRDSDSQDEVVVESLPTTSIKVQCFSHPTYQSPDLLPKPSHKSLANPGLMKEEPTKPGIAKKENGIDIIESAPLEQTNNDNLTYVDEVHKNNRSDMMSALGLGQEEDIESPWDSESISENFPQKYVDPLAGAADGKEKNIGNEQAEDVFYIPSCMSGSRNFKMAKLEDTRNVGMPVAHMESPERYLHLKPTIEMKDSVPNKAGGMKDVQTSKAAEHDLEVASEEEQEREGSENNQPQVEEERKKHRNNEMEVSANIHDGATDDAEDDDDDDGLIQKRKSGETDHQQFPRKENKEYASSGPALQMKEVKSTEKEKRTSKESVNSPVFGKASLLTGGLLQVDDDSSLSEIDEDEGRPTKKTSNEKNKVKNQIQSMDDVDDLTQSSETASEDCELPHSSYKNFMLLIEQLGMECKDSVSLLKIQDAALSCERLLELKKNHCELLTVKIKKMEDKVNVLQRELSETKEIKSQLEHQKVEWERELCSLRFSLNQEEEKRRNADTLYEKIREQLRRKEEQYRKEVEVKQQLELSLQTLEMELRTVKSNLNQVVQERNDAQRQLSREQNARMLQDGILTNHLSKQKEIEMAQKKMNSENSHSHEEEKDLSHKNSMLQEEIAMLRLEIDTIKNQNQEKEKKCFEDLKIVKEKNEDLQKTIKQNEETLTQTISQYNGRLSVLTAENAMLNSKLENEKQSKERLEAEVESYHSRLAAAIHDRDQSETSKRELELAFQRARDECSRLQDKMNFDVSNLKDNNEILSQQLFKTESKLNSLEIEFHHTRDALREKTLGLERVQKDLSQTQCQMKEMEQKYQNEQVKVNKYIGKQESVEERLSQLQSENMLLRQQLDDAHNKADNKEKTVINIQDQFHAIVQKLQAESEKQSLLLEERNKELISECNHLKERQYQYENEKAEREVVVRQLQQELADTLKKQSMSEASLEVTSRYRINLEDETQDLKKKLGQIRNQLQEAQDRHTEAVRCAEKMQDHKQKLEKDNAKLKVTVKKQMDKIEELQKNLLNANLSEDEKEQLKKLMELKQSLECNLDQEMKKNVELEREITGFKNLLKMTRKKLNEYENGEFSFHGDLKTSQFEMDIQINKLKHKIDDLTAELETAGSKCLHLDTKNQILQEELLSMKTVQKKCEKLQKNKKKLEQEVINLRSHIERNMVELGQVKQYKQEIEERARQEIAEKLKEVNLFLQAQAASQENLEQFRENNFASMKSQMELRIKDLESELSKIKTSQEDFNKTELEKYKQLYLEELKVRKSLSSKLTKTNERLAEVNTKLLVEKQQSRSLFTTLTTRPVMEPPCVGNLNNSLDLNRKLIPRENLVISTSNPRASNNSMENYLSKMQQELEKNITRELKEAAAELESGSIASPLGSTDESNLNQDLVWKASREYVQVLKKNYMI

SEQ ID NO: 183160 - protein, 213 aa, Artificial Sequence
  derived and/or modified sequence
  misc_feature (1)..(1): Xaa can be any naturally occurring amino acid
XFRENNFASMKSQMELRIKDLESELSKIKTSQEDFNKTELEKYKQLYLEELKVRKSLSSKLTKTNERLAEVNTKLLVEKQQSRSLFTTLTTRPVMEPPCVGNLNNSLDLNRKLIPRENLVISTSNPRASNNSMENYLSKMQQELEKNITRELKEAAAELESGSIASPLGSTDESNLNQDLVWKASREYGPSDETPHDYVLMTDQCLTSRTDLQ

SEQ ID NO: 183161 - DNA, 5133 bp, Artificial Sequence
  derived and/or modified sequence
atgaaaaaaatcttcagcaaaaagggagagtctccccttggcagtttcgccaggagacagaggagctcagccggtggcggtggggaaccgggagaaggggcgtacagtcaacccgggtatcatgtaagagaccgagacttgggcaagattcacaaggctgcttccgcaggcaacgtggccaaggtgcagcagatactgctgctgcggaaaaatggcttaaacgatcgcgataagatgaatcgaacggccctacacctggcatgtgccaatggccatcccgaggtggttactctcctcgtagaccgcaagtgtcagttgaacgtgtgtgacaatgagaacaggactgccctgatgaaggcagttcagtgccaggaagaaaaatgcgctaccatcctgctcgaacatggcgccgaccccaaccttgctgacgtgcatgggaatactgccctgcactacgcggtgtacaacgaagatatatctgtcgcaactaaactgctgctgtacgacgcgaatatcgaggctaaaaacaaggatgacctcacacccttactcctggccgtgagtggcaaaaagcaacaaatggtggagtttctcatcaaaaaaaaggctaacgtaaatgccgtggacaagctagaatcttcccaccagttaatcagtgagtataaggaggagagaattccaaaacattccagtcagaatagcaatagcgttgacgaatcttcggaagatagcctgagccgactatctggcaagccaggggtggatgactcttggccaacttccgacgacgaagatctgaatttcgacacaaaaaacgtccctaagccgtcactggccaaattgatgaccgcctcccagcagagtcgaaaaaacctggaagctacatatgggacagtacgcaccggtaacagaacactgttcgaggatcgcgattcagacagccaggacgaggtggtagtggaatccctaccaaccacatctattaaagtccagtgcttttcacatcccacataccagtctccagatctgttgcccaagcctagccacaaatccctcgctaaccctggcttgatgaaggaggaaccaacaaagcctggtattgcgaaaaaagaaaatggtatcgacattatcgagtcagcacctttggaacagaccaacaacgacaatcttacttacgtagatgaggtgcacaaaaacaacagaagcgatatgatgagcgcactgggattgggccaggaggaggacattgaaagtccatgggatagcgagtcaatcagcgagaacttcccgcagaagtatgtcgatcctctagccggggccgctgacggcaaagaaaagaacataggcaacgaacaggccgaggatgtgttttatattccgagctgcatgtcggggagcaggaattttaaaatggccaaactggaggataccagaaatgtggggatgcccgtggcccatatggagagcccagaacgttaccttcacctgaaacctaccatcgagatgaaggattccgtccccaacaaagctggaggcatgaaggacgtccaaacttccaaagctgccgaacacgatctcgaggtggctagcgaagaagagcaggagagggagggctctgagaataatcaaccacaggtggaagaagagcgaaaaaagcatagaaacaatgaaatggaggtgagtgccaacatacacgatggggccacagacgatgccgaggacgacgacgacgacgacggactgatccagaagagaaagtccggcgaaacagaccatcaacagtttccacggaaagaaaataaagaatacgcgagtagtggccctgctctacaaatgaaggaggtgaagagcactgagaaagagaaaaggactagcaaagagtccgtcaattccccagttttcgggaaggcctccctattgaccggaggtcttctgcaagtcgatgacgattcctctctgagcgaaatcgatgaggatgaaggccgaccaacaaagaaaaccagcaacgaaaaaaacaaagtcaagaatcagatccagagtatggacgatgtcgacgacctgacccagagttccgagactgcctcagaggactgtgaactgcctcactcttcctacaagaatttcatgctattgattgaacagcttggtatggaatgcaaggattcagtgtccctgcttaaaatccaagacgccgccctgtcttgcgagagactgctggagctaaagaagaaccactgcgagctccttacagtgaaaataaaaaagatggaagacaaggtaaatgtcctgcagagagagctgtcggaaaccaaggaaatcaaatcccaactggagcaccagaaagtcgaatgggaaagagaactttgttctttacgcttctccctgaaccaagaggaagaaaaacgtagaaatgctgacacactatacgagaaaatccgggagcaacttcgacgtaaagaggaacagtaccgcaaggaggtggaggtcaagcaacaactggagctttcactgcaaacactggagatggaactcaggactgtgaaatccaaccttaaccaagtggtgcaagagcgcaacgatgctcagcgtcaactgtcaagggagcagaatgctcgcatgcttcaggacggtatcctaaccaaccacctgagcaagcagaaggagattgagatggctcaaaaaaagatgaactccgagaacagccattcacacgaagaggagaaagacctgtctcataaaaacagcatgcttcaggaagagatcgccatgcttaggctcgaaatagacacaataaaaaatcagaatcaggaaaaggagaagaaatgtttcgaagacttaaaaatcgttaaagagaaaaatgaggacctccagaaaaccatcaagcaaaacgaagagacactgacgcagaccatttcccaatacaacggtcggctttctgtactcaccgccgaaaacgccatgctgaactcaaagcttgaaaatgaaaaacaatccaaggaaaggctggaggcagaagtggagagttaccacagccgtcttgcggctgccatccatgatagagaccagagtgaaacctcgaaacgagaactcgagctagccttccagagagcaagggacgagtgttcgcgcctgcaagacaagatgaactttgacgtgtctaatctgaaggacaacaatgagatcctgtcccagcagctatttaaaactgagtctaagctgaattcattagaaatcgaattccaccataccagggatgcactgcgtgagaaaactctgggcctggagcgcgtgcaaaaagatttgtcccagacccagtgtcagatgaaagaaatggaacagaagtatcagaatgaacaggtcaaagtgaataaatacataggtaagcaggaaagtgtagaggagaggctctcacagctccaaagcgaaaacatgctgctgcggcagcaactggacgatgcgcacaacaaagcggacaacaaagagaaaactgtgatcaacatccaggaccaattccacgctatcgtccagaaactgcaagcggaatccgaaaagcagtccttactgctagaagagcggaacaaagagctgatctcggaatgcaatcatctaaaggagcgtcaatatcagtatgagaacgagaaagcagagagggaagtggttgttcgacagttgcaacaggagctcgccgacaccttaaaaaaacagtcaatgtcggaggctagcctagaagtcacgtctagatatcgaatcaatctggaggacgagactcaagacttgaagaagaaactgggacaaataagaaatcagctgcaggaggctcaggaccgtcacactgaagctgttagatgtgctgagaaaatgcaggatcataagcagaaactggaaaaggacaacgcaaaactgaaagtgaccgtcaaaaagcaaatggataaaattgaagaactccagaaaaatctactgaatgctaacctgtccgaggacgagaaggagcaactaaagaagcttatggaacttaaacagagcctcgagtgcaaccttgaccaggagatgaagaaaaacgttgaactggaacgggaaattacaggatttaaaaacttattgaaaatgacccgcaagaagttgaatgagtacgagaatggtgaattttcattccacggcgatctaaaaacaagccagtttgagatggatattcaaatcaacaaactgaagcataagatcgatgacctgactgccgaactggagacagcgggatccaaatgccttcacctggatactaagaatcagatccttcaggaagaactgttaagtatgaagaccgttcagaaaaaatgtgagaaactgcagaaaaataagaaaaaactggaacaggaagtgatcaatctcaggtctcacattgaaaggaatatggtcgagttgggacaggtgaaacagtacaagcaagagattgaagaacgtgcaaggcaggagatcgccgagaagctgaaagaggtaaacctattcttgcaggcccaggcagccagtcaagagaacttggaacagtttcgagagaacaactttgcctctatgaagagtcagatggaattacgcatcaaggacctggaatctgagctttccaagatcaagacaagtcaggaagatttcaataagaccgaattggaaaaatacaagcagttgtacctggaagaactcaaagtaaggaagtctctttcgtctaagcttaccaagactaacgaacgcctggccgaggtgaatactaagttgttagttgaaaagcaacaaagtcggtctctcttcaccacattgaccacccgacccgtcatggagcctccttgtgtgggtaatctgaacaatagcttggatcttaatcgcaaactgattccacgggaaaacctagtcattagcacttcgaacccccgtgcaagcaataacagcatggagaattacctgtctaaaatgcagcaagaactggaaaaaaatatcaccagagagctcaaagaagctgcagctgagctcgagagcgggtctattgcgagcccacttggcagcactgatgaatcaaacttgaaccaggacttagtctggaaagcatctagggagtatgtccaggtgctcaaaaagaattatatgatttag

SEQ ID NO: 183162 - DNA, 5133 bp, Artificial Sequence
  derived and/or modified sequence
atgaagaagatcttcagcaagaagggggagagccccctgggcagctttgcccggcggcagaggagcagcgctgggggcggcggggagcccggggagggcgcctacagccagcccggctaccacgtgcgggaccgggacctgggcaagatccacaaggccgccagcgctggaaatgtggccaaggtgcagcagatcctgctgctgaggaagaatggcctgaatgaccgggacaagatgaacagaacagccctgcacctggcctgtgccaacggccaccctgaggtggtgaccctgctggtggacaggaagtgccagctgaatgtgtgtgacaatgaaaatagaacagccctgatgaaggctgtgcagtgccaggaggagaagtgtgccaccatcctgctggagcacggggctgaccccaacctggctgatgtgcacggcaacacagccctgcactatgctgtgtacaatgaagacatctctgtggccaccaagctgctgctgtatgatgccaacatcgaggccaagaacaaggatgacctgacccccctgctgctggccgtgtctgggaagaagcagcagatggtggagttcctgatcaagaagaaggccaacgtgaatgctgtggacaagctggagagcagccaccagctgatcagcgagtacaaggaggagcgcatccccaagcacagcagccagaacagcaacagcgtggatgagagcagcgaggacagcctgagccggctgagcggcaagccaggagtggatgacagctggcccaccagtgatgatgaggacctgaactttgacaccaagaatgtgcccaagcccagcctggccaagctgatgacagccagccagcagagcaggaagaacctggaggccacctacggcaccgtgaggactggaaacagaaccctgtttgaggaccgggacagcgacagccaggatgaggtggtggtggagagcctgcccaccaccagcatcaaggtgcagtgcttcagccaccccacctaccagagcccagacctgctgcccaagcccagccacaagagcctggccaaccctggcctgatgaaggaggagcccaccaagccaggcatcgccaagaaggaaaatggcatcgacatcattgaaagtgcccccctggagcagaccaacaatgacaacctgacctacgtggatgaggtgcacaagaacaacagaagtgacatgatgtctgccctgggcctgggccaggaggaggacatcgagagcccctgggacagcgagagcatcagcgagaacttcccccagaagtatgtggaccccctggccggggctgctgatggcaaggagaagaacattggaaatgagcaggccgaggatgtgttctacatccccagctgcatgagcggcagcaggaacttcaagatggccaagctggaggacaccagaaatgtgggcatgcctgtggcccacatggagagccctgagcgctacctgcacctgaagcccaccatcgagatgaaggacagcgtgcccaacaaggccggcggcatgaaggatgtgcagaccagcaaggctgctgagcatgacctggaggtggccagcgaggaggagcaggagcgggagggcagcgagaacaaccagccccaggtggaggaggagaggaagaagcacaggaacaatgagatggaggtgtctgccaacatccatgatggagccacagatgatgctgaagatgatgatgatgatgatggcctcatccagaagaggaagtctggagaaacagaccaccagcagttccccaggaaagaaaacaaggagtatgccagcagcggccctgccctgcagatgaaggaggtgaagagcacagagaaggagaagaggaccagcaaggagagcgtgaacagccctgtgtttgggaaggccagcctgctgactggaggcctgctgcaggtggatgatgacagcagcctgtctgaaattgatgaagatgagggccggcccaccaagaagaccagcaatgagaagaacaaggtgaagaaccagatccagagcatggatgatgtggatgacctgacccagagcagcgagacagccagcgaggactgtgagctgccccacagcagctacaagaacttcatgctgctgattgagcagctgggcatggagtgcaaggacagcgtgtccctgctgaagatccaggatgctgccctgagctgtgagcggctgctggagctgaagaagaaccactgtgagctgctgactgtgaagatcaagaagatggaggacaaggtgaatgtgctgcagcgggagctgtctgagaccaaggagatcaagagccagctggagcaccagaaggtggagtgggagcgggagctgtgcagcctgcgcttcagcctgaaccaggaggaggagaagagaagaaatgctgacaccctgtatgagaagatccgggagcagctgcggaggaaggaggagcagtacaggaaggaggtggaggtgaagcagcagctggagctgagcctgcagaccctggagatggagctgaggacagtgaagagcaacctgaaccaggtggtgcaggagagaaatgatgcccagaggcagctgagccgggagcagaatgccaggatgctgcaggacggcatcctgaccaaccacctgagcaagcagaaggagattgagatggcccagaagaagatgaacagcgagaacagccacagccatgaggaggagaaggacctgagccacaagaacagcatgctgcaggaggagatcgccatgctgcggctggagattgacaccatcaagaaccagaaccaggagaaggagaagaagtgctttgaggacctgaagatcgtgaaggagaagaatgaagacctgcagaagaccatcaagcagaatgaggagaccctgacccagaccatcagccagtacaacggccgcctgtctgtgctgacagcagaaaatgccatgctgaacagcaagctggagaatgagaagcagagcaaggagcggctggaggccgaggtggagagctaccacagccggctggccgccgccatccatgaccgggaccagagcgagaccagcaagcgggagctggagctggccttccagagggccagagatgagtgcagccggctgcaggacaagatgaactttgatgtgagcaacctgaaggacaacaatgagatcctgagccagcagctgttcaagacagagagcaagctgaacagcctggagattgagttccaccacaccagagatgccctgcgggagaagaccctgggcctggagcgggtgcagaaggacctgagccagacccagtgccagatgaaggagatggagcagaagtaccagaatgagcaggtgaaggtgaacaagtacatcggcaagcaggagagcgtggaggagcggctgagccagctgcagagcgagaacatgctgctgcggcagcagctggatgatgcccacaacaaggctgacaacaaggagaagacagtcatcaacatccaggaccagttccacgccatcgtgcagaagctgcaggccgagagcgagaagcagagcctgctgctggaggagaggaacaaggagctgatcagcgagtgcaaccacctgaaggagcggcagtaccagtatgaaaatgagaaggccgagcgggaggtggtggtgcggcagctgcagcaggagctggccgacaccctgaagaagcagagcatgtctgaggccagcctggaggtgaccagccgctaccgcatcaacctggaggatgagacccaggacctgaagaagaagctgggccagatccggaaccagctgcaggaggcccaggacagacacacagaggccgtgcgctgtgccgagaagatgcaggaccacaagcagaagctggagaaggacaatgccaagctgaaggtgacagtgaagaagcagatggacaagattgaggagctgcagaagaacctgctgaatgccaacctgtctgaagatgagaaggagcagctgaagaagctgatggagctgaagcagagcctggagtgcaacctggaccaggagatgaagaagaatgtggagctggagcgggagatcaccggcttcaagaacctgctgaagatgaccaggaagaagctgaatgaatatgaaaatggagagttctccttccatggagacctgaagaccagccagtttgagatggacatccagatcaacaagctgaagcacaagattgatgacctgacagctgagctggagacagctggcagcaagtgcctgcacctggacaccaagaaccagatcctgcaggaggagctgctgtccatgaagacagtgcagaagaagtgtgagaagctgcagaagaacaagaagaagctggagcaggaggtgatcaacctgcggagccacattgaaagaaacatggtggagctgggccaggtgaagcagtacaagcaggagattgaggagcgggcccggcaggagattgctgagaagctgaaggaggtgaacctcttcctgcaggcccaggccgccagccaggagaacctggagcagttccgggagaacaactttgcctccatgaagagccagatggagctgcgcatcaaggacctggagagcgagctgagcaagatcaagaccagccaggaggacttcaacaagacagagctggagaagtacaagcagctgtacctggaggagctgaaggtgaggaagagcctgagcagcaagctgaccaagaccaatgaaaggctggccgaggtgaacaccaagctgctggtggagaagcagcagagccgcagcctcttcaccaccctgaccaccaggcctgtgatggagcccccctgtgtgggcaacctgaacaacagcctggacctgaacaggaagctgatcccccgggagaacctggtgatcagcaccagcaacccccgggccagcaacaacagcatggagaactacctgagcaagatgcagcaggagctggagaagaacatcacccgggagctgaaggaggccgctgctgagctggagagcggcagcatcgccagccccctgggcagcacagatgagagcaacctgaaccaggacctggtgtggaaggccagccgggagtatgtgcaggtgctgaagaagaactacatgatctag

SEQ ID NO: 183163 - DNA, 5133 bp, Artificial Sequence
  derived and/or modified sequence
atgaagaagatcttcagcaagaagggcgagagccccctgggcagctttgctagacgtcagcgcagcagtgccggcggtgggggcgaacctggagaaggggcgtacagtcagcccggctaccacgttagagacagggatctgggcaagatccacaaggcagcatccgctggaaacgtggctaaggtccagcagatcctgcttctgcgaaagaacggcctgaatgacagggataagatgaacaggactgccctgcatctcgcttgtgccaacggacaccccgaagtggtcacactcttagtggaccgcaaatgccagctaaatgtttgtgataacgagaaccgcaccgccctgatgaaagctgtacagtgtcaggaggagaaatgtgctacaatattactggagcacggagcagacccaaacctggcagatgtgcatgggaacaccgccctccactatgctgtctacaatgaggatattagtgtggcaactaaactactattgtacgatgccaacattgaggctaaaaacaaagatgaccttactcccctgctgttggcggttagtggaaaaaagcagcagatggttgagttcttaattaagaaaaaagctaatgtcaatgcggtcgataagctcgagagcagccaccaacttatcagtgaatacaaagaagagcgcatccctaagcatagcagccagaattctaatagtgtggacgaatcatctgaagattcactgtcccgcctgagtggaaagccaggggtcgacgattcgtggccaactagcgacgatgaagacctgaatttcgatacaaaaaacgtgccaaagcccagcctggcaaaacttatgaccgctagccagcagagccgtaaaaaccttgaggccacctacggcactgtgcgcacaggaaacagaacccttttcgaagatagagacagtgactctcaagacgaagtggttgtggaaagccttcctaccacttcaatcaaagtgcagtgcttctcccacccgacctatcagtcccccgatctgctgccgaagccttcacacaagagtcttgctaacccaggtttgatgaaagaggagcctacaaagcctggtattgccaaaaaggaaaatggcattgacatcatcgagtctgccccacttgagcagaccaacaacgataacctgacatacgtcgatgaggtacacaagaacaatagatctgatatgatgtcagctctcggcctgggccaggaagaagatatcgagtctccttgggacagcgagtcaattagtgaaaactttcctcagaagtatgtggacccactggctggcgcagccgacggcaaggagaagaacattggcaatgaacaggcagaagatgtgttctacataccgagttgtatgagcgggagtcggaattttaaaatggccaaactggaggacacccgcaacgttgggatgcccgtagcacacatggagtctccagaaaggtatttacacctgaagccgactattgagatgaaggactccgttccgaataaagccggaggtatgaaggacgtgcagacctcaaaggctgccgaacacgacctggaagtggcttctgaagaggaacaggagcgtgaagggtcagaaaataaccagccgcaggttgaggaggaacgcaaaaagcaccgtaacaatgaaatggaggtgtctgccaacatccacgatggggcaactgatgacgcagaggatgatgatgatgatgacggcctcatccagaaacgcaagtcaggggagacagaccatcagcagttccctcggaaggaaaacaaggaatacgcaagctctggacctgccctccagatgaaggaggtcaagagtacggagaaagagaaaagaaccagcaaggagagtgtgaattccccagtgtttggtaaggcctcgctgttgaccggaggtcttttgcaggtggatgatgactccagcttgtctgaaatcgatgaggatgaggggcggcctaccaaaaaaacgtcaaatgagaagaataaggtcaagaatcagatccaaagcatggacgatgtggacgacctgactcagtccagcgaaacagcctctgaagactgtgaacttccccactcaagctacaaaaacttcatgctcctgatcgagcagctcggcatggaatgtaaggacagcgtgagccttctgaaaattcaagacgctgctctgtcttgcgagagactactggaactcaagaaaaaccattgtgagcttctcaccgtgaaaatcaaaaagatggaagacaaagtcaacgtgctgcaaagggaattatcagaaaccaaggagattaagtcccagttggagcatcaaaaggtggaatgggagcgagaattgtgcagtctccgcttcagcctgaaccaagaagaggagaagagaagaaatgccgataccctgtatgagaaaatccgagaacagctgaggaggaaggaggagcaatacaggaaggaagtcgaggtcaagcagcagctggagttgtcgctgcaaactctcgaaatggagctcaggaccgtaaaaagtaacctgaatcaagtggtccaggagcgaaatgatgctcagaggcagttatcacgcgagcagaatgctcgtatgctccaggatggcatcctgacaaatcatctctctaagcagaaggagatcgaaatggcccagaagaaaatgaactctgagaactcgcactctcatgaggaggagaaggatctcagccataagaattcaatgctgcaggaagaaatcgctatgctgagattggagatagatactatcaagaaccagaaccaagagaaagagaaaaagtgctttgaagatttgaaaattgtgaaagagaaaaacgaagatctgcaaaagacgatcaagcaaaatgaagagacacttacccaaacaatctcccagtataacgggcgcctgtcagtccttaccgccgagaacgccatgcttaactctaaactagagaatgaaaaacagtctaaggagcggcttgaagcggaggttgaatcctatcatagtaggctcgccgctgccatccatgatcgcgaccaatccgaaaccagtaaacgggaactggagctggcttttcaacgtgcaagagacgagtgcagtcgactccaagacaagatgaactttgacgtcagtaaccttaaagataacaatgagatcttaagtcagcagctcttcaaaactgagtcaaagttaaatagtctggaaatcgaatttcatcatactagagacgctctccgggagaagaccctgggcttagagagagtccagaaggatctcagtcagacacagtgccagatgaaggagatggagcagaaatatcagaatgagcaggtcaaggtgaacaaatacattgggaagcaggagtcagtggaagagcgcctgtctcagctccagagtgaaaatatgctcctccggcagcagttggacgacgcacataacaaagcggataataaggaaaagaccgtgattaacatccaggatcagtttcatgcgatcgtacagaagctgcaggcggagtctgaaaagcagtcgctgctattggaggaacgaaacaaggagcttatttctgaatgcaatcacttgaaggagcggcaatatcagtacgagaatgagaaggccgaaagggaagtggtcgtccgacagctgcagcaggagctggccgatacattaaagaaacagtcaatgagcgaggctagcttggaagttactagtcggtaccgcataaacttggaggatgagacacaggatttgaagaagaaactgggccagatcaggaatcagcttcaggaagcacaggaccggcacactgaggcagtgagatgcgcggagaagatgcaggaccataaacagaagctagaaaaggacaatgccaagctcaaagtgacagttaagaaacagatggataagattgaggagttacagaaaaacctgctgaacgccaacctcagtgaggacgagaaagaacagctgaaaaaattaatggagctgaagcagagcttggaatgtaacctggatcaggaaatgaagaaaaacgtggagctggaacgcgaaatcacaggctttaaaaatcttttgaagatgactcggaagaaacttaacgagtacgaaaacggggagtttagctttcacggcgatctgaaaaccagccaatttgagatggacatccaaataaacaagctcaaacataagatcgatgatctcactgcagagctcgagaccgctgggtcaaaatgcttacatctggacacaaagaaccagattctccaggaagagttactttcaatgaagacagttcagaaaaagtgcgagaagttacagaagaacaaaaagaagcttgagcaggaggtgattaatctgagatctcatatcgaaaggaacatggtcgaactgggacaggtgaaacagtacaaacaggagatcgaggagcgggcgaggcaggaaatcgctgagaagctgaaagaagtgaacctgttcctccaagctcaggcagccagccaggagaatttagaacagtttcgagaaaataatttcgcctcgatgaaatcacagatggagctgagaataaaggatctcgaatccgagttaagtaaaattaagacctcccaagaggattttaataagactgagttggagaaatacaagcagctgtatcttgaggaattaaaagttaggaaatcactgagcagcaagctcactaaaacaaacgaaagattggccgaagttaataccaaactgttagttgagaaacaacagtctaggagcctgtttactaccctgacaacgaggcctgtcatggagccaccatgtgtcggaaatctgaacaactcacttgatttaaacaggaaactgatccctcgagagaacctagtgatatcaacctctaatcctagggcctcaaacaacagcatggaaaactatctctctaagatgcagcaggagctggagaaaaacattactcgggagctgaaagaggccgccgctgagttggagagtggttcgatagcctccccactggggtctactgacgaaagcaacctgaaccaggacctggtatggaaagcctcaagagagtatgtgcaagtcttgaagaagaactacatgatatag

SEQ ID NO: 183164 - DNA, 6591 bp, Artificial Sequence
  derived and/or modified sequence
gtctagcgggatcgcttgcttggtaacccggagggagagattggaaaccgcggagtttcctttgggaggctgcggccagccggggctgacttgttatgttgggctccggaggccgttaagagccgagagagacatgaggtgtctctgaagcccggtcgcctgggccatgaagaagatttttagtaagaagggcgagtcgcccttgggctccttcgcgcggcggcagaggagcagcgcgggaggcgggggcgagccgggggagggcgcctactcgcagcccggctaccacgtccgagaccgagatctcggcaagatccacaaagctgccagcgcgggtaatgtggcgaaagtgcagcagatccttttgctcaggaagaatggcttgaacgatagagacaagatgaacaggacggctctacatttggcctgtgccaatggtcatccagaagtagtaactctcctggtggacagaaaatgccagctcaatgtctgtgacaacgaaaacaggacagctctgatgaaggctgtacaatgccaggaagagaaatgtgcaactattctgctagaacatggtgctgatccaaatcttgcggatgtccatggcaacactgctcttcactatgctgtctataatgaggacatatcagtagcaacaaagctgcttttgtatgatgcaaatattgaagcaaaaaacaaggatgacctcacaccacttttacttgcagtaagtggaaaaaagcagcaaatggtggaatttttaataaagaaaaaagcaaatgtaaatgcagtagataagttggaaagcagtcaccaactaatttcagaatataaagaagaaaggatacctaaacattcttctcaaaatagtaattcagtggatgaaagctctgaagactccttaagcaggctttctggcaaaccgggtgttgatgattcatggcctacctcagatgacgaagacctcaattttgatactaagaatgtcccaaaaccaagcttagcaaagctaatgactgcttctcagcaatccaggaaaaatttagaagcaacatatggcactgtgagaacaggaaatagaactttgtttgaggatagagattccgatagtcaagatgaagttgtggttgaaagccttcctacaacatcaatcaaagtccagtgcttttctcatcctacctatcaatcacctgaccttcttccaaaaccttcccacaagtcgttagcaaaccctggtcttatgaaggaagaaccaacaaagccaggcattgcaaaaaaagaaaatggtattgatattattgaaagtgctccactagagcaaacaaataatgacaatttgacttatgttgatgaagtgcacaaaaataatagaagtgatatgatgtccgcattaggattaggacaagaggaagatatagaatcaccttgggattctgagagtatctctgagaattttccacagaagtatgttgatcctttagctggggctgcagacggaaaagaaaaaaatataggaaatgaacaagcagaagatgtgttttatataccttcttgcatgagtggatcaagaaactttaagatggctaaactagaggatacaagaaatgtaggcatgccagtagcccacatggagtctcctgagagatatcttcacttgaagcctaccattgaaatgaaagattctgttccaaataaagcaggaggaatgaaggatgtacaaacatccaaagcagctgaacatgacttagaagtagcatcagaagaagagcaagaaagggaagggagtgaaaataaccagccacaggttgaagaagaaaggaaaaaacacagaaataatgaaatggaagtatcagcaaacatacatgatggtgctactgatgatgctgaagatgatgatgatgatgatggattaattcaaaaaagaaagagtggagaaactgatcatcagcaatttcccaggaaggaaaataaagagtatgctagtagtggtcctgccttgcaaatgaaggaagtaaagagcactgaaaaagaaaaacggacctcgaaagaatctgtgaattcaccagtgtttgggaaggccagtttactaactggtggcctgctacaagtggatgatgacagcagtttaagtgaaatagatgaggatgaaggaaggcctactaagaaaacatctaatgaaaagaacaaggtcaaaaaccaaatacagtctatggatgatgttgatgacttaactcagtcatctgaaacagcctcagaggattgtgagctaccccactctagttacaagaattttatgttgctcattgaacaacttggaatggagtgtaaagattctgttagcctattgaaaatccaggatgcagctctttcatgtgaaagattattagaacttaaaaaaaatcactgtgaactacttacagtaaaaattaaaaaaatggaagacaaggttaatgtactacaaagggagctatctgaaacaaaagaaataaaatcacagttagagcatcaaaaagttgaatgggaacgagaactgtgctctttgagatttagcttaaaccaagaagaagagaagagaagaaatgctgatacgttgtatgaaaaaattagggaacagttaagaagaaaagaagagcaatataggaaagaagttgaagtgaaacaacagcttgaactgagtctccaaacactggagatggaattgaggactgtaaaaagtaatttgaatcaggtcgttcaagagcgaaatgacgctcagaggcaactttctcgagaacagaatgccagaatgttacaagatggaattctgaccaatcacctttccaaacaaaaggagattgaaatggctcaaaagaaaatgaattctgagaattctcatagtcatgaagaagaaaaagacctatcgcataaaaatagcatgttgcaggaagaaattgctatgctaagactagaaatagacacaataaaaaatcaaaaccaggaaaaagaaaagaaatgttttgaggaccttaaaattgtaaaagaaaagaatgaagaccttcagaagactataaaacagaatgaggaaacattaacacaaacaatatcccagtataatggacggcttagtgttctgacagctgagaatgcaatgctaaattctaaactggagaatgaaaagcaaagcaaggaaagactggaagcagaagttgaatcataccattctagattggctgctgctatacatgatcgtgatcaaagtgagacatcaaaaagagaactagaacttgctttccagagagcaagagatgaatgttctcgtttacaggacaaaatgaattttgatgtgtctaacctaaaagataacaatgagattctttctcaacaactatttaaaactgaaagtaaactcaatagcctagaaattgagttccatcacacgagagatgccctcagagaaaagactttgggtttagaacgggtacaaaaggacctaagccaaacacagtgtcaaatgaaggaaatggaacaaaagtatcaaaatgaacaagttaaagtgaataaatacattggaaagcaggagtctgtagaggagagattgtctcaactacaaagtgagaatatgttgcttcgacaacaactggatgatgcccacaacaaggctgacaataaagagaagacagtgattaatatccaagaccagtttcatgctattgtgcaaaaacttcaagctgagagtgaaaagcaaagtcttctgctagaagaaagaaataaggagttaatcagtgaatgtaatcacttaaaagaaagacagtatcaatatgaaaatgaaaaggcagaaagagaagttgttgtgagacaacttcaacaagaactagctgataccctaaaaaaacaatctatgtcagaggcttcactggaggttacgtcacgttatcgtattaatttagaagatgagacacaggatttaaagaagaaattaggtcaaatcagaaatcaattgcaagaagcacaggatcgacatacagaagctgtcagatgtgctgagaagatgcaagatcacaagcaaaagcttgaaaaagataatgccaagttaaaagttacagtcaaaaagcaaatggacaaaattgaggagcttcagaaaaacctgttaaatgcaaatttgtctgaagatgaaaaggaacaattaaagaaacttatggaattaaaacagtcactggaatgtaatttggatcaagaaatgaagaaaaatgttgaattagaaagagagataactggatttaagaacctcttaaaaatgacaagaaagaagttaaatgaatatgaaaatggagaatttagtttccatggagatttaaaaactagtcaatttgaaatggatattcagattaataagctaaaacataagattgatgatcttacagcagaactggagactgcaggttcaaaatgtctacatctggatacaaagaaccaaattcttcaagaggagttgttatctatgaaaacagtacaaaagaaatgtgaaaaactacagaagaataaaaagaagttggaacaagaagtgatcaacctgagaagtcatatagaaaggaatatggtagaacttggtcaagtcaaacagtataaacaggagattgaagaaagagcaagacaggaaatagcagaaaaattaaaagaagtcaatctatttttacaggcacaagcagcatctcaagaaaacttagagcagtttagagagaataattttgcttcaatgaaaagtcagatggaactcagaattaaagatctggaatctgaactctccaaaataaaaacttctcaagaagactttaataaaaccgaactggaaaaatataagcaactctatctagaagaattaaaagttagaaaatctttgtcaagtaaactaaccaaaactaatgagaggctagcagaggtcaacaccaaacttcttgtggaaaaacagcagagcagatctttgttcaccactctcactaccaggccagtcatggagccaccttgtgtgggaaatcttaataatagtttagatctcaacagaaaacttattccaagagaaaacttagtgatctctacctcaaatccacgggcttcaaataatagcatggagaactacttgagcaagatgcagcaggagttggaaaaaaatataactagagaactcaaagaagctgctgctgaattggaatctggatcaatagcttcccctctagggtctactgatgagtcaaatctaaatcaagatctagtttggaaagcatcaagagaatatgtacaggttttaaagaaaaattatatgatctgaaagataagattttattactgggctgtttatgtgacattttgtttctcattaaatattaatatatgacatgtaaaaatattaaaggaacgtatttttgtatcatatatgtcagatcaaaatttatatagtattttaaacaatgttacttggcttctttaacttttaagtggattttgccaatgaaaaccaggaatattgagttttacatactcaaactgcccaaatgtgagctgtttaaacagccaaaccactaagttgtcattaatactttagtgcagttaattgatggcttatttgtattttgtaatttttatcactatatgtagtggtagatgtctaattggacttagacatcattttgttgtgcaggaactgtggtcattgttcatgtttggatgtattacaattgttacagtgccatcaaatttacataattttaattttaagcactgatttatatagctgttctcagggagaaacaagatttgcctgattcaccttttctgtttgtttatttatttttaattaaccttttggaaatagccttcagtttagagaaaatttcgaagttttagtacaaagactttctcctccgaacaatttgagagtaaattgctgacattatgtcatcacccctgattactttagtgggcattcctacaagtcaggacattctacataactacagtgcaaaccttgcaatcagaaagtcaacattaatacattctagtttgttacttctctgtaatgtcctttatagcaaaaggatcccattctaatccatggcttgtatttagttgttgtatctgttagatctttcagtctggaacagttcctcagtctttccttgaccttcatgaccttgaatattttgaagagtaaagtctggtaatataagaatgtccctcaattgggtttcatggtgattagatttagattatatgattttttggcaggagtatcacagaagtgacccagtgatcttctcattgcatcttacctgtgaccctacagttttgatttgccctgttactggtaatgttagcattgatcactaacagtggtatctgctgaatttctcctctgtaatgttattttttcaccttgtggttaattagtattttacagggaggtaatttgagactatgtacatatctctactccccatcgaaccctcaatttattcatttgcttgtatcaaataaaccatggattcatggtttattttattcagtgagttataattcattaatattgttattaaaaatttgtttttcttttaagaaatgtta

SEQ ID NO: 183165 - DNA, 5132 bp, Artificial Sequence
  derived and/or modified sequence
atgaagaaaatattcagcaaaaagggtgagagccctcttggcagttttgcccgaagacagcggtcctccgctggagggggtggcgagccaggcgagggggcatatagtcagcccggttatcacgtgcgcgaccgagacctggggaaaatccataaggccgcttccgccggaaacgtagctaaggtccagcagatcttactccttcggaagaatggcctcaacgatcgagacaagatgaatcgaacggccctccatctagcttgcgccaacgggcacccggaggtagttactttgttggttgaccgtaagtgccagctgaacgtctgtgataatgagaatcgcaccgcgttgatgaaagccgtgcagtgtcaggaagagaagtgtgcgactatactgttggaacatggggctgaccccaacctggccgatgtgcacggcaataccgcattgcactacgcggtctacaacgaagatatatccgttgcaactaaacttctcttgtacgacgccaatatcgaggctaagaataaggacgaccttaccccgctcttgctggcagtctcgggtaagaagcagcagatggtggagttcctgatcaagaaaaaagcaaatgtaaacgccgtcgataaacttgaaagcagccaccagctgataagtgaatacaaagaggaacgcataccaaaacactcaagtcaaaattctaacagcgtggacgaatccagtgaagattctctatcccgcctctcaggcaaacctggcgttgacgacagttggcctacttcagatgacgaggatctgaactttgacacgaaaaacgtgcccaagccttctctggcgaagttaatgacagcctcccagcagtctcggaagaacctggaggctacctatggaacagttcgaaccggaaaccggaccctctttgaggatagagattctgatagccaagacgaagtggtggtagagagcttaccaaccacctccattaaggtgcagtgttttagtcatcccacgtatcagtctccagatctgcttcctaaacccagccacaagtccctggccaacccaggattgatgaaggaagagccaaccaagcccggaattgctaaaaaggaaaatggaatcgatattatagaaagcgcgccattagaacagacaaataatgacaatctgacatacgttgacgaggtccataaaaataacagatctgatatgatgtccgcgctgggacttggacaagaggaggatatcgaaagcccatgggactctgaatcaattagtgaaaacttccctcaaaaatatgtggatcccttagccggagccgcagatggtaaagagaaaaatattggcaacgagcaggcggaggacgtgttctatatcccttcctgcatgagcgggtccaggaattttaagatggccaaactggaagacacaaggaacgtgggaatgcccgttgcacatatggagtccccggagaggtacctgcacctgaagccgactatcgagatgaaggactcggtgcctaataaggctgggggaatgaaagatgtgcagacttccaaagcagccgaacatgacctggaggtggcttcagaggaagagcaagagcgcgaggggtctgagaacaaccagccacaggtggaggaagaaaggaagaaacatcggaacaacgagatggaagtgagcgctaacatccacgacggggctacagacgacgccgaggacgacgacgatgacgatggcctcatccagaaacggaagtctggagaaaccgaccatcagcagttcccgagaaaggagaacaaagaatatgccagctcgggccctgccctccagatgaaggaagtgaagtcaactgagaaagagaaacggacctctaaggaaagcgtgaattcgcctgtgttcggcaaggcctccctgctcacgggaggactgctgcaggtagacgatgattcctcactgtccgaaatcgatgaagacgagggcaggccaactaagaagacgagcaacgagaagaataaggttaaaaaccagatccagagtatggacgacgtcgatgatctaacacagagctctgaaacagcctccgaagattgcgaactcccccactctagttataagaatttcatgcttcttatagagcagttggggatggaatgcaaggactccgtgagcctcctgaaaatccaagacgctgccctctcatgtgagcgcctcctcgaactaaagaagaaccactgtgagctactgacagtcaagatcaaaaagatggaagataaagtgaatgtgctccaacgcgagctgagcgagaccaaagagataaagtctcagctggaacaccagaaagtggaatgggagcgagagctttgtagcttgcgttttagccttaaccaggaggaagagaagaggaggaacgcagacactctctatgagaagattcgtgagcagctgcgacggaaggaggaacagtataggaaggaggtcgaggtaaaacagcagctggaattatccctgcagaccctggaaatggaactgcgcaccgtgaagagtaacctaaatcaggttgtgcaggagcgaaatgacgcccagcgccagctcagccgggagcagaacgctagaatgctgcaggacggtatactcaccaatcatctgtcaaagcagaaagagattgagatggcccagaaaaagatgaactccgagaacagtcactcccacgaggaagaaaaggatctctctcataaaaactccatgctccaagaagaaatagctatgttacggctggaaatcgatactatcaaaaatcagaatcaggagaaggagaaaaaatgcttcgaggacctgaaaatcgttaaggagaagaacgaagacttgcagaaaaccatcaaacagaacgaagagacactgactcagaccattagccagtacaatggcagactcagtgtgttgacggccgagaacgctatgctgaatagtaagctagaaaacgaaaaacagagtaaagagcgcctggaggctgaggtggagagttaccatagcaggctggcggctgcaatccatgatcgcgatcagtcagaaacatccaagagggagctcgaactggccttccagcgcgctagagacgagtgctcaaggctgcaggataagatgaatttcgatgtgtccaatctgaaggataataacgagattctatctcagcagctgttcaagaccgagtccaagctcaacagtctggagatcgagttccaccacacacgcgacgcacttagagagaagaccctgggactcgagcgtgttcagaaggacctgagccagacacagtgtcagatgaaggaaatggaacagaaataccaaaatgagcaggtcaaagtcaacaaatacattgggaagcaagagtccgttgaggagcgcctgtcccagctgcagtccgagaatatgctcttaaggcagcaattggatgatgcacacaacaaggctgataataaggagaaaaccgtcataaacatacaggaccaatttcatgctatcgtacagaagttacaagccgaaagcgagaaacagtccctgctgcttgaggagcgcaataaggagctcatctcagagtgcaaccacctgaaggaacggcagtaccagtatgaaaacgagaaggccgaacgcgaagtagttgtgcggcagctccagcaggagctcgccgacaccctgaagaagcaatcaatgagcgaggcctccctggaggtaacatctcggtacagaataaatctggaggacgagactcaggacctaaagaagaagctggggcagattagaaaccagctacaggaggcgcaggaccgccatacagaagctgtccgctgcgccgaaaaaatgcaagaccacaagcagaaattagaaaaggataatgccaagttaaaagtaacggtaaagaagcagatggataagatagaggaactgcagaaaaacctgctcaacgccaatctgtccgaggatgaaaaagaacaattgaaaaaactgatggaactgaagcagtccctggagtgtaatttggatcaagagatgaagaagaacgtggaacttgagagagagatcaccggctttaagaacctattaaagatgaccagaaagaaattgaatgagtatgaaaatggcgagttcagctttcatggcgatctcaaaacttcccagtttgagatggacatccagatcaataaattgaagcataaaattgatgacctgaccgccgagcttgagaccgcagggtccaagtgcctgcatctggacaccaaaaaccagattttgcaggaggagctgttgtctatgaagacagtccagaagaagtgcgaaaaacttcaaaagaataagaaaaaattggagcaggaagtcattaatctgagaagccacatcgagcgcaatatggtggagctagggcaggtgaagcagtataaacaagaaattgaggaacgggctcgccaggagattgctgaaaagcttaaggaagtaaaccttttcctgcaggcccaggctgcctcccaggagaatctggagcagtttcgcgaaaacaatttcgcatccatgaagtcccagatggagttgcgcattaaggacttagagtcagagttgagcaagataaaaacatcccaggaggacttcaacaagaccgagctcgaaaaatataagcagttgtacctggaagagctgaaggtccggaaaagcttgagctctaaactcacaaagaccaacgagcggctggccgaagtgaacacaaagttattggtcgagaagcagcagtcaaggagcctcttcaccacactgaccacccgacccgtgatggagcccccatgcgtggggaacctgaacaattcgttggacctgaaccgtaagctgattcctcgagagaatctggtgatcagcacgtctaatcctcgggcatcgaataacagtatggagaattatctttccaagatgcagcaagagctagaaaagaatattactcgtgagctgaaagaagccgcagcagagctcgagagcgggagcattgccagtccactcggcagcaccgacgaaagcaacctgaaccaggatctggtgtggaaagccagccgggaatatgtgcaggtactcaagaagaactacatgatcta

SEQ ID NO: 183166 - DNA, 5133 bp, Artificial Sequence
  derived and/or modified sequence
atgaagaagatcttcagcaagaagggcgagagccccctgggcagcttcgccagaagacagagaagcagcgccggcggcggcggcgagcccggcgagggcgcctacagccagcccggctaccacgtgagagacagagacctgggcaagatccacaaggccgccagcgccggcaacgtggccaaggtgcagcagatcctgctgctgagaaagaacggcctgaacgacagagacaagatgaacagaaccgccctgcacctggcctgcgccaacggccaccccgaggtggtgaccctgctggtggacagaaagtgccagctgaacgtgtgcgacaacgagaacagaaccgccctgatgaaggccgtgcagtgccaggaggagaagtgcgccaccatcctgctggagcacggcgccgaccccaacctggccgacgtgcacggcaacaccgccctgcactacgccgtgtacaacgaggacatcagcgtggccaccaagctgctgctgtacgacgccaacatcgaggccaagaacaaggacgacctgacccccctgctgctggccgtgagcggcaagaagcagcagatggtggagttcctgatcaagaagaaggccaacgtgaacgccgtggacaagctggagagcagccaccagctgatcagcgagtacaaggaggagagaatccccaagcacagcagccagaacagcaacagcgtggacgagagcagcgaggacagcctgagcagactgagcggcaagcccggcgtggacgacagctggcccaccagcgacgacgaggacctgaacttcgacaccaagaacgtgcccaagcccagcctggccaagctgatgaccgccagccagcagagcagaaagaacctggaggccacctacggcaccgtgagaaccggcaacagaaccctgttcgaggacagagacagcgacagccaggacgaggtggtggtggagagcctgcccaccaccagcatcaaggtgcagtgcttcagccaccccacctaccagagccccgacctgctgcccaagcccagccacaagagcctggccaaccccggcctgatgaaggaggagcccaccaagcccggcatcgccaagaaggagaacggcatcgacatcatcgagagcgcccccctggagcagaccaacaacgacaacctgacctacgtggacgaggtgcacaagaacaacagaagcgacatgatgagcgccctgggcctgggccaggaggaggacatcgagagcccctgggacagcgagagcatcagcgagaacttcccccagaagtacgtggaccccctggccggcgccgccgacggcaaggagaagaacatcggcaacgagcaggccgaggacgtgttctacatccccagctgcatgagcggcagcagaaacttcaagatggccaagctggaggacaccagaaacgtgggcatgcccgtggcccacatggagagccccgagagatacctgcacctgaagcccaccatcgagatgaaggacagcgtgcccaacaaggccggcggcatgaaggacgtgcagaccagcaaggccgccgagcacgacctggaggtggccagcgaggaggagcaggagagagagggcagcgagaacaaccagccccaggtggaggaggagagaaagaagcacagaaacaacgagatggaggtgagcgccaacatccacgacggcgccaccgacgacgccgaggacgacgacgacgacgacggcctgatccagaagagaaagagcggcgagaccgaccaccagcagttccccagaaaggagaacaaggagtacgccagcagcggccccgccctgcagatgaaggaggtgaagagcaccgagaaggagaagagaaccagcaaggagagcgtgaacagccccgtgttcggcaaggccagcctgctgaccggcggcctgctgcaggtggacgacgacagcagcctgagcgagatcgacgaggacgagggcagacccaccaagaagaccagcaacgagaagaacaaggtgaagaaccagatccagagcatggacgacgtggacgacctgacccagagcagcgagaccgccagcgaggactgcgagctgccccacagcagctacaagaacttcatgctgctgatcgagcagctgggcatggagtgcaaggacagcgtgagcctgctgaagatccaggacgccgccctgagctgcgagagactgctggagctgaagaagaaccactgcgagctgctgaccgtgaagatcaagaagatggaggacaaggtgaacgtgctgcagagagagctgagcgagaccaaggagatcaagagccagctggagcaccagaaggtggagtgggagagagagctgtgcagcctgagattcagcctgaaccaggaggaggagaagagaagaaacgccgacaccctgtacgagaagatcagagagcagctgagaagaaaggaggagcagtacagaaaggaggtggaggtgaagcagcagctggagctgagcctgcagaccctggagatggagctgagaaccgtgaagagcaacctgaaccaggtggtgcaggagagaaacgacgcccagagacagctgagcagagagcagaacgccagaatgctgcaggacggcatcctgaccaaccacctgagcaagcagaaggagatcgagatggcccagaagaagatgaacagcgagaacagccacagccacgaggaggagaaggacctgagccacaagaacagcatgctgcaggaggagatcgccatgctgagactggagatcgacaccatcaagaaccagaaccaggagaaggagaagaagtgcttcgaggacctgaagatcgtgaaggagaagaacgaggacctgcagaagaccatcaagcagaacgaggagaccctgacccagaccatcagccagtacaacggcagactgagcgtgctgaccgccgagaacgccatgctgaacagcaagctggagaacgagaagcagagcaaggagagactggaggccgaggtggagagctaccacagcagactggccgccgccatccacgacagagaccagagcgagaccagcaagagagagctggagctggccttccagagagccagagacgagtgcagcagactgcaggacaagatgaacttcgacgtgagcaacctgaaggacaacaacgagatcctgagccagcagctgttcaagaccgagagcaagctgaacagcctggagatcgagttccaccacaccagagacgccctgagagagaagaccctgggcctggagagagtgcagaaggacctgagccagacccagtgccagatgaaggagatggagcagaagtaccagaacgagcaggtgaaggtgaacaagtacatcggcaagcaggagagcgtggaggagagactgagccagctgcagagcgagaacatgctgctgagacagcagctggacgacgcccacaacaaggccgacaacaaggagaagaccgtgatcaacatccaggaccagttccacgccatcgtgcagaagctgcaggccgagagcgagaagcagagcctgctgctggaggagagaaacaaggagctgatcagcgagtgcaaccacctgaaggagagacagtaccagtacgagaacgagaaggccgagagagaggtggtggtgagacagctgcagcaggagctggccgacaccctgaagaagcagagcatgagcgaggccagcctggaggtgaccagcagatacagaatcaacctggaggacgagacccaggacctgaagaagaagctgggccagatcagaaaccagctgcaggaggcccaggacagacacaccgaggccgtgagatgcgccgagaagatgcaggaccacaagcagaagctggagaaggacaacgccaagctgaaggtgaccgtgaagaagcagatggacaagatcgaggagctgcagaagaacctgctgaacgccaacctgagcgaggacgagaaggagcagctgaagaagctgatggagctgaagcagagcctggagtgcaacctggaccaggagatgaagaagaacgtggagctggagagagagatcaccggcttcaagaacctgctgaagatgaccagaaagaagctgaacgagtacgagaacggcgagttcagcttccacggcgacctgaagaccagccagttcgagatggacatccagatcaacaagctgaagcacaagatcgacgacctgaccgccgagctggagaccgccggcagcaagtgcctgcacctggacaccaagaaccagatcctgcaggaggagctgctgagcatgaagaccgtgcagaagaagtgcgagaagctgcagaagaacaagaagaagctggagcaggaggtgatcaacctgagaagccacatcgagagaaacatggtggagctgggccaggtgaagcagtacaagcaggagatcgaggagagagccagacaggagatcgccgagaagctgaaggaggtgaacctgttcctgcaggcccaggccgccagccaggagaacctggagcagttcagagagaacaacttcgccagcatgaagagccagatggagctgagaatcaaggacctggagagcgagctgagcaagatcaagaccagccaggaggacttcaacaagaccgagctggagaagtacaagcagctgtacctggaggagctgaaggtgagaaagagcctgagcagcaagctgaccaagaccaacgagagactggccgaggtgaacaccaagctgctggtggagaagcagcagagcagaagcctgttcaccaccctgaccaccagacccgtgatggagcccccctgcgtgggcaacctgaacaacagcctggacctgaacagaaagctgatccccagagagaacctggtgatcagcaccagcaaccccagagccagcaacaacagcatggagaactacctgagcaagatgcagcaggagctggagaagaacatcaccagagagctgaaggaggccgccgccgagctggagagcggcagcatcgccagccccctgggcagcaccgacgagagcaacctgaaccaggacctggtgtggaaggccagcagagagtacgtgcaggtgctgaagaagaactacatgatctag

SEQ ID NO: 183167 - protein, 1503 aa, Artificial Sequence
  derived and/or modified sequence
MPGPPALRRRLLLLLLVLLIAGSAGAAPLPQTGAGEAPPAAEVSSSFVILCVCSLIILIVLIANCVSCCKDPEIDFKEFEDNFDDEIDFTPPAEDTPSVQSPAEVFTLSVPNISLPAPSQFQPSVEGLKSQVARHSLNYIQEIGNGWFGKVLLGEIYTGTSVARVIVKELKASANPKEQDTFLKNGEPYYILQHPNILQCVGQCVEAIPYLLVFEFCDLGDLKAYLRSEQEHMRGDSQTMLLQRMACEVAAGLAAMHKLHFLHSDLALRNCFLTSDLNVKVGDYGIGFSRYKEDYIETDDKKVFPLRWTAPELVTSFQDRLLTADQTKYSNIWSLGVTLWELFDNAAQPYSNLSNLDVLNQVIRERDTKLPKPQLEQPYSDRWYEVLQFCWLSPEKRPAAEDVHRLLTYLRLQSQRDSEVDFEQQWNALKPNTNSRDSSNNAAFPILDHFARDRLGREMEEVLTVTETSQGLSFEYVWEAAKHDHFDERSRGHLDEGLSYTSIFYPVEVFESSLSDPGPGKQDDSGQDVPLRVPGVVPVFDAHNLSVGSDYYIQLEEKSGSNLELDYPPALLTTDMDNPERTGPELSQLTALRSVELEESSTDEDFFQSSTDPKDSSLPGDLHVTSGPESPFNNIFNDVDKSEDLPSHQKIFDLMELNGVQADFKPATLSSSLDNPKESVITGHFEKEKPRKIFDSEPLCLSDNLMHQDNFDPLNVQELSENFLFLQEKNLLKGSLSSKEHINDLQTELKNAGFTEAMLETSCRNSLDTELQFAENKPGLSLLQENVSTKGDDTDVMLTGDTLSTSLQSSPEVQVPPTSFETEETPRRVPPDSLPTQGETQPTCLDVIVPEDCLHQDISPDAVTVPVEILSTDARTHSLDNRSQDSPGESEETLRLTESDSVLADDILASRVSVGSSLPELGQELHNKPFSEDHHSHRRLEKNLEAVETLNQLNSKDAAKEAGLVSALSSDSTSQDSLLEDSLSAPFPASEPSLETPDSLESVDVHEALLDSLGSHTPQKLVPPDKPADSGYETENLESPEWTLHPAPEGTADSEPATTGDGGHSGLPPNPVIVISDAGDGHRGTEVTPETFTAGSQGSYRDSAYFSDNDSEPEKRSEEVPGTSPSALVLVQEQPLPEPVLPEQSPAAQDSCLEARKSQPDESCLSALHNSSDLELRATPEPAQTGVPQQVHPTEDEASSPWSVLNAELSSGDDFETQDDRPCTLASTGTNTNELLAYTNSALDKSLSSHSEGPKLKEPDIEGKYLGKLGVSGMLDLSEDGMDADEEDENSDDSDEDLRAFNLHSLSSESEDETEHPVPIILSNEDGRHLRSLLKPTAANAPDPLPEDWKKEKKAVTFFDDVTVYLFDQETPTKELGPCGGEACGPDLSGPAPASGSPYLSRCINSESSTDEEGGGFEWDDDFSPDPFMSKTTSNLLSSKPSLQTSKYFSPPPPARSTEQSWPHSAPYSRFSISPANIASFSLTHLTDSDIEQGGSSEDGEKD

SEQ ID NO: 183168 - DNA, 4512 bp, Artificial Sequence
  derived and/or modified sequence
atgccaggcccgccagctctgaggaggcgattgctgcttttgctacttgttctcctaattgccggcagcgccggagcagcaccgctaccgcagacaggagccggggaagctccccctgccgctgaagtgtcgagcagcttcgtcatcctctgcgtctgctctttgatcattctcattgttcttattgccaattgtgttagctgctgtaaggacccagagatcgatttcaaggagtttgaagacaattttgacgatgaaatcgactttacccctccagcggaggacactccatctgtgcagagccctgcagaggtttttacactaagcgtgccaaacatatctctcccagccccgagccagttccagccctccgtggaagggctgaaaagtcaggtagcacgacatagcctcaactatattcaggaaatcggaaatggttggtttggtaaagtgctccttggcgagatatacacaggaacttctgtggcccgtgtcatcgtgaaagaattaaaggccagcgcgaatccaaaggagcaagacactttccttaaaaatggcgaaccttactacattctgcagcatccaaacattcttcagtgtgttgggcaatgcgtggaagccataccttacctgctcgtgttcgagttctgtgacctaggagacctgaaggcttacctgcgtagtgaacaggagcatatgaggggcgacagtcagacaatgctcctgcagaggatggcatgcgaggtagccgcaggcctggctgcaatgcataagctgcatttcttgcactccgatctggcgctgcgaaattgctttcttacgtcagacctgaatgtgaaagtcggagactacggtatcggtttctcccgttacaaagaagattacatcgagaccgacgataagaaagttttcccacttcgctggacagccccagaactggtgactagcttccaagaccggctgctgacagcagaccaaacaaagtattccaatatctggagcctcggagtgaccctttgggaattattcgataatgcagcgcagccatactcaaaccttagtaaccttgatgtgctcaaccaagttattcgcgaaagagatactaaactgcccaaaccccagttggagcagccctattctgatagatggtacgaggtgctgcagttttgttggctttcgcctgaaaaaagaccggcagctgaggatgtacatcgactgctgacatatctgaggcttcagtctcagcgagatagcgaagtggacttcgagcagcagtggaacgccctgaaacccaacacaaatagccgggactcaagcaataacgctgcgttccctatccttgaccatttcgctagagatcgactggggagagagatggaggaagtgcttacggtgaccgaaacatctcagggtctttcttttgagtatgtctgggaggcagctaaacacgaccactttgatgagcggtcccgagggcacctggacgagggcctttcttacaccagcatcttttaccctgtggaggtcttcgaaagcagcctaagtgatcccggcccaggtaaacaggacgattccgggcaggatgtacccctgcgagtgcctggcgtggtacctgtgttcgatgcccacaacttgagtgtgggaagtgattattacattcagctggaggagaaatccggttctaacttagaacttgattatccacccgccctcctgacgactgacatggataacccagaacgaactggtcctgagcttagtcagctcaccgccttaagatctgtggagctggaagagtcctccactgatgaagacttctttcaatcttctacggaccccaaggactcctcccttcccggggacttacatgttaccagcggacccgaatccccgtttaacaacatctttaatgacgtggataaaagcgaggatcttccttcccaccagaaaattttcgatctcatggaacttaacggagtgcaagccgacttcaagccagcaacgttgtcaagtagcctagataatccaaaggaatctgttatcactggccactttgagaaagaaaagcctcggaaaatctttgactccgaacctctatgcctctcagataatctgatgcatcaggataacttcgacccgcttaatgtccaggagctcagcgagaattttctctttctgcaggaaaagaacctcctcaagggtagcctgtcctctaaggaacacatcaacgacctgcagaccgagctcaaaaatgccggctttaccgaagccatgttggagaccagctgtcgtaactcactagacactgagcttcagttcgctgaaaacaagccaggattgagcctgctccaggaaaatgtaagtaccaagggagacgacaccgatgttatgctgacgggagataccctgtccacatcgctgcagtcgtccccagaggtccaggtgcccccaacaagctttgagaccgaggagacaccacggcgggtgcccccggactccctgcctactcagggagagacccaaccaacttgtctcgacgttatagtacctgaggactgcctacaccaagacataagtcctgatgccgtaaccgttcccgtcgaaatcctctcgaccgatgccagaactcattcgctggacaaccggtcccaggattctcccggcgagtcagaggagactctgcggctgacagaatcagacagcgtcttggccgacgacattctggccagtcgcgtgagcgtgggaagctcgctccctgaactgggccaggagctgcacaacaaaccattcagcgaagaccaccactctcaccgtcggttagagaagaatctcgaggctgtcgaaacattgaaccaacttaattctaaggacgccgcgaaagaagctggtctcgttagcgcgctgtcctcagatagtaccagccaggattcgcttctagaggacagcctgtccgccccgttcccagcctcagagcccagccttgagacccctgattctctagagagcgttgacgtgcacgaggccctgctcgactcgctgggaagccacacacctcagaagcttgtgcctccagacaagccggctgactcaggctacgagacagaaaacctcgagtctccagagtggacgcttcatcccgcccccgagggtaccgccgactccgaaccagcaaccactggtgacggtggacactctgggctccccccgaatcccgtgattgtgatttccgatgccggcgacggtcacaggggcaccgaggtgaccccagagacctttacagctggctcacaggggtcctaccgagacagtgcctacttttctgataacgatagtgagcctgaaaagaggagcgaggaggtgcctggcacatcaccttctgccctggtccttgtgcaagagcaaccactgcccgagccggtgctgcccgagcagtcgcctgctgctcaggatagctgcctggaggcccggaaatctcagccagacgagtcctgcctgagcgcactgcacaacagtagtgacctggaactgagggctacgccagagccggcccaaacaggcgtccctcaacaggtacacccaactgaagatgaggcatcatccccctggtccgtactcaacgctgagttgtcatcaggggatgattttgagacacaagacgaccggccctgcactttagcgtccaccggaacgaataccaacgagctgctggcttacaccaactcagccttggacaagagtctctccagccattctgaaggtccaaaactgaaagaacccgatatcgagggaaaatatcttggaaaactcggggtctctggcatgttagacttaagcgaagatgggatggatgccgacgaggaggacgaaaattccgatgactctgatgaggacctgagagccttcaatttgcactctctgtccagtgaatcagaagatgagactgaacaccctgtgcccattatcctgtctaatgaggatggccgacacttgcggtcactgctcaagcctaccgctgcgaacgcccctgatccattgcctgaggactggaaaaaagagaaaaaggcagttacctttttcgacgacgtgactgtttacctttttgaccaggaaacacccacaaaggaattgggcccatgtggcggcgaggcctgtgggccagacttgtccggtcccgcgccagcatctggctctccatatttgtccagatgtatcaacagcgaatcatcgactgatgaggagggaggaggttttgagtgggacgatgacttctctcctgacccctttatgagcaaaaccacctccaaccttctgtcaagcaagccaagcttacagaccagtaagtacttttctccgcccccgcctgctcgatccaccgaacaaagttggccacacagcgctccctattccagattcagcatctcccctgccaacatcgcctcgttctcacttactcacctgacggattctgacattgaacagggcggcagttctgaagacggcgagaaggattag

SEQ ID NO: 183169 - DNA, 4512 bp, Artificial Sequence
  derived and/or modified sequence
atgcctggccccccagccctgcggcggcggctgctgctgctgctgctggtgctgctgattgctggcagcgctggggccgcccccctgccccagacaggagctggggaggcccccccagctgctgaggtgagcagcagctttgtgatcctgtgtgtgtgcagcctcatcatcctgattgtgctgattgccaactgtgtgtcctgctgcaaggaccctgagattgacttcaaggagtttgaggacaactttgatgatgaaattgacttcaccccacctgctgaggacacccccagcgtgcagagccctgctgaggtgttcaccctgtctgtgcccaacatcagcctgcctgcccccagccagttccagcccagcgtggagggcctgaagagccaggtggcccggcacagcctgaactacatccaggagattggaaatggctggtttgggaaggtgctgctgggggagatctacacaggcacctctgtggcccgggtcatcgtgaaggagctgaaggccagcgccaaccccaaggagcaggacaccttcctgaagaatggagagccctactacatcctgcagcaccccaacatcctgcagtgtgtgggccagtgtgtggaggccatcccctacctgctggtgtttgagttctgtgacctgggggacctgaaggcctacctgcggtctgagcaggagcacatgagaggagacagccagaccatgctgctgcagaggatggcctgtgaggtggccgccggcctggccgccatgcacaagctgcacttcctgcacagcgacctggccctgaggaactgcttcctgaccagtgacctgaatgtgaaggtgggggactatggcatcggcttcagccgctacaaggaggactacatcgagacagatgacaagaaggtgttccccctgcgctggacagcccctgagctggtgaccagcttccaggaccggctgctgacagctgaccagaccaagtacagcaacatctggagcctgggcgtgaccctgtgggagctgtttgacaatgctgcccagccctacagcaacctgagcaacctggatgtgctgaaccaggtgatccgggagcgggacaccaagctgcccaagccccagctggagcagccctacagcgaccgctggtatgaggtgctgcagttctgctggctgagccctgagaagaggcctgctgctgaagatgtgcaccggctgctgacctacctgcggctgcagagccagagggacagcgaggtggactttgagcagcagtggaatgccctgaagcccaacaccaacagccgggacagcagcaacaatgctgccttccccatcctggaccactttgcccgggaccggctgggccgggagatggaggaggtgctgactgtgacagagaccagccagggcctgagctttgaatatgtgtgggaggccgccaagcatgaccactttgatgagaggagccggggccacctggatgagggcctgagctacaccagcatcttctaccctgtggaggtgtttgagagcagcctgagtgaccccggccctgggaagcaggatgattctggccaggatgtgcccctgcgggtgcctggggtggtgcctgtgtttgatgcccacaacctgtctgtgggcagtgactactacatccagctggaggagaagagcggcagcaacctggagctggactaccccccagccctgctgaccacagacatggacaaccctgagaggacaggccctgagctgagccagctgacagccctgcggtctgtggagctggaggagagcagcacagatgaggacttcttccagagcagcacagaccccaaggacagcagcctgcccggggacctgcacgtgaccagcggccctgagagccccttcaacaacatcttcaatgatgtggacaagtctgaggacctgcccagccaccagaagatctttgacctgatggagctgaatggagtgcaggccgacttcaagccagccaccctgagcagcagcctggacaaccccaaggagagcgtcatcaccggccactttgagaaggagaagcccaggaagatctttgacagcgagcccctgtgcctgagtgacaacctgatgcaccaggacaactttgaccccctgaatgtgcaggagctgtctgagaacttcctgttcctgcaggagaagaacctgctgaagggcagcctgagcagcaaggagcacatcaatgacctgcagacagagctgaagaatgccggcttcacagaggccatgctggagaccagctgcaggaacagcctggacacagagctgcagtttgctgagaacaagccaggcctgagcctgctgcaggagaatgtgtccaccaagggagatgacacagatgtgatgctgactggagacaccctgagcaccagcctgcagagcagccctgaggtgcaggtgccccccaccagctttgaaacagaggagaccccaagaagagtgcccccagacagcctgcccacccagggcgagacccagcccacctgcctggatgtgattgtgcctgaggactgcctgcaccaggacatcagcccagatgctgtgacagtgcctgtggagatcctgagcacagatgcccggacccacagcctggacaacagaagccaggacagccctggagagagcgaggagaccctgcggctgacagaaagtgacagcgtgctggctgatgacatcctggccagccgggtgtctgtgggcagcagcctgcctgagctgggccaggagctgcacaacaagcccttcagcgaggaccaccacagccaccggcggctggagaagaacctggaggccgtggagaccctgaaccagctgaacagcaaggatgctgccaaggaggccggcctggtgtctgccctgagcagtgacagcaccagccaggacagcctgctggaggacagcctgagcgcccccttccctgccagcgagcccagcctggagaccccagacagcctggagagcgtggatgtgcatgaggccctgctggacagcctgggcagccacaccccccagaagctggtgcccccagacaagccagctgacagcggctatgaaacagagaacctggagagccctgagtggaccctgcacccagcccctgagggcacagctgacagcgagcccgccaccactggagatggcggccacagcggcctgccccccaaccctgtgattgtcatcagtgatgctggagatggccaccggggcacagaggtgaccccagagaccttcaccgctggcagccagggcagctacagagattctgcctacttcagtgacaatgattctgagcctgagaagaggtctgaggaggtgcccggcaccagccccagcgccctggtgctggtgcaggagcagcccctgcctgagcctgtgctgcctgagcagagccctgctgcccaggacagctgcctggaggccaggaagagccagccagatgagagctgcctgagcgccctgcacaacagcagtgacctggagctgcgggccaccccagagcccgcccagacaggagtgccccagcaggtgcaccccacagaagatgaggccagcagcccctggagcgtgctgaatgctgagctgagcagtggagatgactttgagacccaggatgaccggccctgcaccctggccagcacaggcaccaacaccaatgagctgctggcctacaccaacagcgccctggacaagagcctgagcagccacagcgagggccccaagctgaaggagccagacatcgagggcaagtacctgggcaagctgggcgtgtctggcatgctggacctgtctgaagatggcatggatgctgatgaagaagatgaaaattctgatgacagtgatgaggacctgcgggccttcaacctgcacagcctgagcagcgagagtgaagatgaaacagagcaccctgtgcccatcatcctgagcaatgaagatggccgccacctgcggagcctgctgaagcccacagctgccaatgccccagaccccctgcctgaggactggaagaaggagaagaaggctgtgaccttctttgatgatgtgacagtgtacctgtttgaccaggagacccccaccaaggagctgggcccctgtggcggggaggcctgtggccctgacctgagcggccctgccccagccagcggcagcccctacctgagccgctgcatcaacagcgagagcagcacagatgaggagggcggcggctttgagtgggatgatgacttctccccagaccccttcatgagcaagaccaccagcaacctgctgagcagcaagcccagcctgcagaccagcaagtacttcagccccccacctccagcccggagcacagagcagagctggccccacagcgccccctacagccgcttcagcatcagccctgccaacatcgccagcttcagcctgacccacctgacagacagcgacatcgagcagggcggcagcagtgaagatggagagaaggactag

SEQ ID NO: 183170 - DNA, 8946 bp, Artificial Sequence
  derived and/or modified sequence
gcggcgggagcgcggcttcccaggcccgccgctccgcagggctgctggcgttgctgctgttgagaggcggcggcggcggcgcaggcgggcgggaaggatggtgtttctgcgactggagcggcaggtgcggaccgggagccggaccgaggtttggcagaagcaacgtgtgctcgggagcaaccggcgcgggtgccactgaggcagcggagggaggcaggatcgactgacgggcgaacggacggacggacggaaggcgactcgagggccggccccggagccgcgccgtgggcgagatgccggggccgccggcgttgcggcggaggctgctgctgctgctgctggtcctcctgatcgccggcagtgctggggccgcgccacttccgcaaacaggtgcaggggaggcgccacctgctgcagaagtttcctcatcttttgtgatcctgtgtgtgtgcagtttaataatattaatagtgttaattgcaaactgtgtatcctgctgtaaggacccagaaatagactttaaggaatttgaagataattttgatgatgagatagatttcacaccaccagcagaagacactccctctgttcagtccccagcagaggtcttcacactttcagtaccaaatatttcactcccagctccctcgcaattccagccttctgtagagggattgaagtctcaagttgcccgccacagtctaaactacatacaggaaattggaaatggctggtttggaaaggttctcttgggagagatttacacgggcactagcgtagcaagagtcatcgtgaaggagttaaaagcaagtgccaacccaaaggaacaagatacttttttgaaaaatggagaaccttactacattcttcagcatccaaatattcttcagtgtgttggacagtgcgtagaagcgattccctacctcctggtgtttgagttctgtgacttgggtgacctgaaggcgtatctgcgcagcgagcaggagcacatgcggggggactcacagaccatgctgctgcagaggatggcgtgcgaggtcgccgcggggctggccgccatgcacaagctgcacttcctgcacagtgatttagccctgcggaattgttttctcacctccgacttaaatgtgaaagtgggagattacggaataggattcagcaggtacaaggaggattatattgaaacagatgataaaaaagttttccctctgcgatggactgctccagaattagtaaccagctttcaagacagactgctaactgcagatcagactaagtatagtaatatctggtctctgggtgtgacactttgggagctttttgacaatgccgcacagccgtattcaaacctttccaacttagatgtcctcaaccaagtcattagagagagagacacaaaactcccgaagccccagctggagcagccctactctgatagatggtatgaagtcttacagttctgttggctgtcaccagaaaagagacccgcggctgaagatgtgcacaggctgctgacttacctgcggctgcagagccagcgggactcagaggtcgactttgaacagcagtggaacgctctgaagccgaacacaaacagcagagactcctccaacaatgctgcattcccaattctcgaccactttgccagggaccggctgggtcgtgaaatggaggaagtcctcaccgtgaccgaaaccagccagggcctgagcttcgagtatgtctgggaggccgctaagcacgaccactttgacgagcgcagccggggccacctggacgaaggcttgtcctacacgagcatcttctatccggttgaagtttttgagagttcgctttcagatcctgggcccggaaagcaagatgacagcggccaggatgtccccctgagggtccctggagtggttcctgtttttgatgcccacaacctttctgttggaagcgactattatatccagttagaagaaaaaagtggtagtaacttggagcttgattacccaccagcgctgctcacaaccgacatggataatccagaaaggactggccctgaactgtcccagctcacggcgctcaggagcgttgaacttgaggagtccagtacagatgaggacttcttccaaagcagtacagaccccaaagactctagcttaccaggggacttacacgtgaccagtggccccgagagccctttcaacaatatatttaatgatgtggacaaatcggaagatttgcccagtcaccaaaaaatattcgacttaatggaattaaacggagttcaagccgactttaaacctgccactttaagttccagtttggataaccccaaagagtcagtcataacaggccactttgagaaagaaaagccccgtaagatttttgacagtgagcctctctgcctatcagataatcttatgcaccaagataattttgatccattgaatgttcaagaattgtcagaaaactttttatttcttcaagagaaaaacttactaaaaggctcattgtccagcaaagaacacataaatgatcttcagacagaacttaagaatgctggttttactgaagctatgttagaaacgtcatgtagaaactctttagatactgagcttcagtttgctgaaaataagccaggcttgtctttgttgcaggaaaacgtaagcacaaagggtgacgatacagatgtcatgctcacaggtgacactttgagcacctcattgcagtcttccccggaagtgcaggtacctcctacctccttcgaaacagaagaaacgccccgtcgggtacccccagactcactcccaacacagggagaaacccagcccacgtgtttagatgttattgtcccggaggactgtctccaccaggacatcagtccagacgctgtgactgtcccggttgaaattctctcaactgatgccagaacccacagcctggataacaggtcccaggactctcctggcgagagtgaggagaccctgcgactcaccgaaagtgactctgttcttgctgatgacatccttgccagcagggtgagtgtagggagtagtctcccggaactgggacaggaattgcacaataaaccattttcggaagaccatcacagtcatcgccggctagagaaaaacttagaggctgtggagactttaaatcagctcaattctaaagacgcagcaaaagaagcaggcttggtgtctgccctctcctcggactcaaccagtcaggacagcctcctggaggacagcttgtcagcacccttcccagcctctgagccgtccctggaaaccccggactctctggagtcagtggatgtccacgaagcgctactggactctttaggatctcacactccccagaaactagtgccccccgataagccggcagacagtggctacgaaacagagaacttggagtctcccgagtggaccttgcatcccgctcccgagggcaccgcagactcagaaccagccaccacgggcgatggcggccacagcggtctgcctcccaacccggtcattgtcatctcagatgccggcgatggtcacagaggcacagaagtgacccctgagacgttcacagctggctcccagggttcataccgagactctgcgtacttctcagacaatgactctgagcccgagaaaaggtctgaggaggtcccgggaacctccccatccgccttggtgttggtacaggagcagcccctacccgagccagtcctccccgagcaaagtcctgctgcccaggatagctgcctggaagccagaaagagccagccagatgaaagttgtctgtctgctttgcacaactccagtgacctggaattaagagccacgccggagccagcacagactggtgttccccagcaggtgcatcccacggaagacgaggccagcagtccctggagtgtgctgaatgcagaacttagcagcggcgatgacttcgagacacaggacgatcgcccctgcaccctcgcttccacggggaccaacacgaacgaactccttgcctacaccaattctgcgctggacaagtccctgtccagccactccgagggcccgaagttgaaggagccggacatcgaagggaagtacctggggaaactcggggtgtcagggatgctcgacctctcagaggacgggatggatgcagacgaggaggacgaaaacagcgacgactcggacgaggacctgcgggccttcaacctgcatagcctcagctccgagtcggaggacgagaccgagcaccccgtgcccatcatcctcagcaacgaggacggaaggcacctgcggagtctgttgaagcccacagcggccaatgcccccgacccactgcccgaggactggaagaaggaaaagaaggcagtcacgtttttcgatgatgtcacagtctacctgtttgaccaggagaccccaaccaaagagctggggccctgtggaggagaggcgtgcggcccggacctgagcggcccagccccagcctcaggctctccctacctgagcaggtgcatcaactccgaaagctccaccgacgaagaaggtggtggctttgagtgggatgatgacttctccccagatccttttatgtcaaagacaacaagtaacctgctcagctccaagccttctctccaaacatccaagtacttttctccgccgccaccggcccggagcacggagcagagctggccgcactcggcgccttactcccggttctccatctctcccgccaacattgccagcttttccctcacacacctgaccgactcggacatcgagcagggcggaagcagcgaagacggagaaaaggactaggtggctgccaacgcgcacgctcgggtccgaggctgctcccctggagcggcgcccctgcgccctcagcccgagcagcgacatccactcgccatttgctgacatgagattgggaggaagaatccagaggtgaagagggagacggctcttagctgcgttcaaggcggggccctcgggagcccaggtgcagagcgaggccgtgtccaggagccggcgtccctcagtgccccgtgcacccgcggccgcggcctcccaggcagtgctcatgcgctggccgtcgggggaggcaggggcacagcctccatgtgcgcgcgcgtgtggagctgtgtgcaccgcatgtgtgctttccacaggggcgtctctgcgtccacgcctgcacatcccggcgcacgtgtgggcaccacagaggacacgtgaggggaatggtcaccagtgagccatatttattatttctagagaaatcacgaactgctttctgtaattgcactgtggataaatgttccgagagtctccattgttgtacaggatcttcagttattcgaggggaatgaggcaggtcaagccgatgctagccactagtttgattttttttctgttttatagtttgcgctgcatggtacttgtgaagcttaaatattttgagtgttctactgtgtctaggattgttgggattgtacatatggtactctttcataaatgataaatgattctgaatgttagtgttttatgttcatataggaaatattttcattgagtccaaaataccactgttttgttgatggacttgaatgcatttttgtctcttcttgatgaagcggctttgccgcagcaaatgaggcttctctctgaggagctgagaggtcttgcagcctctccttgtcattctcccaccccacatcccattttttaaagcccttttggtaaaaaccaacaggttgtggccgcagacctcagatggacccggcccatccctggggacgtgctggcgtggcaggtccagagagctgcaccctgcacggggcaccgcaccgcttccctccgcgcagctcttctgcctggttttcggaggccaggctgctgggaagcttccgtgttcctgtcagtccttccttcaagaagccggggaactcaggcagactcatctccgcagagcataccagccgtgggggaccgttcgacttgatgatgtgtgcacacttcaggtggtggggacttgagctttaaaaaaacctccacagccgaatcttctcctccgagccactccacgtcacgtccagctgggcctggccagtctgtggttatccatgtgggatgagataacaccacatcctgcagctgtgaagggggatggacaagggacgacggccgacggcagagcatcagcagccgacacatagttcgggtcggggccttgggtggtcctgcatggcccgggactcatctcacggaccctccgttctgcattaagccccaggttctcttctggctttgaaagggcccgagtgctcccagtgtagcttcgtcacatcgtcacgagcccctgtggtcatgggcgacctcacacctccctccctgagttctgctctgacataaggaagtcctcggtggctggtgcagcgcggctgtgctgtgctggggaggcagccgttccttcgggggtccttgggcctgcagtcccctcatactcacccttcacccaacatattttccggtgctgatatgtttccagactccagcgcaacctggggtgctctccagacccgtgcaggggccgcctggggtacacggaaggaagttgagtcctagtgcaaaatgcaggcggacgttgccagagagtgcgcagcaaatgaccttcattgccagttccaccctactcctctcattttttatactaagcaataactttccaaagcaagaagttcaggatggagagagtcccctcctgtgtaggcatggggtggatgcggtgcccacctgggctatgtggggagcaccactgtctcgggatgcgcgaattttttttttttttttaattaacagggcattagaagatgattttgccaaaattgtcatgactctgaattcttgctgtggggacttcctgagttttctcagtttttacatctaagattagtcttggctgaagagaaatgagacgtgattatactactttttcaattgcaggtttaaggagttcagatttaatgaccaaagtcatacagatcatggaatctgtcgtcgtcttatacagtgtcagcctcgagtacatttattaaccttttggggctgtcagttttccactaggattaagattttggccgggcgcggtggctcacgcctgcaatcccaacacattggggggtcgaggcggacggatcactttgagcccaggagttcaagaccagcctgggcaacatggcgaaacctcgtctctactaaaaatacaaaatatatatatatatatatatactagctggggcacatagtggtgtgcacctgtagtcccagctgcttgggaggctgaggtgggaggatggctagagcccaggagatgggtgttgcagtgagctgagaccatgccactgtactctagcctgggtaacagccagaccctgtctcaaaaaaaaaaacaatttttttcataacataattcccatttttatttattttgagtcactcataattaattgccaaaaaagcattttatacattgagttggggggtagtggatcttagtgtggtgttgcatggaggggcgagattttatatttataatcaacacgtgggttaacatgtttttttgaaatccaagcaatacacaggaaatttaagtagaataaaaattgcagcccatttttgaaatgtcagcatgtgctgtgttcagttcaggtttttgttgtttgttttgttattttttaactaataagttggttatcagtggtgggttttcaaaatgtacttgttctaataagttgtacaatgaactaaatcagtggcattctctagataatgtgggggaaggttagaatattttctggccttctatggggtagcaacccagaatcaatctgaattagtcctgttttggtggagtttgtacattttaaatcctataacaaaaataatctagttttcatttccttactagctagatgcgaatttgtctttttgaatgaccctgtcaataagccagaaagggcaacccagaaaaagtgctccccacatccttctgagacttggcctgtgtgtgtggacgagaagccattcaccgtaagggtgcagaaagctcgaccaagccgaattgcaaacaacgttcgttctatttttaaatgtacaggttcgatcgtttctatagaaatgggtttatctaagaaaagtcttggtttgtcttgctgctgtaaaaggcctttccaaacccctccttttattcctgtttcccgaaataaggtatttgtagagttaaggacctactgcatgcctgtccccagggccccggtggaaggaaggcagcgcctgctcttccttaactcagcccatcatctgaaaattcagaagtgaaccaagggttagacgccagaggttgggcttctgttagagtggcttcaaaacatgagccttatgggaagtagccttaaaaaaagaatgggtatacgcagtgacttccgatggaaatctccaaaacaatattcctaagtagcaatggggttggctcaagtctttattaacaaagaacattctctttcatctataaagaaattcttaaagatgcattgacagtgttgaattaccaacagcctgtgaagatcagtttgaccggtgtggacacgtgctggttaagcactcaggcctacgtgggccgagcgggatcttgatcatggggctggtgtatggatccaccgtcggattccgtctgcagaggaggacgtagggggccgtcacacccaccaggcctccctgctgtgctttaacacaggcagaagaggttcatggcaatataatagtcaatgaactttcagtttaaattgtgtacatttttaaattgtaagatttttactgtatattgatgcatagtgtgattcaataaattgcttgtaatttaaaaactatttaatattcaaaataaatatagttatatatttataaa

SEQ ID NO: 183171 - DNA, 4512 bp, Artificial Sequence
  derived and/or modified sequence
atgcccggcccccccgccctgcggcggcggctgctgctgctgctgctggttctcctcattgctggttccgcaggcgctgcgccactcccacagacgggcgccggggaggcccctcctgcggctgaggtcagtagctctttcgtaatcttatgcgtgtgctcccttattatattgatcgttttaatcgccaactgtgtctcttgttgcaaagatccagagatcgattttaaagagttcgaggataacttcgacgacgagatcgattttacaccaccagctgaggacacgccctccgttcaatctcccgccgaagtattcactctgagcgtgccgaacatcagtctgccggccccttctcagttccagccaagcgtggaggggcttaagtctcaggtggcacggcacagtcttaattatatccaagaaattggaaacggttggttcgggaaagtactgcttggtgaaatctacacggggacgtctgtggcacgggttattgtgaaagaattaaaggcgagcgcaaaccctaaagaacaggacacatttctgaagaacggtgagccatactacatccttcagcatcctaatattcttcagtgcgtgggccagtgcgtggaggcaataccctatctcctggtgttcgagttctgcgatctgggcgatctgaaagcttaccttaggtcagaacaggaacatatgcggggggactcccagaccatgctattgcaaagaatggcttgtgaggtagctgcaggactggctgccatgcataaactgcactttctccatagcgatctggccctaagaaattgctttctgactagcgatcttaacgtgaaagtgggagactacggcattggcttttcccggtataaggaggattatatcgagaccgacgacaagaaggtgtttcccctgcggtggacggcaccagagctagtgacctcatttcaagatcgcctgcttaccgctgatcagaccaaatatagtaacatctggtctttgggcgtaacgttgtgggaactgttcgataacgccgcccagccctacagtaatctcagcaatcttgacgtgctcaaccaggttattagagagcgcgacacgaaactgcccaagccccaactagaacagccctacagtgataggtggtacgaggtactccaattttgttggcttagtcccgagaagcggccagcagccgaggatgtccacagactgctgacttatctgagactgcaatcacagcgagattcagaggttgactttgagcagcaatggaatgccctcaaacccaacacaaactcaagagatagctccaataatgcggcctttcctatcctcgatcattttgcacgtgaccgcctgggccgcgaaatggaggaggtgcttaccgtcacagagacttcccaggggctaagttttgagtatgtgtgggaggcggccaaacatgatcacttcgacgagcggagtagaggccacctcgacgaagggctgtcatacaccagtatcttttatcccgtggaggtgttcgaatctagtctttcagacccgggccctgggaagcaggacgatagtggccaggatgtgcccctcagagtacccggggtcgtccccgtatttgacgcccataatttgagcgtgggatctgattattatattcagctcgaagagaagtcagggtctaatctggagctggattacccgcctgcactgcttaccactgatatggacaatcctgaaaggactggccccgagctgtcgcagcttacagcgctgcgaagcgtggaattagaggagtcatcaacggacgaggatttctttcaaagctctactgatcccaaagatagcagtctccctggagacttgcatgtaacgtccggacccgagtctccttttaataatatcttcaatgacgtggacaagtccgaggacctgccaagtcatcagaagattttcgatctaatggagttgaacggggtccaggccgacttcaaaccggccacacttagttcctctctggacaacccaaaagagagcgttataacgggacacttcgagaaggaaaaaccgcgcaaaatctttgattctgagccgctctgcctatctgacaacttaatgcaccaggacaatttcgatcctctgaacgttcaagagctatcagagaatttcttattcctgcaagaaaagaaccttttaaagggatccctcagctcaaaggagcacatcaacgatctgcagacagagctgaaaaatgctggctttaccgaagccatgctggaaaccagctgcagaaattcattggatacggagctccaattcgctgaaaacaagcctggactgtccctgttgcaagagaacgtctctactaagggggacgataccgatgttatgctgacaggggatactctgtctacttctttgcagagttcaccagaggtgcaagttccaccaactagttttgaaacagaagagaccccacgcagagtgcctcctgacagcctgccgacccagggtgagacccaacctacgtgtctggacgtgattgtgcccgaggactgtctacaccaagatatctcccccgatgccgtgacagtgcctgttgaaattctttcaaccgacgccaggacccattcactcgacaatcggagccaagacagccctggcgaatccgaggagacgttaagattgacagaatccgatagcgtccttgctgacgacatccttgcatctcgagtctccgtagggagcagcctgcccgagctgggccaggagctgcataataaacccttcagtgaggaccatcattctcaccggaggctggagaaaaatctggaagccgtcgagacactgaaccagctgaattctaaggacgcagcaaaggaagcaggactcgtgtcagctctgtcctctgattctacatcacaggattccttactggaggattccttatccgctcctttccccgctagcgagcctagcctggagacccctgactcgctagagtctgttgacgtgcacgaggcccttctggactcactgggatcccatacaccacagaaactcgtgccacctgataagcccgctgattcaggatacgagactgagaacttggagtcgccagagtggacactccaccccgctcctgagggcactgccgatagcgagcccgctaccactggggatgggggccactcaggccttccaccaaatccagtcatagttatctccgatgccggcgatggtcaccgtggcaccgaggttactcctgagacattcaccgcaggctcccagggaagttatcgggattcagcctatttttcagataacgattcagaacccgagaagcgatcggaagaggtccccggcaccagccccagcgctttggttctcgtccaagagcagcccctgcctgaacctgtgctcccagaacagagccccgcagcccaggattcgtgcctggaggccaggaagtctcagcccgatgagtcttgtctgtctgcactgcataattcatctgacctcgaattgcgcgccaccccggagcccgcccagaccggcgtgcctcaacaggtgcatcctactgaagatgaggcttcatcaccatggtccgttcttaacgccgagctctccagcggtgacgacttcgaaacgcaggatgacagaccatgtacccttgcttctacgggaacaaataccaatgagctgctggcttacacgaatagtgccctggacaagtctcttagttcccattccgagggcccgaagctgaaggaacctgatattgaaggcaaataccttggcaaactcggagtgagtggcatgctggatctgtccgaagacgggatggacgcagatgaggaagatgagaattccgacgacagcgatgaagatctacgtgcattcaacctgcactctttatcgtctgaaagcgaagacgaaaccgaacaccccgtgccaatcatcctgagtaacgaggacgggcggcatctgaggtccctgctgaagccaactgcagccaacgcacccgacccgcttcccgaggattggaaaaaagaaaagaaggccgttacattcttcgacgacgtgaccgtctatttgttcgatcaggaaacaccaactaaggagctcggcccctgtggaggagaagcatgcggacccgacttgtcagggccggctccggcctccgggagtccctaccttagtcgctgcataaattcggaaagtagcacggacgaagaagggggcggcttcgagtgggatgacgacttttccccggatccttttatgagcaaaactacctccaatctgctcagtagcaagcctagtttgcaaacgtctaagtactttagccccccaccgcccgcaagaagtactgaacagtcttggccccattcagctccttacagcagattttctatttcccctgcaaatatcgcttcattctcattgacacatttgaccgactccgatattgaacagggggggagctcggaagacggggagaaggactag

SEQ ID NO: 183172 - DNA, 4512 bp, Artificial Sequence
  derived and/or modified sequence
atgccgggtccacccgctctgcgtcgacgactcctgctccttctgctcgtgctgcttatcgccggttccgcaggagcagctccacttccacagactggagcgggagaggccccacctgccgctgaagtcagctccagtttcgtgatcctttgcgtgtgctctctgattatcctgattgttctgatcgcaaattgtgttagctgctgtaaggacccagagatagacttcaaagagtttgaggataatttcgatgacgaaattgacttcactcctcccgcagaggacacccctagtgtacagtcaccagctgaggtgttcaccctgtctgtcccaaacattagtctgccagccccatcacagtttcagccgagcgtcgagggcctgaaatcccaagtggctcgtcattctcttaactatattcaagaaatcggtaacggatggttcgggaaggttctactcggtgagatctataccggcacctccgtagcccgtgttattgtgaaagagctgaaagcctccgccaaccccaaggagcaggacactttccttaaaaacggcgagccctattatattctgcagcaccctaacattctgcaatgtgtggggcagtgtgttgaggccatcccttatttgctggtgtttgagttttgcgacttgggggatcttaaagcttaccttagaagcgaacaggagcacatgcgtggcgattcgcagacaatgctgctccaaagaatggcttgtgaggtcgccgctgggctggccgctatgcacaaactgcactttttgcattcggatttagccctccggaattgttttcttacctcagatttgaatgttaaagtgggagactacggaatcggatttagtcgttataaggaggattacattgagaccgacgacaagaaggtgttccccctaaggtggacagccccagagctcgtgacttccttccaggatcgtttgctgactgcagatcagacaaaatatagcaatatttggtccctcggagtaactctctgggagctgtttgacaacgccgcacaaccatactctaacctgagcaacttggacgtcctgaatcaggtgatccgcgaaagagacaccaagctcccaaagccacaactcgagcaaccatattccgaccgctggtatgaagtgctccaattttgttggttgtctccagaaaaacgcccagccgcagaggatgttcatcgactcctgacgtacctgagattgcaaagccagcgtgattccgaagtggactttgaacaacagtggaacgctctgaagccaaacaccaattctagagattcaagcaataacgcggctttccctatccttgatcacttcgccagagatcggctgggaagagaaatggaagaggtcctgactgttacagaaacttctcagggcctgagcttcgaatacgtgtgggaggccgctaaacacgaccacttcgacgagagatcaagaggtcacctggatgagggcctaagctacacctccatcttttaccccgtcgaggtgtttgaatcatccctctccgacccaggcccagggaagcaggacgactccggccaggatgttccccttcgtgtgccaggagtggttcccgtcttcgacgctcacaacttgagcgtgggatctgactactacatccagcttgaagagaagtccgggagtaatctggagctggattatccgcctgcactgttgactaccgatatggataacccagagaggaccggccctgaactgagccagctcaccgccctgcgttctgtggagttagaggagtccagcacagacgaggattttttccaaagttcaacagaccctaaagacagctccttacccggtgacctccatgtgactagtgggccagagtctcccttcaataatatcttcaacgatgtcgacaagagtgaggaccttcctagccatcagaagatcttcgatttaatggagcttaatggagttcaggcggactttaaaccagccacactgtcttcgagtctggataatcctaaggagtccgtgattaccggccattttgaaaaggaaaagcctcgtaaaatcttcgacagcgagcctttgtgtctctccgacaacttgatgcatcaggataattttgatccacttaacgtgcaggaacttagtgaaaatttcctattcctgcaggagaaaaatcttttgaaaggcagcctgagttccaaagagcacattaacgatctgcagactgagctgaagaatgctggctttacagaggctatgttggaaacgtcgtgccgcaattccctggatacagagctgcagttcgccgagaataaaccgggactgtcacttcttcaggaaaacgtaagcaccaaaggagatgataccgacgtgatgcttacaggcgacactctcagcacatccctgcagagctcgcccgaagtccaagttccacccacaagtttcgaaactgaggaaacccccagaagggtgcccccagattcgctccctacccagggcgagactcaaccaacgtgcttagatgtgatcgtgcctgaggattgcctgcatcaggacatttcccctgatgccgtgactgtgcccgtcgaaatactgagcactgatgctcgcacacattcgctagataaccggtcccaggacagtccaggcgagagcgaagaaacgcttagactaaccgaatccgacagcgtcctggctgacgatatcctcgctagccgcgtgtccgtgggaagctctctgcctgaactgggccaggaactccacaataagcccttcagcgaggaccaccactcccacaggcgcctggaaaagaatctggaagctgtcgaaacgctgaaccagcttaactccaaggacgccgctaaggaggctgggctggtcagcgctcttagctccgactcaacaagccaggactccctgctggaggactcactgtctgctccttttcctgcatccgagccaagtctcgagacaccagactcactagagagcgtggacgttcacgaagccttgctagattctctgggatctcatacacctcagaagctagtgcctcctgataagcctgctgactccggctacgaaaccgaaaatctggaaagcccggagtggactctgcatccagcaccagaaggaaccgctgactccgagccagctactactggtgatgggggacactctggtttgcctccgaaccctgtcatcgttatctcagacgcaggcgacggacacagaggaacagaggtcacaccagaaacatttaccgcgggttcccagggtagctaccgcgactccgcatacttctcggataacgactcagagcctgagaaaaggagcgaagaagttcctgggaccagcccgagcgcgctggtcctggtgcaggaacagccactacctgaacctgttctgccagagcaaagccctgctgcacaggactcctgcttagaggcacggaagtcccaaccagacgaaagctgccttagtgctctgcataacagttccgatttggaactgcgcgctactcccgagccagctcagaccggagtgccccaacaagtgcatcctacagaggacgaggcgtcaagcccttggtccgtactgaacgccgaactgagcagtggggatgacttcgagacccaggacgatcgtccatgcacattggccagcactgggaccaacacaaacgagctcttggcatacacaaatagtgccttggataaatccctctcctcgcattctgaggggccaaagctgaaagaaccagacattgagggtaagtacctcgggaagctcggcgttagcggtatgctagatctgtctgaggacggtatggatgcagatgaggaagatgaaaactcagatgattcagatgaggacctccgcgcttttaatttgcactctttatcatctgagtctgaggacgagactgagcatcccgtgcccattatactttccaacgaggacggacggcatctgcgcagcctgctgaagcccaccgctgctaacgcccctgatcctctgcccgaggactggaaaaaggagaagaaggcagtgactttttttgacgacgtgaccgtttatctcttcgatcaggagacgccaacaaaagagttgggcccatgtggaggcgaagcctgtggccctgatttgtcgggccctgcccctgcctctggcagtccctatctctccaggtgtatcaacagtgagtcaagcacggatgaagaggggggtggctttgaatgggatgacgattttagccccgatccctttatgagcaaaacgacctctaacttactgtcctctaagccttccctgcaaacatctaagtacttctctccgccaccaccggcaaggagtaccgagcagtcgtggccacattcagccccttactcgagattctccatatcccccgcaaacatcgcctccttctcgctgacccatttaaccgattccgacatagagcagggaggttccagcgaggacggtgaaaaagattac

SEQ ID NO: 183173 - DNA, 4512 bp, Artificial Sequence
  derived and/or modified sequence
atgcccggcccccccgccctgagaagaagactgctgctgctgctgctggtgctgctgatcgccggcagcgccggcgccgcccccctgccccagaccggcgccggcgaggccccccccgccgccgaggtgagcagcagcttcgtgatcctgtgcgtgtgcagcctgatcatcctgatcgtgctgatcgccaactgcgtgagctgctgcaaggaccccgagatcgacttcaaggagttcgaggacaacttcgacgacgagatcgacttcaccccccccgccgaggacacccccagcgtgcagagccccgccgaggtgttcaccctgagcgtgcccaacatcagcctgcccgcccccagccagttccagcccagcgtggagggcctgaagagccaggtggccagacacagcctgaactacatccaggagatcggcaacggctggttcggcaaggtgctgctgggcgagatctacaccggcaccagcgtggccagagtgatcgtgaaggagctgaaggccagcgccaaccccaaggagcaggacaccttcctgaagaacggcgagccctactacatcctgcagcaccccaacatcctgcagtgcgtgggccagtgcgtggaggccatcccctacctgctggtgttcgagttctgcgacctgggcgacctgaaggcctacctgagaagcgagcaggagcacatgagaggcgacagccagaccatgctgctgcagagaatggcctgcgaggtggccgccggcctggccgccatgcacaagctgcacttcctgcacagcgacctggccctgagaaactgcttcctgaccagcgacctgaacgtgaaggtgggcgactacggcatcggcttcagcagatacaaggaggactacatcgagaccgacgacaagaaggtgttccccctgagatggaccgcccccgagctggtgaccagcttccaggacagactgctgaccgccgaccagaccaagtacagcaacatctggagcctgggcgtgaccctgtgggagctgttcgacaacgccgcccagccctacagcaacctgagcaacctggacgtgctgaaccaggtgatcagagagagagacaccaagctgcccaagccccagctggagcagccctacagcgacagatggtacgaggtgctgcagttctgctggctgagccccgagaagagacccgccgccgaggacgtgcacagactgctgacctacctgagactgcagagccagagagacagcgaggtggacttcgagcagcagtggaacgccctgaagcccaacaccaacagcagagacagcagcaacaacgccgccttccccatcctggaccacttcgccagagacagactgggcagagagatggaggaggtgctgaccgtgaccgagaccagccagggcctgagcttcgagtacgtgtgggaggccgccaagcacgaccacttcgacgagagaagcagaggccacctggacgagggcctgagctacaccagcatcttctaccccgtggaggtgttcgagagcagcctgagcgaccccggccccggcaagcaggacgacagcggccaggacgtgcccctgagagtgcccggcgtggtgcccgtgttcgacgcccacaacctgagcgtgggcagcgactactacatccagctggaggagaagagcggcagcaacctggagctggactacccccccgccctgctgaccaccgacatggacaaccccgagagaaccggccccgagctgagccagctgaccgccctgagaagcgtggagctggaggagagcagcaccgacgaggacttcttccagagcagcaccgaccccaaggacagcagcctgcccggcgacctgcacgtgaccagcggccccgagagccccttcaacaacatcttcaacgacgtggacaagagcgaggacctgcccagccaccagaagatcttcgacctgatggagctgaacggcgtgcaggccgacttcaagcccgccaccctgagcagcagcctggacaaccccaaggagagcgtgatcaccggccacttcgagaaggagaagcccagaaagatcttcgacagcgagcccctgtgcctgagcgacaacctgatgcaccaggacaacttcgaccccctgaacgtgcaggagctgagcgagaacttcctgttcctgcaggagaagaacctgctgaagggcagcctgagcagcaaggagcacatcaacgacctgcagaccgagctgaagaacgccggcttcaccgaggccatgctggagaccagctgcagaaacagcctggacaccgagctgcagttcgccgagaacaagcccggcctgagcctgctgcaggagaacgtgagcaccaagggcgacgacaccgacgtgatgctgaccggcgacaccctgagcaccagcctgcagagcagccccgaggtgcaggtgccccccaccagcttcgagaccgaggagacccccagaagagtgccccccgacagcctgcccacccagggcgagacccagcccacctgcctggacgtgatcgtgcccgaggactgcctgcaccaggacatcagccccgacgccgtgaccgtgcccgtggagatcctgagcaccgacgccagaacccacagcctggacaacagaagccaggacagccccggcgagagcgaggagaccctgagactgaccgagagcgacagcgtgctggccgacgacatcctggccagcagagtgagcgtgggcagcagcctgcccgagctgggccaggagctgcacaacaagcccttcagcgaggaccaccacagccacagaagactggagaagaacctggaggccgtggagaccctgaaccagctgaacagcaaggacgccgccaaggaggccggcctggtgagcgccctgagcagcgacagcaccagccaggacagcctgctggaggacagcctgagcgcccccttccccgccagcgagcccagcctggagacccccgacagcctggagagcgtggacgtgcacgaggccctgctggacagcctgggcagccacaccccccagaagctggtgccccccgacaagcccgccgacagcggctacgagaccgagaacctggagagccccgagtggaccctgcaccccgcccccgagggcaccgccgacagcgagcccgccaccaccggcgacggcggccacagcggcctgccccccaaccccgtgatcgtgatcagcgacgccggcgacggccacagaggcaccgaggtgacccccgagaccttcaccgccggcagccagggcagctacagagacagcgcctacttcagcgacaacgacagcgagcccgagaagagaagcgaggaggtgcccggcaccagccccagcgccctggtgctggtgcaggagcagcccctgcccgagcccgtgctgcccgagcagagccccgccgcccaggacagctgcctggaggccagaaagagccagcccgacgagagctgcctgagcgccctgcacaacagcagcgacctggagctgagagccacccccgagcccgcccagaccggcgtgccccagcaggtgcaccccaccgaggacgaggccagcagcccctggagcgtgctgaacgccgagctgagcagcggcgacgacttcgagacccaggacgacagaccctgcaccctggccagcaccggcaccaacaccaacgagctgctggcctacaccaacagcgccctggacaagagcctgagcagccacagcgagggccccaagctgaaggagcccgacatcgagggcaagtacctgggcaagctgggcgtgagcggcatgctggacctgagcgaggacggcatggacgccgacgaggaggacgagaacagcgacgacagcgacgaggacctgagagccttcaacctgcacagcctgagcagcgagagcgaggacgagaccgagcaccccgtgcccatcatcctgagcaacgaggacggcagacacctgagaagcctgctgaagcccaccgccgccaacgcccccgaccccctgcccgaggactggaagaaggagaagaaggccgtgaccttcttcgacgacgtgaccgtgtacctgttcgaccaggagacccccaccaaggagctgggcccctgcggcggcgaggcctgcggccccgacctgagcggccccgcccccgccagcggcagcccctacctgagcagatgcatcaacagcgagagcagcaccgacgaggagggcggcggcttcgagtgggacgacgacttcagccccgaccccttcatgagcaagaccaccagcaacctgctgagcagcaagcccagcctgcagaccagcaagtacttcagcccccccccccccgccagaagcaccgagcagagctggccccacagcgccccctacagcagattcagcatcagccccgccaacatcgccagcttcagcctgacccacctgaccgacagcgacatcgagcagggcggcagcagcgaggacggcgagaaggactag

SEQ ID NO: 183174 - protein, 802 aa, Artificial Sequence
  derived and/or modified sequence
MAARGRRAWLSVLLGLVLGFVLASRLVLPRASELKRAGPRRRASPEGCRSGQAAASQAGGARGDARGAQLWPPGSDPDGGPRDRNFLFVGVMTAQKYLQTRAVAAYRTWSKTIPGKVQFFSSEGSDTSVPIPVVPLRGVDDSYPPQKKSFMMLKYMHDHYLDKYEWFMRADDDVYIKGDRLENFLRSLNSSEPLFLGQTGLGTTEEMGKLALEPGENFCMGGPGVIMSREVLRRMVPHIGKCLREMYTTHEDVEVGRCVRRFAGVQCVWSYEMQQLFYENYEQNKKGYIRDLHNSKIHQAITLHPNKNPPYQYRLHSYMLSRKISELRHRTIQLHREIVLMSKYSNTEIHKEDLQLGIPPSFMRFQPRQREEILEWEFLTGKYLYSAVDGQPPRRGMDSAQREALDDIVMQVMEMINANAKTRGRIIDFKEIQYGYRRVNPMYGAEYILDLLLLYKKHKGKKMTVPVRRHAYLQQTFSKIQFVEHEELDAQELAKRINQESGSLSFLSNSLKKLVPFQLPGSKSEHKEPKDKKINILIPLSGRFDMFVRFMGNFEKTCLIPNQNVKLVVLLFNSDSNPDKAKQVELMRDYRIKYPKADMQILPVSGEFSRALALEVGSSQFNNESLLFFCDVDLVFTTEFLQRCRANTVLGQQIYFPIIFSQYDPKIVYSGKVPSDNHFAFTQKTGFWRNYGFGITCIYKGDLVRVGGFDVSIQGWGLEDVDLFNKVVQAGLKTFRSQEVGVVHVHHPVFCDPNLDPKQYKMCLGSKASTYGSTQQLAEMWLEKNDPSYSKSSNNNGSVRTA

SEQ ID NO: 183175 - DNA, 2409 bp, Artificial Sequence
  derived and/or modified sequence
atggcggcacgcggacgacgtgcttggttatcggtcctattagggctagtcctgggatttgtgctggcctcaagactggttctgccaagagcaagtgagttgaagcgtgcagggcccagaaggcgggcaagccccgagggctgtagatctgggcaggccgcggcttcacaggctggaggcgctcggggggacgcccggggagctcagctgtggcccccggggtccgaccccgacggtggtccgagagaccggaactttctgtttgtcggagtaatgacagcacaaaagtatttacagacccgggcagtcgcagcctacagaacatggtccaagactatacccggcaaggtccaattcttttcgagtgagggctctgataccagtgtaccaattcccgtggtaccgctgagaggcgttgacgattcctatccacctcaaaagaaaagcttcatgatgctgaagtatatgcacgatcactacctggataagtacgagtggttcatgagggctgacgatgatgtgtacattaaaggcgatagactcgaaaacttcctgcgcagcctgaacagcagcgaaccattgtttctgggccagactggtctcggaactactgaagaaatgggtaaacttgcattagagcccggcgaaaacttttgtatggggggccccggggttatcatgagtcgtgaagtcttacgaaggatggtcccccatatcggcaagtgtctgcgcgagatgtacacgacccacgaagatgtggaggtgggtcgttgcgttcggaggttcgccggcgtccaatgtgtgtggagttacgaaatgcagcaactgttctacgaaaactatgagcagaacaagaaagggtacattagagatctccacaactccaaaattcatcaggccataacgttacatcccaataagaaccccccttaccaatatagactccactcttacatgctctcacgtaagatctcagagctgaggcaccgcaccatccagttacaccgagaaattgtgcttatgagcaaatatagcaataccgagatccacaaagaagacttgcaactcggcatcccacctagtttcatgagattccagcctcgccagagggaggagattctcgaatgggaattccttactggaaagtatttgtacagtgctgtcgacgggcaacctccccggcgcggcatggacagtgctcagcgagaagccttggacgatattgttatgcaggtgatggaaatgattaacgcaaatgccaaaacacgcggacgcattattgacttcaaggaaatccaatatggctatagacgagtgaacccaatgtacggtgctgagtatatcctcgacctgctcctcctgtacaagaagcacaaggggaagaaaatgactgtgccagtgcggcgccacgcgtacctgcagcagacttttagcaagatccagttcgtagagcatgaagagttggacgcacaagagctggccaagcgtattaaccaggaatccggcagcttgagttttctctccaacagtctcaaaaagctggtcccctttcaactgcccggcagcaaatctgagcacaaagaaccaaaagacaagaaaattaacatcctaatcccattgagtgggcgatttgacatgttcgtgcgtttcatgggaaacttcgagaaaacatgcttaatcccgaatcagaatgttaagctggtggtactcctgtttaacagcgactccaacccagataaagccaagcaggttgagctaatgcgcgattaccgcattaagtatccgaaggccgacatgcagattctgcctgtgtcaggagagttctcgcgcgctctggctctcgaggtcgggagctcccagtttaataacgaaagtctgttgtttttctgcgacgtggatcttgtgttcacaacggaatttttgcagaggtgtagagccaacactgtgttaggacagcagatctattttccaatcattttcagccaatacgatcccaaaatcgtctattctggcaaggtgccttctgataaccatttcgcttttacccagaaaactggcttctggagaaactatggctttggaataacctgcatctacaagggcgatctagtcagagtcggcggtttcgacgtttctattcaaggctgggggttggaggacgtggatctgtttaataaagtggtccaggcggggcttaagactttccgttcccaggaggtgggagtggttcacgtgcaccaccctgtgttttgtgaccccaacctagaccctaagcagtacaagatgtgcctcggctcgaaagcatcaacttacggatcaactcagcagctggcggaaatgtggctggagaagaacgatccctcttattccaagagctctaacaacaacggctccgtgcgtacagcttag

SEQ ID NO: 183176 - DNA, 2409 bp, Artificial Sequence
  derived and/or modified sequence
atggccgcccggggccggcgggcctggctgtctgtgctgctgggcctggtgctgggctttgtgctggccagccggctggtgctgccccgggccagcgagctgaagagagctggccccaggagaagagccagccctgagggctgccgcagcggccaggccgccgccagccaggccggcggggcccggggagatgcccggggggcccagctgtggcccccaggcagtgaccctgatggcggcccccgggacaggaacttcctgtttgtgggcgtgatgacagcccagaagtacctgcagaccagggctgtggccgcctaccgcacctggagcaagaccatccctgggaaggtgcagttcttcagcagcgagggcagtgacacctctgtgcccatccctgtggtgcccctgcggggcgtggatgacagctacccaccccagaagaagagcttcatgatgctgaagtacatgcatgaccactacctggacaagtatgagtggttcatgagagcagatgatgatgtgtacatcaagggggaccggctggagaacttcctgcggagcctgaacagcagcgagcccctcttcctgggccagacaggcctgggcaccacagaggagatgggcaagctggccctggagcccggggagaacttctgcatgggcggccctggggtcatcatgagccgggaggtgctgcggaggatggtgccccacatcggcaagtgcctgcgggagatgtacaccacccatgaagatgtggaggtgggccgctgtgtgagaagatttgctggggtgcagtgtgtgtggagctatgagatgcagcagctgttctatgaaaattatgagcagaacaagaagggctacatccgggacctgcacaacagcaagatccaccaggccatcaccctgcaccccaacaagaaccccccctaccagtaccgcctgcacagctacatgctgagcaggaagatcagcgagctgcggcacaggaccatccagctgcaccgggagatcgtgctgatgagcaagtacagcaacacagagatccacaaggaggacctgcagctgggcatccccccatccttcatgaggttccagccccggcagcgggaggagatcctggagtgggagttcctgaccgggaagtacctgtacagcgctgtggatggccagcccccccggcggggcatggattctgcccagcgggaggccctggatgacatcgtgatgcaggtgatggagatgatcaatgccaatgccaagacccggggccgcatcatcgacttcaaggagatccagtatggctacagaagagtgaaccccatgtatggagctgagtacatcctggacctgctgctgctgtacaagaagcacaagggcaagaagatgacagtgcctgtgagaagacatgcctacctgcagcagaccttcagcaagatccagtttgtggagcacgaggagctggatgcccaggagctggccaagaggatcaaccaggagagcggcagcctgtccttcctgagcaacagcctgaagaagctggtgcccttccagctgcccggcagcaagtctgagcacaaggagcccaaggacaagaagatcaacatcctgatccccctgagcggccgctttgacatgtttgtgcgcttcatgggcaactttgagaagacctgcctgatccccaaccagaatgtgaagctggtggtgctgctcttcaacagcgacagcaacccagacaaggccaagcaggtggagctgatgagggactaccgcatcaagtaccccaaggctgacatgcagatcctgcctgtgtctggagagttcagccgggccctggccctggaggtgggcagcagccagttcaacaatgaaagcctgctcttcttctgtgatgtggacctggtgttcaccacagagttcctgcagcgctgccgggccaacacagtgctgggccagcagatctacttccccatcatcttcagccagtatgaccccaagatcgtgtacagcggcaaggtgcccagcgacaaccactttgccttcacccagaagacaggcttctggagaaattatggcttcggcatcacctgcatctacaagggggacctggtgcgggtgggcggctttgatgtgtccatccagggctggggcctggaggatgtggacctcttcaacaaggtggtgcaggccggcctgaagaccttccgcagccaggaggtgggcgtggtgcacgtgcaccaccctgtgttctgtgaccccaacctggaccccaagcagtacaagatgtgcctgggcagcaaggccagcacctacggcagcacccagcagctggccgagatgtggctggagaagaatgaccccagctacagcaagagcagcaacaacaacggctctgtgaggacagcctag

SEQ ID NO: 183177 - DNA, 2409 bp, Artificial Sequence
  derived and/or modified sequence
atggccgcccggggccggcgggcctggctgagcgtgctgctgggcctggttctcggcttcgtgctagcctctaggttagtgctgccacgagcatctgaactaaaacgcgccgggccacggaggcgagcatctccagagggatgtcgcagtggacaggccgctgcatcccaggcaggaggtgctcgcggagatgcccggggtgcccagttgtggcctcctgggtcagacccagatggcggaccccgtgacagaaacttcctgttcgtcggtgtcatgacggcacagaagtacttgcaaaccagggcagtggccgcataccgaacctggtcaaagaccatacccggtaaggtccagttcttctctagcgaaggttccgatactagcgtgcccataccggtggtacctctccgcggagtggatgatagctatccgccccaaaaaaaaagttttatgatgctaaagtacatgcacgatcactacctggacaagtatgaatggttcatgcgggccgatgatgatgtttacattaagggggaccgtctggagaatttcctgcggagtctgaatagttctgaaccattgttcttagggcagaccggcctcgggactaccgaagaaatgggaaagctagcactggaacctggcgaaaatttctgtatgggcgggcctggggtcattatgtctcgtgaagtgctgagaaggatggttcctcatatcggcaaatgtctccgagagatgtacactactcatgaggatgtggaggtgggacgttgtgtgcgccggtttgcgggggtccagtgcgtgtggtcatatgaaatgcagcagttattctacgaaaattatgagcagaacaaaaaggggtacatccgtgatctgcataactctaaaatccaccaggcgattactcttcaccccaacaagaatcccccctaccagtatcgacttcactcttatatgctgtctcggaagatttccgaactcagacataggaccattcagctgcacagggaaatcgtcctgatgtccaaatattctaataccgagatccataaggaagatttacaactcgggattcctccaagctttatgcgcttccagcctcgccagcgcgaggaaatcctcgaatgggagttcttgactgggaagtacctgtattctgccgtggacggccagccacccagaaggggaatggattccgcacagagggaagcactggacgacatcgtaatgcaggttatggagatgatcaatgctaatgccaagacccgtggtcgcattatcgactttaaagagatccagtatggctacagacgtgtcaatcccatgtacggggcagagtatatcctggatttgcttcttctgtacaaaaaacataaagggaagaagatgactgtcccagtcagaaggcatgcatacctgcaacagactttcagcaaaatccagtttgtagagcacgaggagttagacgcacaagagctggccaaacgtatcaatcaggagtccggctccttatcttttctgagcaactccctgaagaagcttgtcccatttcagctaccagggagtaagtctgaacataaagagccaaaagataagaagattaatatacttattccattaagcggccgcttcgatatgttcgtgcgattcatgggtaattttgaaaagacgtgccttatccctaaccagaatgttaaattggtggtgctccttttcaattccgattccaatccagacaaagctaagcaggttgagctgatgcgggattatcgaattaagtatccgaaggccgatatgcagatcctgcctgttagcggagagttcagcagggcccttgcccttgaggtcggaagttcccagtttaataacgaatctttactatttttttgtgatgtggatctggtgttcacaacagagttcctgcagaggtgcagggccaacacagtccttggtcaacagatctatttcccaatcatcttctctcagtacgacccgaagattgtttatagcggcaaagtaccgtctgacaaccatttcgcgttcacccagaaaacaggcttctggcgcaactacggattcgggatcacctgtatttataaaggcgatctggtccgagtgggaggattcgatgtgtctatccagggttggggactggaggacgtggacctcttcaataaagtggtacaggctggacttaagacctttagatcccaggaggtaggggttgtgcacgtccaccaccccgtgttttgtgatcccaacctggacccaaagcaatataaaatgtgtctgggaagcaaagcctctacctacgggtctacccaacagttagcggaaatgtggcttgagaaaaacgacccttcctatagcaaaagcagcaataacaacggcagtgtacgcactgcctag

SEQ ID NO: 183178 - DNA, 2409 bp, Artificial Sequence
  derived and/or modified sequence
atggcggctcgcggacgcagggcctggttatccgtactccttggtctcgttttagggtttgtattagcttcccgcctcgtgttaccccgagcgagcgaactcaaaagagcgggtcccagacggcgagcttcacccgagggatgtcggtctggccaagcggcagcttcccaagctggtggtgctaggggagacgccaggggcgcacagctgtggccaccgggttcggatccggatggtggaccccgtgatcgcaattttctattcgtcggagtaatgactgcgcagaagtacttgcagactcgcgcagtggccgcttatcggacttggtctaagaccatacctggcaaagtgcaattcttctcgtccgaaggttccgacacaagcgtaccaatccctgtcgtgcctctgcgcggtgtggatgacagctatccgcctcagaaaaagtcctttatgatgctcaagtacatgcacgatcactacctggataaatacgagtggtttatgcgagccgatgatgacgtctatataaaaggggaccgtctagaaaactttctccggagcctgaacagtagcgagccattatttttgggccagactgggcttgggactacagaggagatgggcaagctggctctcgaaccgggtgagaacttctgcatggggggacccggagttattatgtcgagggaagtgctgagaagaatggttccacacataggaaagtgcttaagggaaatgtatactacacacgaagacgtggaggtgggaaggtgcgtgcgcagattcgctggcgtgcagtgcgtgtggtcctacgagatgcagcagctgttttatgaaaactacgaacagaacaaaaagggttatatccgcgacctccacaacagcaagatacaccaggccataactcttcatcctaataaaaatcccccttatcagtatagacttcacagctatatgctctctcggaagattagtgaactgcggcacaggaccattcagctgcatcgcgagatagtcttaatgagtaaatattcaaataccgaaatccataaggaagatctgcagctgggaattccacctagttttatgcggttccagcctagacagagggaagagatactggagtgggagttcctgacaggcaaatatttgtattccgctgttgacggtcagcctccacggagggggatggatagcgcccagagggaagcgctcgacgatattgtcatgcaggtcatggagatgatcaatgcgaatgctaagactcggggaaggattatagattttaaggagatccagtacgggtaccgacgtgtcaaccctatgtacggggctgagtacattctggacctactgctcttatacaagaagcataagggaaagaaaatgacagtccctgttcgcaggcacgcttacctgcagcagaccttctcgaaaattcagttcgtcgagcacgaagagctggacgcccaggagctcgcaaagcggatcaaccaggagtcgggttccctgtcattcttgtctaattctctgaagaagcttgtgcctttccagctccctggcagtaaaagcgaacataaagaacccaaagataaaaaaatcaacatccttatacccctgagtggccgtttcgatatgttcgtcaggttcatgggcaacttcgagaagacgtgtctgatcccaaaccagaatgtcaagctggttgtcctcctcttcaattccgattccaaccccgacaaagctaaacaggtcgagctcatgcgcgattatagaataaagtaccctaaggccgatatgcagatcttgccggtgtcaggggaattttcccgggcactggcactggaagttggctcctcacagtttaataacgaaagcctcttattcttctgcgatgtcgatctagtgttcaccaccgaatttctccagagatgtagagccaataccgtgttggggcagcagatttacttccctatcattttctcgcaatatgaccctaagatcgtctattcaggaaaagtccccagtgacaatcactttgcattcacccagaagaccggattctggcggaactatggatttggcatcacttgcatctataagggagacctggtgagggtggggggtttcgatgtatctattcagggctggggtcttgaggatgtggatctgtttaataaggtggttcaagctggcctgaaaacatttcggtctcaagaggtcggagtcgtccacgtccatcaccccgttttctgcgacccgaacctcgaccccaagcagtacaagatgtgtctgggctccaaggcttccacatatgggtcaacccagcaacttgcagagatgtggctggagaagaacgacccctcctattcaaaatcatctaataataacggatccgtcagaaccgcttag

SEQ ID NO: 183179 - DNA, 4550 bp, Artificial Sequence
  derived and/or modified sequence
ggcgagctaagccggaggatgtgcagctgcggcggcggcgccggctacgaagaggacggggacaggcgccgtgcgaaccgagcccagccagccggaggacgcgggcagggcgggacgggagcccggactcgtctgccgccgccgtcgtcgccgtcgtgccggccccgcgtccccgcgcgcgagcgggaggagccgccgccacctcgcgcccgagccgccgctagcgcgcgccgggcatggtcccctcttaaaggcgcaggccgcggcggcgggggcgggcgtgcggaacaaagcgccggcgcggggcctgcgggcggctcgggggccgcgatgggcgcggcgggcccgcggcggcggcggcgctgcccgggccgggcctcgcggcgctagggcgggctggcctccgcgggcgggggcagcgggctgagggcgcgcggagcctgcggcggcggcccggcgggcggagcggcgcgggcatggccgcgcgcggccggcgcgcctggctcagcgtgctgctcgggctcgtcctgggcttcgtgctggcctcgcggctcgtcctgccccgggcttccgagctgaagcgagcgggcccacggcgccgcgccagccccgagggctgccggtccgggcaggcggcggcttcccaggccggcggggcgcgcggcgatgcgcgcggggcgcagctctggccgcccggctcggacccagatggcggcccgcgcgacaggaactttctcttcgtgggagtcatgaccgcccagaaatacctgcagactcgggccgtggccgcctacagaacatggtccaagacaattcctgggaaagttcagttcttctcaagtgagggttctgacacatctgtaccaattccagtagtgccactacggggtgtggacgactcctacccgccccagaagaagtccttcatgatgctcaagtacatgcacgaccactacttggacaagtatgaatggtttatgagagcagatgatgacgtgtacatcaaaggagaccgtctggagaacttcctgaggagtttgaacagcagcgagcccctctttcttgggcagacaggcctgggcaccacggaagaaatgggaaaactggccctggagcctggtgagaacttctgcatgggggggcctggcgtgatcatgagccgggaggtgcttcggagaatggtgccgcacattggcaagtgtctccgggagatgtacaccacccatgaggacgtggaggtgggaaggtgtgtccggaggtttgcaggggtgcagtgtgtctggtcttatgagatgcagcagcttttttatgagaattacgagcagaacaaaaaggggtacattagagatctccataacagtaaaattcaccaagctatcacattacaccccaacaaaaacccaccctaccagtacaggctccacagctacatgctgagccgcaagatatccgagctccgccatcgcacaatacagctgcaccgcgaaattgtcctgatgagcaaatacagcaacacagaaattcataaagaggacctccagctgggaatccctccctccttcatgaggtttcagccccgccagcgagaggagattctggaatgggagtttctgactggaaaatacttgtattcggcagttgacggccagccccctcgaagaggaatggactccgcccagagggaagccttggacgacattgtcatgcaggtcatggagatgatcaatgccaacgccaagaccagagggcgcatcattgacttcaaagagatccagtacggctaccgccgggtgaaccccatgtatggggctgagtacatcctggacctgctgcttctgtacaaaaagcacaaagggaagaaaatgacggtccctgtgaggaggcacgcgtatttacagcagactttcagcaaaatccagtttgtggagcatgaggagctggatgcacaagagttggccaagagaatcaatcaggaatctggatccttgtcctttctctcaaactccctgaagaagctcgtcccctttcagctccctgggtcgaagagtgagcacaaagaacccaaagataaaaagataaacatactgattcctttgtctgggcgtttcgacatgtttgtgagatttatgggaaactttgagaagacgtgtcttatccccaatcagaacgtcaagctcgtggttctgcttttcaattctgactccaaccctgacaaggccaaacaagttgaactgatgagagattaccgcattaagtaccctaaagccgacatgcagattttgcctgtgtctggagagttttcaagagccctggccctggaagtaggatcctcccagtttaacaatgaatctttgctcttcttctgcgacgtcgacctcgtgtttactacagaattccttcagcgatgtcgagcaaatacagttctgggccaacaaatatattttccaatcatcttcagccagtatgacccaaagattgtttatagtgggaaagttcccagtgacaaccattttgcctttactcagaaaactggcttctggagaaactatgggtttggcatcacgtgtatttataagggagatcttgtccgagtgggtggctttgatgtttccatccaaggctgggggctggaggatgtggaccttttcaacaaggttgtccaggcaggtttgaagacgtttaggagccaggaagtaggagtagtccacgtccaccatcctgtcttttgtgatcccaatcttgaccccaaacagtacaaaatgtgcttggggtccaaagcatcgacctatgggtccacccagcagctggctgagatgtggctggaaaaaaatgatccaagttacagtaaaagcagcaataataatggctcagtgaggacagcctaatgtccagctttgctggaaaagacgtttttaattatctaatttatttttcaaaaattttttgtatgatcagtttttgaagtccgtatacaaggatatattttacaagtggttttcttacataggactcctttaagattgagctttctgaacaagaaggtgatcagtgtttgcctttgaacacatcttcttgctgaacattatgtagcagacctgcttaactttgacttgaaatgtacctgatgaacaaaacttttttaaaaaaatgttttcttttgagaccctttgctccagtcctatggcagaaaacgtgaacattcctgcaaagtattattgtaacaaaacactgtaactctggtaaatgttctgttgtgattgttaacattccacagattctaccttttgtgttttgttttttttttttacaattgttttaaagccatttcatgttccagttgtaagataaggaaatgtgataatagctgtttcatcattgtcttcaggagagctttccagagttgatcatttcctctcatggtactctgctcagcatggccacgtaggttttttgtttgttttgttttgttctttttttgagacggagtctcactctgttacccaggctggaatgcagtggcgcaatcttggctcactttaacctccacttccctggttcaagcaattcccctgcctttgcctcccgagtagctgggattacaggcacacaccaccacgcccagctagtttttttgtatttttagtagagacggggtttcaccatgcaagcccagctggccacgtaggttttaaagcaaggggcgtgaagaaggcacagtgaggtatgtggctgttctcgtggtagttcattcggcctaaatagacctggcattaaatttcaagaaggatttggcattttctcttcttgacccttctctttaaagggtaaaatattaatgtttagaatgacaaagatgaattattacaataaatctgatgtacacagactgaaacatacacacatacaccctaatcaaaacgttggggaaaaatgtatttggttttgttcctttcatcctgtctgtgttatgtgggtggagatggttttcattctttcattactgttttgttttatcctttgtatctgaaatacctttaatttatttaatatctgttgttcagagctctgccatttcttgagtacctgttagttagtattatttatgtgtatcgggagtgtgtttagtctgttttatttgcagtaaaccgatctccaaagatttccttttggaaacgctttttcccctccttaatttttatattccttactgttttactaaatattaagtgttctttgacaattttggtgctcatgtgttttggggacaaaagtgaaatgaatctgtcattataccagaaagttaaattctcagatcaaatgtgccttaataaatttgttttcatttagatttcaaacagtgatagacttgccattttaatacacgtcattggagggctgcgtatttgtaaatagcctgatgctcatttggaaaaataaaccagtgaacaatatttttctattgtacttttcgaaccattttgtctcattattcctgttttagctgaagaattgtattacatttggagagtaaaaaacttaaacacgattca

SEQ ID NO: 183180 - DNA, 2409 bp, Artificial Sequence
  derived and/or modified sequence
atggccgccagaggcagaagagcctggctgagcgtgctgctgggcctggtgctgggcttcgtgctggccagcagactggtgctgcccagagccagcgagctgaagagagccggccccagaagaagagccagccccgagggctgcagaagcggccaggccgccgccagccaggccggcggcgccagaggcgacgccagaggcgcccagctgtggccccccggcagcgaccccgacggcggccccagagacagaaacttcctgttcgtgggcgtgatgaccgcccagaagtacctgcagaccagagccgtggccgcctacagaacctggagcaagaccatccccggcaaggtgcagttcttcagcagcgagggcagcgacaccagcgtgcccatccccgtggtgcccctgagaggcgtggacgacagctaccccccccagaagaagagcttcatgatgctgaagtacatgcacgaccactacctggacaagtacgagtggttcatgagagccgacgacgacgtgtacatcaagggcgacagactggagaacttcctgagaagcctgaacagcagcgagcccctgttcctgggccagaccggcctgggcaccaccgaggagatgggcaagctggccctggagcccggcgagaacttctgcatgggcggccccggcgtgatcatgagcagagaggtgctgagaagaatggtgccccacatcggcaagtgcctgagagagatgtacaccacccacgaggacgtggaggtgggcagatgcgtgagaagattcgccggcgtgcagtgcgtgtggagctacgagatgcagcagctgttctacgagaactacgagcagaacaagaagggctacatcagagacctgcacaacagcaagatccaccaggccatcaccctgcaccccaacaagaaccccccctaccagtacagactgcacagctacatgctgagcagaaagatcagcgagctgagacacagaaccatccagctgcacagagagatcgtgctgatgagcaagtacagcaacaccgagatccacaaggaggacctgcagctgggcatcccccccagcttcatgagattccagcccagacagagagaggagatcctggagtgggagttcctgaccggcaagtacctgtacagcgccgtggacggccagccccccagaagaggcatggacagcgcccagagagaggccctggacgacatcgtgatgcaggtgatggagatgatcaacgccaacgccaagaccagaggcagaatcatcgacttcaaggagatccagtacggctacagaagagtgaaccccatgtacggcgccgagtacatcctggacctgctgctgctgtacaagaagcacaagggcaagaagatgaccgtgcccgtgagaagacacgcctacctgcagcagaccttcagcaagatccagttcgtggagcacgaggagctggacgcccaggagctggccaagagaatcaaccaggagagcggcagcctgagcttcctgagcaacagcctgaagaagctggtgcccttccagctgcccggcagcaagagcgagcacaaggagcccaaggacaagaagatcaacatcctgatccccctgagcggcagattcgacatgttcgtgagattcatgggcaacttcgagaagacctgcctgatccccaaccagaacgtgaagctggtggtgctgctgttcaacagcgacagcaaccccgacaaggccaagcaggtggagctgatgagagactacagaatcaagtaccccaaggccgacatgcagatcctgcccgtgagcggcgagttcagcagagccctggccctggaggtgggcagcagccagttcaacaacgagagcctgctgttcttctgcgacgtggacctggtgttcaccaccgagttcctgcagagatgcagagccaacaccgtgctgggccagcagatctacttccccatcatcttcagccagtacgaccccaagatcgtgtacagcggcaaggtgcccagcgacaaccacttcgccttcacccagaagaccggcttctggagaaactacggcttcggcatcacctgcatctacaagggcgacctggtgagagtgggcggcttcgacgtgagcatccagggctggggcctggaggacgtggacctgttcaacaaggtggtgcaggccggcctgaagaccttcagaagccaggaggtgggcgtggtgcacgtgcaccaccccgtgttctgcgaccccaacctggaccccaagcagtacaagatgtgcctgggcagcaaggccagcacctacggcagcacccagcagctggccgagatgtggctggagaagaacgaccccagctacagcaagagcagcaacaacaacggcagcgtgagaaccgcctag

SEQ ID NO: 183181 - protein, 1469 aa, Artificial Sequence
  derived and/or modified sequence
MARLAAVLWNLCVTAVLVTSATQGLSRAGLPFGLMRRELACEGYPIELRCPGSDVIMVENANYGRTDDKICDADPFQMENVQCYLPDAFKIMSQRCNNRTQCVVVAGSDAFPDPCPGTYKYLEVQYDCVPYIFVCPGTLQKVLEPTSTHESEHQSGAWCKDPLQAGDRIYVMPWIPYRTDTLTEYASWEDYVAARHTTTYRLPNRVDGTGFVVYDGAVFYNKERTRNIVKYDLRTRIKSGETVINTANYHDTSPYRWGGKTDIDLAVDENGLWVIYATEGNNGRLVVSQLNPYTLRFEGTWETGYDKRSASNAFMVCGVLYVLRSVYVDDDSEAAGNRVDYAFNTNANREEPVSLTFPNPYQFISSVDYNPRDNQLYVWNNYFVVRYSLEFGPPDPSAGPATSPPLSTTTTARPTPLTSTASPAATTPLRRAPLTTHPVGAINQLGPDLPPATAPVPSTRRPPAPNLHVSPELFCEPREVRRVQWPATQQGMLVERPCPKGTRGIASFQCLPALGLWNPRGPDLSNCTSPWVNQVAQKIKSGENAANIASELARHTRGSIYAGDVSSSVKLMEQLLDILDAQLQALRPIERESAGKNYNKMHKRERTCKDYIKAVVETVDNLLRPEALESWKDMNATEQVHTATMLLDVLEEGAFLLADNVREPARFLAAKENVVLEVTVLNTEGQVQELVFPQEEYPRKNSIQLSAKTIKQNSRNGVVKVVFILYNNLGLFLSTENATVKLAGEAGPGGPGGASLVVNSQVIAASINKESSRVFLMDPVIFTVAHLEDKNHFNANCSFWNYSERSMLGYWSTQGCRLVESNKTHTTCACSHLTNFAVLMAHREIYQGRINELLLSVITWVGIVISLVCLAICISTFCFLRGLQTDRNTIHKNLCINLFLAELLFLVGIDKTQYEIACPIFAGLLHYFFLAAFSWLCLEGVHLYLLLVEVFESEYSRTKYYYLGGYCFPALVVGIAAAIDYRSYGTEKACWLRVDNYFIWSFIGPVSFVIVVNLVFLMVTLHKMIRSSSVLKPDSSRLDNIKSWALGAIALLFLLGLTWAFGLLFINKESVVMAYLFTTFNAFQGVFIFVFHCALQKKVHKEYSKCLRHSYCCIRSPPGGTHGSLKTSAMRSNTRYYTGTQSRIRRMWNDTVRKQTESSFMAGDINSTPTLNRGTMGNHLLTNPVLQPRGGTSPYNTLIAESVGFNPSSPPVFNSPGSYREPKHPLGGREACGMDTLPLNGNFNNSYSLRSGDFPPGDGGPEPPRGRNLADAAAFEKMIISELVHNNLRGSSSAAKGPPPPEPPVPPVPGGGGEEEAGGPGGADRAEIELLYKALEEPLLLPRAQSVLYQSDLDESESCTAEDGATSRPLSSPPGRDSLYASGANLRDSPSYPDSSPEGPSEALPPPPPAPPGPPEIYYTSRPPALVARNPLQGYYQVRRPSHEGYLAAPGLEGPGPDGDGQMQLVTSL

SEQ ID NO: 183182 - DNA, 4410 bp, Artificial Sequence
  derived and/or modified sequence
atggccagactggccgccgtgctgtggaacctgtgcgtgaccgccgtgctggtgaccagcgccacccagggcctgagcagagccggcctgcccttcggcctgatgagaagagagctggcctgcgagggctaccccatcgagctgagatgccccggcagcgacgtgatcatggtggagaacgccaactacggcagaaccgacgacaagatctgcgacgccgaccccttccagatggagaacgtgcagtgctacctgcccgacgccttcaagatcatgagccagagatgcaacaacagaacccagtgcgtggtggtggccggcagcgacgccttccccgacccctgccccggcacctacaagtacctggaggtgcagtacgactgcgtgccctacatcttcgtgtgccccggcaccctgcagaaggtgctggagcccaccagcacccacgagagcgagcaccagagcggcgcctggtgcaaggaccccctgcaggccggcgacagaatctacgtgatgccctggatcccctacagaaccgacaccctgaccgagtacgccagctgggaggactacgtggccgccagacacaccaccacctacagactgcccaacagagtggacggcaccggcttcgtggtgtacgacggcgccgtgttctacaacaaggagagaaccagaaacatcgtgaagtacgacctgagaaccagaatcaagagcggcgagaccgtgatcaacaccgccaactaccacgacaccagcccctacagatggggcggcaagaccgacatcgacctggccgtggacgagaacggcctgtgggtgatctacgccaccgagggcaacaacggcagactggtggtgagccagctgaacccctacaccctgagattcgagggcacctgggagaccggctacgacaagagaagcgccagcaacgccttcatggtgtgcggcgtgctgtacgtgctgagaagcgtgtacgtggacgacgacagcgaggccgccggcaacagagtggactacgccttcaacaccaacgccaacagagaggagcccgtgagcctgaccttccccaacccctaccagttcatcagcagcgtggactacaaccccagagacaaccagctgtacgtgtggaacaactacttcgtggtgagatacagcctggagttcggcccccccgaccccagcgccggccccgccaccagcccccccctgagcaccaccaccaccgccagacccacccccctgaccagcaccgccagccccgccgccaccacccccctgagaagagcccccctgaccacccaccccgtgggcgccatcaaccagctgggccccgacctgccccccgccaccgcccccgtgcccagcaccagaagaccccccgcccccaacctgcacgtgagccccgagctgttctgcgagcccagagaggtgagaagagtgcagtggcccgccacccagcagggcatgctggtggagagaccctgccccaagggcaccagaggcatcgccagcttccagtgcctgcccgccctgggcctgtggaaccccagaggccccgacctgagcaactgcaccagcccctgggtgaaccaggtggcccagaagatcaagagcggcgagaacgccgccaacatcgccagcgagctggccagacacaccagaggcagcatctacgccggcgacgtgagcagcagcgtgaagctgatggagcagctgctggacatcctggacgcccagctgcaggccctgagacccatcgagagagagagcgccggcaagaactacaacaagatgcacaagagagagagaacctgcaaggactacatcaaggccgtggtggagaccgtggacaacctgctgagacccgaggccctggagagctggaaggacatgaacgccaccgagcaggtgcacaccgccaccatgctgctggacgtgctggaggagggcgccttcctgctggccgacaacgtgagagagcccgccagattcctggccgccaaggagaacgtggtgctggaggtgaccgtgctgaacaccgagggccaggtgcaggagctggtgttcccccaggaggagtaccccagaaagaacagcatccagctgagcgccaagaccatcaagcagaacagcagaaacggcgtggtgaaggtggtgttcatcctgtacaacaacctgggcctgttcctgagcaccgagaacgccaccgtgaagctggccggcgaggccggccccggcggccccggcggcgccagcctggtggtgaacagccaggtgatcgccgccagcatcaacaaggagagcagcagagtgttcctgatggaccccgtgatcttcaccgtggcccacctggaggacaagaaccacttcaacgccaactgcagcttctggaactacagcgagagaagcatgctgggctactggagcacccagggctgcagactggtggagagcaacaagacccacaccacctgcgcctgcagccacctgaccaacttcgccgtgctgatggcccacagagagatctaccagggcagaatcaacgagctgctgctgagcgtgatcacctgggtgggcatcgtgatcagcctggtgtgcctggccatctgcatcagcaccttctgcttcctgagaggcctgcagaccgacagaaacaccatccacaagaacctgtgcatcaacctgttcctggccgagctgctgttcctggtgggcatcgacaagacccagtacgagatcgcctgccccatcttcgccggcctgctgcactacttcttcctggccgccttcagctggctgtgcctggagggcgtgcacctgtacctgctgctggtggaggtgttcgagagcgagtacagcagaaccaagtactactacctgggcggctactgcttccccgccctggtggtgggcatcgccgccgccatcgactacagaagctacggcaccgagaaggcctgctggctgagagtggacaactacttcatctggagcttcatcggccccgtgagcttcgtgatcgtggtgaacctggtgttcctgatggtgaccctgcacaagatgatcagaagcagcagcgtgctgaagcccgacagcagcagactggacaacatcaagagctgggccctgggcgccatcgccctgctgttcctgctgggcctgacctgggccttcggcctgctgttcatcaacaaggagagcgtggtgatggcctacctgttcaccaccttcaacgccttccagggcgtgttcatcttcgtgttccactgcgccctgcagaagaaggtgcacaaggagtacagcaagtgcctgagacacagctactgctgcatcagaagcccccccggcggcacccacggcagcctgaagaccagcgccatgagaagcaacaccagatactacaccggcacccagagcagaatcagaagaatgtggaacgacaccgtgagaaagcagaccgagagcagcttcatggccggcgacatcaacagcacccccaccctgaacagaggcaccatgggcaaccacctgctgaccaaccccgtgctgcagcccagaggcggcaccagcccctacaacaccctgatcgccgagagcgtgggcttcaaccccagcagcccccccgtgttcaacagccccggcagctacagagagcccaagcaccccctgggcggcagagaggcctgcggcatggacaccctgcccctgaacggcaacttcaacaacagctacagcctgagaagcggcgacttcccccccggcgacggcggccccgagccccccagaggcagaaacctggccgacgccgccgccttcgagaagatgatcatcagcgagctggtgcacaacaacctgagaggcagcagcagcgccgccaagggcccccccccccccgagccccccgtgccccccgtgcccggcggcggcggcgaggaggaggccggcggccccggcggcgccgacagagccgagatcgagctgctgtacaaggccctggaggagcccctgctgctgcccagagcccagagcgtgctgtaccagagcgacctggacgagagcgagagctgcaccgccgaggacggcgccaccagcagacccctgagcagcccccccggcagagacagcctgtacgccagcggcgccaacctgagagacagccccagctaccccgacagcagccccgagggccccagcgaggccctgcccccccccccccccgccccccccggcccccccgagatctactacaccagcagaccccccgccctggtggccagaaaccccctgcagggctactaccaggtgagaagacccagccacgagggctacctggccgcccccggcctggagggccccggccccgacggcgacggccagatgcagctggtgaccagcctgtag

SEQ ID NO: 183183 - DNA, 4410 bp, Artificial Sequence
  derived and/or modified sequence
atggccagacttgccgccgtgttgtggaacctctgtgtgacagcagtgttggtgacaagcgccacgcaggggctctccagggccggcttacctttcggcttgatgaggcgggaactcgcctgtgagggctaccctatcgagctgcgatgtccaggaagcgatgtgatcatggtggaaaacgccaactacggcaggacggacgataaaatttgcgatgccgaccctttccaaatggaaaacgtccaatgctacttgcctgatgcattcaagataatgtcccaacgttgcaataataggacgcagtgtgtggtggtggccggttccgacgctttccccgacccttgccccggaacctataagtatctggaagtgcaatacgattgtgtgccatatatattcgtgtgcccagggacactacagaaagtgctggaaccaacatcaacacatgagagcgagcatcagtcaggcgcgtggtgcaaggatccccttcaggccggagatcgaatctatgtgatgccttggattccttatagaacagataccttgaccgaatatgcctcctgggaagactatgtggcagcccggcacacgacgacgtatcggctgccgaatcgtgtggatggaacaggctttgttgtgtacgatggggcagtcttttacaataaggagagaacgagaaatatcgtcaagtatgatctccgcactcgaatcaagtccggagaaactgtcatcaatacggctaactaccacgacacgagtccctacagatggggtggcaagacggacatcgacctagcagtggacgaaaacggcttatgggtgatttacgcaaccgagggcaataacgggcgtttggtcgtatctcaactgaacccatataccttgagattcgagggcacctgggaaactggttacgacaaaaggtccgctagcaacgcttttatggtgtgtggggtcctctacgtgctccgttccgtgtacgtcgacgacgactcagaagctgctggtaacagggtggattacgctttcaacactaacgctaacagagaggaacctgtttcactcacgttccccaacccgtatcagtttataagcagcgtggactataacccaagggataaccagctgtatgtttggaataactactttgtggttcggtactcactcgaatttggcccgcccgatccatccgccggccctgccacatcaccgcctctgagtaccactaccactgcacgtccaaccccccttacctccacagcctctcctgccgctacaacccccctcagaagagctccacttaccacacatccagttggagccattaaccagctagggcctgacctgcccccggctaccgcccctgtgccaagcacacgccggcccccagccccaaacttgcacgtatctccagagttgttttgtgaaccccgcgaagtccggagggtgcaatggcccgctacacagcagggtatgctcgtagaaaggccatgccctaagggtacgcgagggatcgcttcatttcaatgcttacccgccttaggcctttggaaccctagaggaccggacctgtccaattgcacctcaccatgggtcaaccaggttgcccagaaaatcaaatcaggtgagaacgccgccaacatcgccagcgagctggccaggcacactagaggctctatatacgcgggtgatgtctcatcgagcgttaagctgatggagcagctcctcgacatcctagacgctcagctgcaggccctgagacctattgaacgcgagtccgcgggaaagaactataacaaaatgcataagcgtgagcggacttgtaaggactatatcaaggcggtggtggagactgtggacaacttgctgcggccagaggccctagagtcatggaaggatatgaatgccaccgaacaggtgcacaccgccactatgctgctcgatgttctggaggagggcgctttcctgttggctgacaacgtgagagagccagcgaggttcttggccgctaaggagaatgtcgtgcttgaagtaaccgtgcttaatacggaggggcaggttcaagagttggtcttcccacaggaggagtatcccaggaagaacagtatccaacttagcgctaagactatcaagcaaaatagtcgaaatggggtcgtgaaggtggtgtttattttgtataataacctgggtctgtttcttagtaccgagaatgcaacggtaaagcttgcgggtgaagctggaccaggtggccctgggggtgcgtcactggttgttaattcacaagtcatagcggcttctataaataaggaatcttctagagttttcctgatggaccctgtgatcttcacggtggcgcacttggaagataagaatcacttcaatgctaattgttcattttggaactacagcgagcgaagtatgctaggatattggtcaacacagggttgtaggctggttgagtctaataagacccatacgacatgtgcttgtagtcatttgaccaattttgccgttctgatggcacaccgcgagatttatcagggccgaatcaacgagctactgctctctgtcataacatgggtaggcatcgttatcagcctggtgtgtctagccatatgcatcagcactttctgttttctgagagggctgcagacggatagaaacaccatccataagaatctgtgtattaatttatttctcgcagagttgttgtttcttgtcgggatcgataagacacagtacgagattgcgtgtcccattttcgccggcctgttacactacttctttcttgctgcctttagttggctatgcctggagggggtacatctttacctcttgctggttgaagtgttcgagtctgaatattctcgcactaagtactactacctcggtggctattgttttcctgccttggtggttggaatcgctgccgcaattgactaccgcagctatgggacagagaaggcttgctggttgcgcgttgacaactattttatttggtcatttattggcccagtttctttcgtgattgtggtcaatctggtctttcttatggtgactttgcataagatgatcagaagcagcagtgtgctcaagcctgactcttctcgactggacaatataaaatcttgggcactgggagcaatagctcttctgttcctgctggggttaacctgggcatttggcttgctgtttatcaacaaggagtcagtggtcatggcttacctgtttacaacctttaatgcattccagggagtcttcatctttgtgtttcactgcgctttacagaaaaaagttcacaaggagtactcgaaatgcctgcgacacagttactgttgcattaggagccctccaggaggaacacacggcagcttgaaaacctcagcaatgaggagcaatactcggtattacaccggcacccagagtcggattaggagaatgtggaatgatacagttaggaagcagactgagagtagtttcatggccggcgatatcaactcaacacctacactcaatcggggcacgatgggcaaccacctgctgacaaatcctgttctacagcctcggggggggaccagtccttacaatactctcatagccgagagtgtggggtttaatccctcaagtccgcccgtcttcaactctcctggaagctatagggaacctaagcaccccttagggggccgagaggcttgcgggatggacacactgccactgaacggcaatttcaataactcttacagcttgagaagcggcgactttcccccaggtgacggcggaccggaaccccctcggggccgaaatctggctgacgccgcagctttcgaaaagatgataatctccgagctggttcacaataacctgaggggctcctccagtgccgcgaaggggcctccccctccagagccacctgtgccccctgtgcccggtggcggcggcgaagaagaggcaggcggaccaggcggcgccgaccgcgcagagattgagcttttgtataaggcgctggaggaacccctcctgttgccacgcgcccagagtgtgctgtaccaatcagacctcgatgagtccgagtcatgcaccgcagaagacggtgccacctctcggccacttagctcaccacctgggagggatagtctgtacgcctccggtgctaatctccgggacagcccttcttaccccgactcttctccagagggcccctccgaggcactgccccctcctcccccagcacccccgggaccgccagaaatttattacaccagtcggcccccagcccttgtggcgcggaaccccctgcagggatactaccaggtccggagaccttcccacgaaggctacctggccgcaccgggcctcgaaggaccaggcccagacggcgatggccagatgcaattagtcacaagtctctag

SEQ ID NO: 183184 - DNA, 7819 bp, Artificial Sequence
  derived and/or modified sequence
ggtcggcggcggtgctgggccaggggaaggaagggacacggaggccgccctcgtcccgccacctcctacccgcttccccccagccccggctccgggagatgtgccgggcggggggcccgggttcgccgagccgcaggagagacacgctgggccgaccccagagaggcgctggacaggctggtggtccaggccgtggtgcctgccaggtgatgtggggcaaagccccccgcacaggccactgagagctccggacacgcacccggctgccaccatggcccgcctagccgcagtgctctggaatctgtgtgtcaccgccgtcctggtcacctcggccacccaaggcctgagccgggccgggctcccgttcgggctgatgcgccgggagctggcgtgtgaaggctaccccatcgagctgcggtgccccggcagcgacgtcatcatggtggagaatgccaactacgggcgcacggacgacaagatttgcgatgctgaccctttccagatggagaatgtgcagtgctacctgccggacgccttcaagatcatgtcacagaggtgtaacaaccgcacccagtgcgtggtggtcgccggctcggatgcctttcctgacccctgtcctgggacctacaagtacctggaggtgcagtacgactgtgtcccctacatcttcgtgtgcccagggaccctgcagaaggtgctggagcccacctcgacacacgagtcagagcaccagtctggcgcatggtgcaaggacccgctgcaggcgggtgaccgcatctacgtgatgccctggatcccctaccgcacggacacactgactgagtatgcctcgtgggaggactacgtggccgcccgccacaccaccacctaccgcctgcccaaccgcgtggatggcacaggctttgtggtctacgatggtgccgtcttctacaacaaggagcgcacgcgcaacatcgtcaagtatgacctacggacgcgcatcaagagcggggagacggtcatcaataccgccaactaccatgacacctcgccctaccgctggggcggaaagaccgacattgacctggcggtggacgagaacgggctgtgggtcatctacgccactgagggcaacaacgggcggctggtggtgagccagctgaacccctacacactgcgctttgagggcacgtgggagacgggttacgacaagcgctcggcatccaacgccttcatggtgtgtggggtcctgtacgtcctgcgttccgtgtacgtggatgatgacagcgaggcggctggcaaccgcgtggactatgccttcaacaccaatgccaaccgcgaggagcctgtcagcctcaccttccccaacccctaccagttcatctcctccgttgactacaaccctcgcgacaaccagctgtacgtctggaacaactatttcgtggtgcgctacagcctggagttcgggccgcccgaccccagtgctggcccagccacttccccacccctcagcacgaccaccacagccaggcccacgcccctcaccagcacagcctcgcccgcagccaccaccccgctccgccgggcacccctcaccacgcacccagtgggtgccatcaaccagctgggacctgatctgcctccagccacagccccagtccccagcacccggcggcccccagccccgaatctacacgtgtcccctgagctcttctgcgagccccgagaggtacggcgggtccagtggccggccacccagcagggcatgctggtggagaggccctgccccaaggggactcgaggaattgcctccttccagtgtctaccagccttggggctctggaacccccggggccctgacctcagcaactgcacctccccctgggtcaaccaggtggcccagaagatcaagagtggggagaacgcggccaacatcgccagcgagctggcccgacacacccggggctccatctacgcgggggacgtctcctcctctgtgaagctgatggagcagctgctggacatcctggatgcccagctgcaggccctgcggcccatcgagcgcgagtcagccggcaagaactacaacaagatgcacaagcgagagagaacttgtaaggattatatcaaggccgtggtggagacagtggacaatctgctccggccagaagctctggagtcctggaaggacatgaatgccacggagcaggtgcacacggccaccatgctcctcgacgtcctggaggagggcgccttcctgctggccgacaatgtcagggagcctgcccgcttcctggctgccaaggagaacgtggtcctggaggtcacagtcctgaacacagagggccaggtgcaggagctggtgttcccccaggaggagtacccgagaaagaactccatccagctgtctgccaaaaccatcaagcagaacagccgcaatggggtggtcaaagttgtcttcatcctctacaacaacctgggcctcttcctgtccacggagaatgccacagtgaagctggccggcgaagcaggcccgggtggccctgggggcgcctctctagtggtgaactcacaggtcatcgcagcatccatcaacaaggagtccagccgcgtcttcctcatggaccctgtcatcttcaccgtggcccacctggaggacaagaaccacttcaatgctaactgctccttctggaactactcggagcgttccatgctgggctactggtcgacccaaggctgccgcctggtggagtccaacaagacccataccacgtgtgcctgcagccacctcaccaacttcgctgtgctcatggctcaccgtgagatctaccagggccgcatcaacgagctgctgctgtcggtcatcacctgggtgggcattgtgatctccctggtctgcttggccatctgcatctccaccttctgcttcctgcgggggctgcagaccgaccgcaacaccatccacaagaacctgtgcatcaacctcttcctggctgagctgctcttcctggtcgggatcgacaagactcagtatgagattgcctgccccatcttcgccggcctgctgcactatttcttcctggctgccttctcctggctgtgcctggagggcgtgcacctctacctgctactagtggaggtgtttgagagcgagtattcccgcaccaagtactactacctgggtggctactgcttcccggccctggtggtgggcatcgcggctgccattgactaccgcagctacggcaccgagaaggcctgctggctccgagtggacaattacttcatctggagtttcatcgggccagtctccttcgttatcgtggtcaacctggtgttcctcatggtgaccctgcacaagatgatccgaagctcatctgtgctcaagcccgactccagccgcctggacaacattaaatcctgggcgctgggggccatcgcgctgctgttcctgctgggcctcacctgggctttcggcctcctcttcatcaacaaggagtcggtggtcatggcctatctcttcaccaccttcaacgccttccagggggtcttcatcttcgtctttcactgcgccttacagaagaaggtgcacaaggagtacagcaagtgcctgcgtcactcctactgctgcatccgctccccacccgggggcactcacggatccctcaagacctcagccatgcgaagcaacacccgctactacacagggacccagagccgaattcggaggatgtggaatgacactgtgaggaaacagacggagtcctccttcatggcgggtgacatcaacagcacccccaccctgaaccgaggtaccatggggaaccacctgctgaccaaccccgtgctgcagccccgtgggggcaccagtccctacaacaccctcatcgccgagtcagtgggcttcaatccctcctcgccccctgtcttcaactccccagggagctaccgggaacccaagcaccccttgggaggccgggaagcctgtggcatggacaccctgcccctgaacggcaacttcaataacagttactccttgcgaagtggggatttccctcccggggatgggggccctgagccgccccgaggccggaacctagccgatgcggcggcctttgagaagatgatcatctcagagctggtgcacaacaacctgcgggggagcagcagcgcggccaagggccctccaccgcctgagccccctgtgccacctgtgccagggggcgggggcgaggaagaggcgggcgggcccgggggtgctgaccgggccgagattgaacttctctataaggccctggaggagcctctgctgctgccccgggcccagtcggtgctgtaccagagcgatctggacgagtcggagagctgcacggccgaggacggcgccaccagccggcccctctcctcccctcctggccgggactccctctatgccagcggggccaacctgcgggactcaccctcctacccggacagcagccctgaggggcccagtgaggccctgcccccaccccctcccgcaccccccggcccccccgaaatctactacacctcgcgcccgccagccctggtggcccggaatcccctgcagggctactaccaggtgcggcgtcctagccacgagggctacctggcagccccaggccttgaggggccagggcccgatggggacgggcagatgcagctggtcaccagtctctgagggcacctcatggaccaggggctggtggcccaggccagggagggaaccctgggcagggctctggtgggagagggagacagatggaggcagtggctggtgggccactctctccaggtgcccctcagccatgggccctacagtcccctcaggggactctaacctgggggcctgaggtgccagggttcacagacagggtttcccaccagccacacgcaccagctctatttgggggaagtgtagtgaggaggagcccagaggaccccaggggagtgaggagggagaacttggaagggtgcagcccacttccagactctcccctctcccacccttctaccctgtgaagggaaatgagggctttagtttcctgggcagggaggggcagcttctgaggttgccaaaggcccccactggatggaacctgttagctgctcctctccgcagccagaaatgctgccggctgcacccagagggagcagtgaggcaggacagatggacaggttcctcctgcgctgtaattccctgctccctggagactgggaaaaggccgcagggcagggggactgggcggtggtggctggtggtttaaaggttgaactttctctgaagctcctttccccttgctcttggtccctgccccgcaagcaaacctgccccctctgcctcccagtgcacccaatgaccccctcccttggggcgactcctgatgaagcacaactccccgcagggcccccagcccacaggggtggccatatttgggcagttcccagtcctgtgggctcggctatctggggagcagattttgggtctggatctccctggggagtgggtcctgggcttggatctttccctagggggccctcttactccttcctctctcctcctccttccccattgctgtaaatatttcaacgaaatggaaaagaaaaaaaaaagacaaaaaaaaaaaaaaagaaaagaaaaaaaatctcatcacttgaagccaccgggagcctgcggcccgggccagcccgggctttctccggagcagagcagcgctgctggcctggcagccaggacttctccgtgtacgtgcatccccagtccccgccggggcgggcgggccgccagagcagctttttacaatccagagacagaaaacaaaatctagatgcaacagcgaaacaaagaacccatttccttcctggcaccctcctttcctgctccgcctgcccggcatcatcagcccttctggggcgtgtacctctcactgcctgccccaggaccagaggcctgtctcccccttccctccccaccggcccgggggagacctcttcacacccaaagatgctttgtcaagatggctgcgctgtccctttgagttcctgcttcttgtatattgctctggggactctcgccggggaagatggggctgatttcccacctagagaggttgatggcagaaggaaaatggggaggcactggggttgtggagggcatgggtatggctgaggagggtgctgggaacggcaaggcggtctgggggatggggaggggcaaaggtgagagatcaccttccctatcctccaccttcccgcagggaagacgaagccaggtgccagggctggggtcgggacacccatgttctgggcggcttgaccccaaatcccagaccccggaagctccaggctcgggatgtgtcctgagcacctgtcccggccccctcctctccagcctgtcaggccagcctccccagcccccttccctcaactctaggggcagcatagccccaggccaccctagcccagcccctgcattgccgtttccccagaggtggcccctccacctctgctctgacctctccccatctctctgcccctccttttctcacaagtgccatgagttttcaaacatcttcgggtctcagcctgctgctgccatgaactttgttgggttaagggggaggggctctaggaaggaactggggggaaggggacaggtaggtggctggagggaccctttttgctgctagaaagcccctcccttctcccggggagctggggctggcttgtccccatcaattaggggagaaggggtcagaccaaagatggtggtttgtcccgtgtaagggaacaggtgtggggaagaggtggggttgggttccaactctggctttttctggtagaaaggcctaacccattacaccagaagaccatgggtgaagtctagatggggaggagaagtgaggccagggacagtcttgccagacgactctgaggagggcaagggacagttccatggcccttcccggactgcactaggctgggagctctgttgtgtggaggggtggtcagaggtctgtgaagagcgggcaggaggcatgagcaggcgaggagctggcctgtcccgggaagcagcccagcctgtggctgcccccgacaccaggaggagggccaggagagttccagggggctgaggcacacagagaggccaacttcctccctgcccagccttccttgtatctctccagactcggacaatcaaagggagagagggtgtatcgggtcctgttccagccggcatcgccgggtggcttccaggcctcagagctgtgtggcagggccccctgctggggctggacatcactgcagtccagtgcaaagccgcccccagagcccaggtgtccccccaacctaaccagacctggtgccttgacgcccccaccccagctgggacggtacagagaagggtcttggtttcctctcctactcccttccttaggctcctgaactcgtttgctcctaaatcttgttaattctttttctctggattttggtttcttttggctttcccttgccttcccctttctctgtctccaacactctttccccatgtctttctggctgtctctatgttcctcttctcttatcctcaactttctgtccattcgggcctcctccccacctcccacgccccagcccctccctccttggtctccttttcgatatgccaaaccaattttgggtcgagtgcatttaacgagaacaaaacaaaaggctcataacaacaagaacgtttcagaaaaaaacaaaaagttttaaaaaaattgttgagtcaaaaagtcaaacaataaagaaattaagatttcttggaatgacaaga

SEQ ID NO: 183185 - DNA, 4410 bp, Artificial Sequence
  derived and/or modified sequence
atggcccggctggccgctgtgctgtggaacctgtgtgtgacagctgtgctggtgaccagcgccacccagggcctgagccgggccggcctgcccttcggcctgatgaggcgggagctggcctgtgagggctaccccatcgagctgcgctgccccggcagtgatgtgatcatggtggagaatgccaactacggccgcacagatgacaagatctgtgatgctgaccccttccagatggagaatgtgcagtgctacctgcctgatgccttcaagatcatgagccagcgctgcaacaacagaacccagtgtgtggtggtggccggcagtgatgccttcccagacccctgccccggcacctacaagtacctggaggtgcagtatgactgtgtgccctacatctttgtgtgccccggcaccctgcagaaggtgctggagcccaccagcacccatgaaagtgagcaccagagcggggcctggtgcaaggaccccctgcaggccggggaccgcatctacgtgatgccctggatcccctacagaacagacaccctgacagaatatgcctcctgggaggactatgtggccgcccggcacaccaccacctaccgcctgcccaacagagtggatggcactggatttgtggtgtatgatggagctgtgttctacaacaaggagaggaccaggaacatcgtgaagtatgacctgcggacccgcatcaagtctggagagaccgtcatcaacacagccaactaccatgacaccagcccctaccgctggggcggcaagacagacatcgacctggccgtggatgaaaatggcctgtgggtgatctatgccacagagggcaacaacggccgcctggtggtgtcccagctgaacccctacaccctgcgctttgagggcacctgggagaccggctatgacaagaggtctgccagcaatgccttcatggtgtgtggggtgctgtatgtgctgcggtctgtgtatgtggatgatgacagcgaggccgccggcaacagagtggactatgccttcaacaccaatgccaaccgggaggagcctgtgtccctgaccttccccaacccctaccagttcatcagctctgtggactacaacccccgggacaaccagctgtatgtgtggaacaactactttgtggtgcgctacagcctggagtttggacctccagaccccagcgctggccctgccaccagcccccccctgagcaccaccaccacagcccggcccacccccctgaccagcacagccagccctgctgccaccacccccctgcggcgggcccccctgaccacccaccctgtgggcgccatcaaccagctgggccctgacctgcccccagccacagcccctgtgcccagcacccggcggcccccagcccccaacctgcacgtgtccccagagctgttctgtgagccccgggaggtgagaagagtgcagtggccagccacccagcagggcatgctggtggagcggccctgccccaagggcacccggggcatcgccagcttccagtgcctgcctgccctgggcctgtggaacccccggggccctgacctgagcaactgcaccagcccctgggtgaaccaggtggcccagaagatcaagtctggagaaaatgctgccaacatcgccagcgagctggcccggcacacccggggcagcatctatgctggagatgtgagcagctctgtgaagctgatggagcagctgctggacatcctggatgcccagctgcaggccctgcggcccatcgagcgggagagcgctgggaagaactacaacaagatgcacaagcgggagaggacctgcaaggactacatcaaggctgtggtggagaccgtggacaacctgctgcggcctgaggccctggagagctggaaggacatgaatgccacagagcaggtgcacacagccaccatgctgctggatgtgctggaggagggcgccttcctgctggccgacaacgtgcgggagcccgcccgcttcctggccgccaaggaaaatgtggtgctggaggtgacagtgctgaacacagagggccaggtgcaggagctggtgttcccccaggaggagtaccccaggaagaacagcatccagctgagcgccaagaccatcaagcagaacagcagaaatggagtggtgaaggtggtgttcatcctgtacaacaacctgggcctcttcctgagcacagaaaatgccaccgtgaagctggccggggaggccggccctgggggccctggaggagccagcctggtggtgaacagccaggtgattgctgccagcatcaacaaggagagcagcagggtcttcctgatggaccctgtgatcttcaccgtggcccacctggaggacaagaaccacttcaatgccaactgcagcttctggaactacagcgagaggtccatgctgggctactggagcacccagggctgccgcctggtggagagcaacaagacccacaccacctgtgcctgcagccacctgaccaactttgctgtgctgatggcccaccgggagatctaccagggccgcatcaatgagctgctgctgagcgtcatcacctgggtgggcatcgtcatcagcctggtgtgcctggccatctgcatcagcaccttctgcttcctgcggggcctgcagacagacaggaacaccatccacaagaacctgtgcatcaacctcttcctggccgagctgctcttcctggtgggcatcgacaagacccagtatgagatcgcctgccccatctttgctggcctgctgcactacttcttcctggccgccttctcctggctgtgcctggagggcgtgcacctgtacctgctgctggtggaggtgtttgaaagtgagtacagcaggaccaagtactactacctgggcggctactgcttccctgccctggtggtgggcattgctgctgccatcgactaccgctcctatggaacagagaaggcctgctggctgcgggtggacaactacttcatctggagcttcatcggccctgtgtcctttgtgattgtggtgaacctggtgttcctgatggtgaccctgcacaagatgatccgcagcagctctgtgctgaagccagacagcagccggctggacaacatcaagtcctgggccctgggcgccatcgccctgctcttcctgctgggcctgacctgggccttcggcctgctcttcatcaacaaggagagcgtggtgatggcctacctgttcaccaccttcaatgccttccagggcgtcttcatctttgtgttccactgtgccctgcagaagaaggtgcacaaggagtacagcaagtgcctgcggcacagctactgctgcatccgcagccccccaggcggcacccacggcagcctgaagaccagcgccatgaggagcaacacccgctactacacaggcacccagagccgcatccggaggatgtggaatgacacagtgaggaagcagacagagagcagcttcatggccggggacatcaacagcacccccaccctgaacagaggcaccatgggcaaccacctgctgaccaaccctgtgctgcagccccggggcggcaccagcccctacaacaccctgattgctgagagcgtgggcttcaaccccagcagcccccctgtgttcaacagccctggcagctaccgggagcccaagcaccccctgggcggccgggaggcctgtggcatggacaccctgcccctgaatggaaacttcaacaacagctacagcctgcggagcggggacttccccccaggagatggcggccctgagcccccccggggcaggaacctggctgatgctgctgcctttgagaagatgatcatcagcgagctggtgcacaacaacctgcggggcagcagcagcgctgccaagggccccccacctcctgagccccctgtgccccctgtgcctgggggcggcggggaggaggaggccggcggccctgggggcgctgacagagctgagattgagctgctgtacaaggccctggaggagcccctgctgctgccccgggcccagagcgtgctgtaccagagcgacctggatgagagcgagagctgcacagcagaagatggagccaccagccggcccctgagcagccccccaggccgggacagcctgtatgccagcggggccaacctgcgggacagccccagctacccagacagcagccctgagggccccagcgaggccctgcccccacctcctccagcccctcctggccccccagagatctactacaccagccggcccccagccctggtggccaggaaccccctgcagggctactaccaggtgagaagacccagccatgagggctacctggccgcccctggcctggagggccctggcccagatggagatggccagatgcagctggtgaccagcctgtag

SEQ ID NO: 183186 - DNA, 4410 bp, Artificial Sequence
  derived and/or modified sequence
atggcccggctggccgccgtgctgtggaacctgtgcgtgaccgccgtcctggtgacatctgcaactcagggtctcagtagggccggtttaccgttcggcctcatgcgcagggaactcgcatgtgagggatatccaatcgagttacgctgccccggctctgatgtaatcatggtggagaacgcgaattacggcagaacggacgacaagatttgcgatgcagaccctttccagatggagaacgtccagtgctacttgcccgacgctttcaaaatcatgagccaaagatgcaacaatagaacccagtgtgtggttgtcgccggttccgacgcctttccagatccctgtccaggcacctacaagtatttggaggtgcagtacgactgcgtaccctatatctttgtctgcccggggaccctgcagaaggtgcttgagcccaccagcacacacgagagcgaacaccaaagcggagcctggtgcaaagatccacttcaagcgggtgaccgcatctacgtgatgccttggatcccttatagaaccgacacgctgacagaatacgctagctgggaagattatgtagctgccaggcacacaacaacatatcgactgccgaaccgcgtggatggaaccggtttcgtcgtctacgatggtgccgtattttacaacaaagaaaggacccgcaacatcgtgaaatacgacctgcggacgcgcataaaatctggggagacagttattaataccgcaaactaccatgatacaagcccatacagatgggggggcaaaaccgacatagatctggccgtggacgaaaatggactgtgggtcatctacgctacggagggaaacaacggccgccttgttgtgtcgcaactcaatccttataccctgagatttgagggaacctgggaaaccggttatgataaacgtagtgcaagtaacgccttcatggtgtgtggggtgctgtacgttttaaggagtgtatatgtggacgacgatagcgaagctgccggaaatagggtggattacgcgtttaacaccaatgccaacagggaagagccagtgtcactgaccttccccaatccctatcagttcatcagttccgtggattacaacccaagggacaatcaattatatgtttggaataattactttgtcgtcagatactccttggagttcgggcctcctgacccctccgccgggcctgccacttcacccccactgagcacaaccaccaccgccaggcctacccccctcacttcgacggcatccccagccgctaccactcccctaaggcgtgcccccctcacaacccatcctgttggagccattaatcaactcggtccggatttacctcccgccacagcacccgtgccgagcaccaggagaccacccgccccaaacctccacgttagtccagagttattttgcgagccccgcgaagttcgacgtgtccagtggcctgcaacacagcaggggatgttggtggaaaggccatgcccaaaaggtacacgcggcatagcctcctttcaatgtttaccagcactggggttgtggaaccccagaggcccagacttgagcaactgtacatccccttgggtcaatcaggttgctcagaagatcaaatctggcgaaaatgccgcgaatatcgcctccgagctcgcccggcacacccggggatccatctacgcaggtgatgtgagctcttctgttaagctcatggagcagttacttgacattctggacgcacagttacaggctttaaggccgatcgagagagaaagtgctggcaagaactataacaagatgcacaaaagggaaaggacctgcaaggactatattaaagctgttgtggaaaccgtagacaacctcttgagacccgaggcacttgagtcctggaaggatatgaatgcgactgaacaggtccacaccgcaacgatgttgctagacgttctggaagagggtgcgtttctgctggccgacaacgtccgggagcccgcacggttcttggctgccaaggaaaacgtggttttagaagtcaccgtgctcaatacagagggtcaggtgcaggagctggtgttcccacaggaagaataccctagaaagaacagcattcagctgtccgcaaagacaattaagcagaactctcgtaacggagttgtgaaggtggtgttcatcctgtataataacctgggtcttttcctgagcacagaaaacgcgactgtcaagcttgctggggaggccggccccggcggccctggaggtgcatctctcgttgtgaacagccaggtgattgcagcttccattaataaggaatcatccagagtgttcctgatggatcctgtcatttttacagttgcgcacttagaggacaagaatcatttcaacgccaactgttccttctggaactatagtgaacgatcaatgctgggctattggagcacacagggctgtcgcctcgtggaaagcaataagacccacacaacttgtgcctgctcgcatttgactaacttcgccgtgctgatggcgcacagggagatttaccagggtcggattaatgagcttctgctgagcgtaatcacttgggtggggattgtgatctctctcgtgtgccttgctatttgtattagcacattctgcttcttgagaggtttgcaaacagaccgcaacactatacacaaaaacctgtgcatcaacctctttttagctgagctgctgtttcttgtgggaatcgataagacgcaatacgaaatcgcctgtcctattttcgccggcctgctgcattactttttcctggctgccttttcgtggctttgcctcgagggggtgcacctatatctgctccttgtcgaggtgtttgagagcgagtatagccgaaccaagtactattacttgggcgggtattgctttcccgccctggttgtgggcatagccgctgccatagactatcggagttacggcactgaaaaggcttgttggctaagggtcgataattacttcatttggtcattcatcgggccagtcagctttgttatcgtggtcaatcttgtgttcttgatggttacacttcacaagatgatccgatctagcagcgtgcttaaacccgacagctccaggttggacaacatcaaaagttgggctttaggggccattgcattactgtttctgttggggctgacttgggcatttggtttactgttcatcaacaaagagtccgtagtgatggcctacctcttcaccacatttaacgcattccagggtgtttttatttttgtcttccactgtgctctccagaaaaaagtgcacaaagaatattccaagtgtctgcggcatagctactgctgtatccggtccccgccaggcggtactcacggatcccttaaaacttcagctatgcgctcaaacacacgctactacaccggaactcaatctagaattcgtcgaatgtggaacgataccgtccgcaagcagaccgagtccagcttcatggctggggatattaatagcactccaacattgaacagaggaactatggggaaccacctacttacaaaccccgtgctgcagccccgggggggaacctcaccgtacaataccctgattgcagaatccgtgggatttaatccaagctccccacccgtgtttaattccccagggagctaccgggaacccaagcacccccttggagggcgggaggcctgcggcatggatacgctccctctgaatgggaattttaataattcctattcactgaggtcaggtgattttccccctggtgacggcggacctgaacccccgaggggcagaaatctggcggatgccgcagcctttgagaagatgataatctccgaactggtgcataacaatctgaggggctcctcttcagcagccaaaggaccacctccacctgagccgccggtgcctccagtgcctggagggggtggggaggaggaagccggtggacccggaggagccgatcgcgccgaaattgaattgctatataaggcgctggaagaacctcttttgctccccagagcccagagtgtgctgtatcagagtgacctggacgagagcgaatcttgcactgccgaagacggagccaccagccgcccgctttctagtcctcctggtagggacagcctgtacgcctccggagcaaatcttcgggactcaccttcctatcctgacagcagccccgagggcccatccgaagcgcttcctcccccccctcccgctccacccggccctcccgagatctactataccagccgcccgccagccctcgtagcgcgcaacccccttcaagggtactaccaggtgagacggccgagccacgagggttacctggcggccccaggtcttgaggggcctggcccagacggcgacggtcagatgcagctggtaacgtccttatag

SEQ ID NO: 183187 - DNA, 4410 bp, Artificial Sequence
  derived and/or modified sequence
atggccaggctggcggcagttttgtggaacctctgcgttacagcggtcctggttactagcgctactcaagggctcagcagagcaggattgccctttggactgatgagaagagagctggcctgtgagggttaccccatcgaactgaggtgccctggaagcgatgtcattatggtggagaacgcgaactatgggaggaccgacgacaaaatctgcgacgccgatcctttccagatggagaatgtgcaatgttatttaccggatgccttcaaaattatgtcgcagcggtgcaataatagaacccagtgcgtcgtggtcgccggaagcgacgcatttccagacccttgccccggaacctacaagtacctagaggtccagtatgattgcgttccttatatattcgtgtgtcccggtacacttcagaaagtgctggagcctacctcaacgcacgagtccgaacaccaatccggggcatggtgcaaagaccctttgcaggcaggtgatcggatctatgttatgccctggatcccttatagaaccgacacccttaccgaatatgcttcctgggaggactacgtggccgcaaggcacaccaccacatatcgactgcccaatcgtgtggacggaacgggatttgtggtctacgatggcgctgtcttttataataaagagagaactcgcaatattgtaaagtacgaccttcggacccgaatcaagtctggggaaaccgtcatcaacacagctaactatcacgatactagcccgtatcgatggggtggtaaaaccgacatcgacctggccgtggatgaaaacggtctgtgggttatctacgccacagagggcaataatggccgattggtcgtgtcacaactaaatccttatacactcagattcgaaggcacctgggaaacgggttatgataaacgctcagcatccaacgccttcatggtatgtggcgtgctctacgtactgcgttcagtatacgttgacgatgatagcgaggcggctggcaatagggtcgactacgcctttaatacgaacgcgaatagggaggaacctgtttccctgacctttccaaatccataccaattcatctcttctgtggattataacccccgagacaatcagctatatgtgtggaataattattttgtggtcaggtactccctagaatttggccctcctgatcccagcgctggcccagcgacctctccccctctcagtaccactaccacagcaaggcccactcctctgacctcaactgcgagccccgcagcaaccactcctttgcggagagcacctttgacaactcacccagtaggcgcaatcaaccagttaggacccgatctgcctccggctacagcgccagtaccttctacacgacggcctccagccccaaatttgcacgtctctcccgagctcttttgcgaaccacgcgaagtaagacgggtgcagtggcccgcaacgcaacagggtatgctggtggaacgtccttgtccaaaggggactcgagggatagcatcttttcagtgcctcccagctctgggactttggaaccctagaggcccagacctgtccaattgcacctccccttgggtgaaccaagtggcccagaagatcaaaagtggtgaaaacgccgcaaatattgcaagcgagcttgccaggcacactcgaggcagcatctacgcaggtgatgtgtcatccagcgtgaagctcatggaacaactcctggacatcctggacgcacagttgcaggccctccgccctattgagagagagtctgctggcaagaattacaacaaaatgcacaagcgcgaacgcacttgcaaagactatatcaaagcagtcgtggagacggtcgacaatctcctgaggcctgaggcactggagagctggaaggacatgaatgccactgaacaggttcataccgccaccatgttgctggacgtgctggaggagggagccttcctgctggcggacaacgtacgtgagcccgctcgcttcctggccgctaaagaaaacgtggtgctcgaggttacggtcctgaacactgagggccaggtacaagagctggtatttcctcaggaggaatatcccagaaagaacagcatacagctttctgccaagacaatcaaacagaattctcggaacggcgtggtgaaggtcgtgtttatcctttacaataacctgggcctattcctaagcactgaaaatgctaccgtgaaactggccggtgaggctggcccaggcggacccggtggcgcttctctggtcgtgaacagccaggttatcgctgcatcaattaataaagagtctagccgggtattcttaatggatcccgtgattttcaccgttgcccatctggaggacaagaatcacttcaatgctaattgcagcttctggaactactctgaaagatcaatgttaggatattggagcacacaggggtgtcggttagtagaatcgaacaagacccacaccacctgcgcttgctctcaccttaccaacttcgcagtgctgatggcccaccgggagatttaccaaggacgtattaatgagttgctactatcagtaatcacctgggtcggtatcgtcatctccctggtgtgtctggccatctgtatctccaccttttgcttcctgaggggtttgcaaactgaccgaaatacaatccacaagaatctgtgcatcaatctgttcttagctgaacttctatttctggtcggaatagacaaaacccaatacgagatcgcatgtcctattttcgcaggccttttgcactacttttttctcgccgctttctcatggctctgtctggaaggagtgcacttgtatttactcctcgtggaagttttcgagagtgagtactcacgtaccaagtactactatctgggcggatattgtttccctgccttggtggtggggatcgccgcagccatcgactataggtcctacggaactgagaaggcttgctggctgagagtggataattatttcatatggtcatttatcggtcctgttagcttcgtaatcgtcgtgaaccttgtcttcttgatggttacactccacaagatgattagatcctcttccgtcctgaaacccgattcctcacggctagacaacataaagagttgggcattaggggcaattgcgctcctcttcctcctaggcctgacatgggcattcggtctcctctttatcaataaagaaagtgtcgtcatggcctacctcttcactacgttcaacgcatttcagggcgtgtttatcttcgtgtttcactgtgctctgcaaaagaaggtgcataaagagtacagcaaatgcttacggcatagctactgttgcatcagatctcccccaggaggcacgcacggtagtctcaagacctccgctatgcgttccaataccagatactacacagggacacaatcccgcatccggcgaatgtggaatgacacagtccgaaaacagactgaaagcagtttcatggccggagacatcaattccacacctacgctgaacaggggaaccatgggaaaccacctcctcaccaaccctgtgctgcaaccccgtggaggcacatccccatacaacactttaatcgccgagtccgttggattcaacccaagctccccacctgtgttcaacagtcccggatcctaccgggaaccgaagcatcctttagggggacgggaggcttgtgggatggatacactaccccttaatggtaattttaacaactcatatagcttaagaagcggagattttccacctggggatggcggacctgagccgccacggggacggaaccttgcagatgcagccgctttcgagaagatgatcatctctgaacttgtgcacaacaatcttcgcggaagctcttcagctgcaaaagggccaccgccacctgagcctcccgtcccccctgttccagggggtggcggtgaggaagaggcaggaggccctggcggtgccgaccgcgctgagattgagctgttgtacaaagctctggaggagcccctcctgttgccacgcgcacagagcgtgctgtaccagtccgacctcgacgaatcggaaagctgcacagcagaggacggtgctacctcgcgcccattgtctagtcctcctggtcgagatagtctttacgcgtcaggcgctaatctccgcgattccccttcttaccctgatagttctccagaaggccctagcgaggccttgccaccaccgccacccgctccacccggaccgccagagatctactatacttccagaccacccgctcttgtcgcccgtaaccctttgcaaggctattatcaggttcggagaccttctcatgaagggtatctggctgccccaggccttgaaggtcctgggccagacggagacggccagatgcaactagtgacgtctctgtag

SEQ ID NO: 183188 - protein, 1429 aa, Artificial Sequence
  derived and/or modified sequence
MAGGAWGRLACYLEFLKKEELKEFQLLLANKAHSRSSSGETPAQPEKTSGMEVASYLVAQYGEQRAWDLALHTWEQMGLRSLCAQAQEGAGHSPSFPYSPSEPHLGSPSQPTSTAVLMPWIHELPAGCTQGSERRVLRQLPDTSGRRWREISASLLYQALPSSPDHESPSQESPNAPTSTAVLGSWGSPPQPSLAPREQEAPGTQWPLDETSGIYYTEIREREREKSEKGRPPWAAVVGTPPQAHTSLQPHHHPWEPSVRESLCSTWPWKNEDFNQKFTQLLLLQRPHPRSQDPLVKRSWPDYVEENRGHLIEIRDLFGPGLDTQEPRIVILQGAAGIGKSTLARQVKEAWGRGQLYGDRFQHVFYFSCRELAQSKVVSLAELIGKDGTATPAPIRQILSRPERLLFILDGVDEPGWVLQEPSSELCLHWSQPQPADALLGSLLGKTILPEASFLITARTTALQNLIPSLEQARWVEVLGFSESSRKEYFYRYFTDERQAIRAFRLVKSNKELWALCLVPWVSWLACTCLMQQMKRKEKLTLTSKTTTTLCLHYLAQALQAQPLGPQLRDLCSLAAEGIWQKKTLFSPDDLRKHGLDGAIISTFLKMGILQEHPIPLSYSFIHLCFQEFFAAMSYVLEDEKGRGKHSNCIIDLEKTLEAYGIHGLFGASTTRFLLGLLSDEGEREMENIFHCRLSQGRNLMQWVPSLQLLLQPHSLESLHCLYETRNKTFLTQVMAHFEEMGMCVETDMELLVCTFCIKFSRHVKKLQLIEGRQHRSTWSPTMVVLFRWVPVTDAYWQILFSVLKVTRNLKELDLSGNSLSHSAVKSLCKTLRRPRCLLETLRLAGCGLTAEDCKDLAFGLRANQTLTELDLSFNVLTDAGAKHLCQRLRQPSCKLQRLQLVSCGLTSDCCQDLASVLSASPSLKELDLQQNNLDDVGVRLLCEGLRHPACKLIRLGLDQTTLSDEMRQELRALEQEKPQLLIFSRRKPSVMTPTEGLDTGEMSNSTSSLKRQRLGSERAASHVAQANLKLLDVSKIFPIAEIAEESSPEVVPVELLCVPSPASQGDLHTKPLGTDDDFWGPTGPVATEVVDKEKNLYRVHFPVAGSYRWPNTGLCFVMREAVTVEIEFCVWDQFLGEINPQHSWMVAGPLLDIKAEPGAVEAVHLPHFVALQGGHVDTSLFQMAHFKEEGMLLEKPARVELHHIVLENPSFSPLGVLLKMIHNALRFIPVTSVVLLYHRVHPEEVTFHLYLIPSDCSIRKELELCYRSPGEDQLFSEFYVGHLGSGIRLQVKDKKDETLVWEALVKPGDLMPATTLIPPARIAVPSPLDAPQLLHFVDQYREQLIARVTSVEVVLDKLHGQVLSQEQYERVLAENTRPSQMRKLFSLSQSWDRKCKDGLYQALKETHPHLIMELWEKGSKKGLLPLSS

SEQ ID NO: 183189 - protein, 508 aa, Artificial Sequence
  derived and/or modified sequence
MAHFEEMGMCVETDMELLVCTFCIKFSRHVKKLQLIEGRQHRSTWSPTMVVLFRWVPVTDAYWQILFSVLKVTRNLKELDLSGNSLSHSAVKSLCKTLRRPRCLLETLRLAGCGLTAEDCKDLAFGLRANQTLTELDLSFNVLTDAGAKHLCQRLRQPSCKLQRLQLVSCGLTSDCCQDLASVLSASPSLKELDLQQNNLDDVGVRLLCEGLRHPACKLIRLGLDQTTLSDEMRQELRALEQEKPQLLIFSRRKPSVMTPTEGLDTGEMSNSTSSLKRQRLGSERAASHVAQANLKLLDVSKIFPIAEIAEESSPEVVPVELLCVPSPASQGDLHTKPLGTDDDFWGPTGPVATEVVDKEKNLYRVHFPVAGSYRWPNTGLCFVMREAVTVEIEFCVWDQFLGEINPQHSWMVAGPLLDIKAEPGAVEAVHLPHFVALQGGHVDTSLFQMAHFKEEGMLLEKPARVELHHIVLENPSFSPLGVLLKMIHNALRFIPVTSVVLLYHRPS

SEQ ID NO: 183190 - DNA, 4290 bp, Artificial Sequence
  derived and/or modified sequence
atggccggcggcgcctggggcagactggcctgctacctggagttcctgaagaaggaggagctgaaggagttccagctgctgctggccaacaaggcccacagcagaagcagcagcggcgagacccccgcccagcccgagaagaccagcggcatggaggtggccagctacctggtggcccagtacggcgagcagagagcctgggacctggccctgcacacctgggagcagatgggcctgagaagcctgtgcgcccaggcccaggagggcgccggccacagccccagcttcccctacagccccagcgagccccacctgggcagccccagccagcccaccagcaccgccgtgctgatgccctggatccacgagctgcccgccggctgcacccagggcagcgagagaagagtgctgagacagctgcccgacaccagcggcagaagatggagagagatcagcgccagcctgctgtaccaggccctgcccagcagccccgaccacgagagccccagccaggagagccccaacgcccccaccagcaccgccgtgctgggcagctggggcagccccccccagcccagcctggcccccagagagcaggaggcccccggcacccagtggcccctggacgagaccagcggcatctactacaccgagatcagagagagagagagagagaagagcgagaagggcagacccccctgggccgccgtggtgggcacccccccccaggcccacaccagcctgcagccccaccaccacccctgggagcccagcgtgagagagagcctgtgcagcacctggccctggaagaacgaggacttcaaccagaagttcacccagctgctgctgctgcagagaccccaccccagaagccaggaccccctggtgaagagaagctggcccgactacgtggaggagaacagaggccacctgatcgagatcagagacctgttcggccccggcctggacacccaggagcccagaatcgtgatcctgcagggcgccgccggcatcggcaagagcaccctggccagacaggtgaaggaggcctggggcagaggccagctgtacggcgacagattccagcacgtgttctacttcagctgcagagagctggcccagagcaaggtggtgagcctggccgagctgatcggcaaggacggcaccgccacccccgcccccatcagacagatcctgagcagacccgagagactgctgttcatcctggacggcgtggacgagcccggctgggtgctgcaggagcccagcagcgagctgtgcctgcactggagccagccccagcccgccgacgccctgctgggcagcctgctgggcaagaccatcctgcccgaggccagcttcctgatcaccgccagaaccaccgccctgcagaacctgatccccagcctggagcaggccagatgggtggaggtgctgggcttcagcgagagcagcagaaaggagtacttctacagatacttcaccgacgagagacaggccatcagagccttcagactggtgaagagcaacaaggagctgtgggccctgtgcctggtgccctgggtgagctggctggcctgcacctgcctgatgcagcagatgaagagaaaggagaagctgaccctgaccagcaagaccaccaccaccctgtgcctgcactacctggcccaggccctgcaggcccagcccctgggcccccagctgagagacctgtgcagcctggccgccgagggcatctggcagaagaagaccctgttcagccccgacgacctgagaaagcacggcctggacggcgccatcatcagcaccttcctgaagatgggcatcctgcaggagcaccccatccccctgagctacagcttcatccacctgtgcttccaggagttcttcgccgccatgagctacgtgctggaggacgagaagggcagaggcaagcacagcaactgcatcatcgacctggagaagaccctggaggcctacggcatccacggcctgttcggcgccagcaccaccagattcctgctgggcctgctgagcgacgagggcgagagagagatggagaacatcttccactgcagactgagccagggcagaaacctgatgcagtgggtgcccagcctgcagctgctgctgcagccccacagcctggagagcctgcactgcctgtacgagaccagaaacaagaccttcctgacccaggtgatggcccacttcgaggagatgggcatgtgcgtggagaccgacatggagctgctggtgtgcaccttctgcatcaagttcagcagacacgtgaagaagctgcagctgatcgagggcagacagcacagaagcacctggagccccaccatggtggtgctgttcagatgggtgcccgtgaccgacgcctactggcagatcctgttcagcgtgctgaaggtgaccagaaacctgaaggagctggacctgagcggcaacagcctgagccacagcgccgtgaagagcctgtgcaagaccctgagaagacccagatgcctgctggagaccctgagactggccggctgcggcctgaccgccgaggactgcaaggacctggccttcggcctgagagccaaccagaccctgaccgagctggacctgagcttcaacgtgctgaccgacgccggcgccaagcacctgtgccagagactgagacagcccagctgcaagctgcagagactgcagctggtgagctgcggcctgaccagcgactgctgccaggacctggccagcgtgctgagcgccagccccagcctgaaggagctggacctgcagcagaacaacctggacgacgtgggcgtgagactgctgtgcgagggcctgagacaccccgcctgcaagctgatcagactgggcctggaccagaccaccctgagcgacgagatgagacaggagctgagagccctggagcaggagaagccccagctgctgatcttcagcagaagaaagcccagcgtgatgacccccaccgagggcctggacaccggcgagatgagcaacagcaccagcagcctgaagagacagagactgggcagcgagagagccgccagccacgtggcccaggccaacctgaagctgctggacgtgagcaagatcttccccatcgccgagatcgccgaggagagcagccccgaggtggtgcccgtggagctgctgtgcgtgcccagccccgccagccagggcgacctgcacaccaagcccctgggcaccgacgacgacttctggggccccaccggccccgtggccaccgaggtggtggacaaggagaagaacctgtacagagtgcacttccccgtggccggcagctacagatggcccaacaccggcctgtgcttcgtgatgagagaggccgtgaccgtggagatcgagttctgcgtgtgggaccagttcctgggcgagatcaacccccagcacagctggatggtggccggccccctgctggacatcaaggccgagcccggcgccgtggaggccgtgcacctgccccacttcgtggccctgcagggcggccacgtggacaccagcctgttccagatggcccacttcaaggaggagggcatgctgctggagaagcccgccagagtggagctgcaccacatcgtgctggagaaccccagcttcagccccctgggcgtgctgctgaagatgatccacaacgccctgagattcatccccgtgaccagcgtggtgctgctgtaccacagagtgcaccccgaggaggtgaccttccacctgtacctgatccccagcgactgcagcatcagaaaggagctggagctgtgctacagaagccccggcgaggaccagctgttcagcgagttctacgtgggccacctgggcagcggcatcagactgcaggtgaaggacaagaaggacgagaccctggtgtgggaggccctggtgaagcccggcgacctgatgcccgccaccaccctgatcccccccgccagaatcgccgtgcccagccccctggacgccccccagctgctgcacttcgtggaccagtacagagagcagctgatcgccagagtgaccagcgtggaggtggtgctggacaagctgcacggccaggtgctgagccaggagcagtacgagagagtgctggccgagaacaccagacccagccagatgagaaagctgttcagcctgagccagagctgggacagaaagtgcaaggacggcctgtaccaggccctgaaggagacccacccccacctgatcatggagctgtgggagaagggcagcaagaagggcctgctgcccctgagcagctag

SEQ ID NO: 183191 - DNA, 4290 bp, Artificial Sequence
  derived and/or modified sequence
atggcagggggggcctggggcagactggcctgctacctcgagttcctgaagaaagaggagctaaaagaatttcagttgctgttggccaacaaggctcattcacgcagcagctccggtgagacgccagctcaacctgagaagacgagcggcatggaagtggcatcctatctggtggcccagtacggcgagcagcgagcttgggaccttgccctgcatacatgggagcaaatgggactgcgctcactctgtgctcaggcccaggagggcgcagggcacagtccttcctttccatacagcccaagtgagcctcatctagggtcaccatcccagccaaccagcactgccgtcctgatgccatggattcatgagctgcccgcagggtgtacacagggatccgagcgccgggtcctccgtcaactgcccgacactagcggccgaaggtggagagagatctctgctagccttttgtaccaggcccttccttccagcccagatcacgagtcgccctctcaagagagccccaatgcacccacctcaacagccgttctcggatcgtggggctcccctcctcagccttcacttgcccctcgcgaacaggaagcccctggcacacaatggcctttagacgaaacaagcggaatctactatacagaaattagagagagggagcgcgagaagtctgaaaagggacggccaccctgggcagccgtggtgggcacacctccccaggcacatacaagcctacagcctcaccatcacccttgggaacccagcgtccgagaatcactgtgttcaacctggccctggaaaaacgaagactttaaccagaagttcacacagctcctgcttcttcagagaccccatcccagatcccaggaccccttggtcaaacgcagttggcccgattacgttgaagagaaccggggacaccttatcgagattagagacttattcggtcccggtctggacacacaagaaccccgcatagttatactgcagggagctgctggaatcgggaaatcaaccctggccaggcaagtgaaggaagcctggggtaggggccagctttacggagacagattccaacacgttttctacttctcatgtcgtgagcttgctcagtccaaagtggtgtcactcgctgagctcattggtaaagatggaacggctactcctgctccaattaggcagattctgtcccgcccggaacggctgctcttcatactagacggcgtagatgagccaggttgggttctgcaggaaccatcaagcgaattgtgcctccattggagccagccacagcccgctgacgccctcctcgggagcttgctgggtaaaactatccttcctgaggcgtcatttctaatcacagcgagaacaaccgcacttcagaacctaattccatcacttgagcaggcgaggtgggtggaggtgttgggattctccgaatcgagtagaaaggagtacttttatcggtatttcaccgatgaaagacaggcaatccgagcttttcggttggtaaaaagtaacaaagagctgtgggccctgtgcctggtgccatgggtgtcttggttggcctgcacgtgcttgatgcagcaaatgaagcggaaagagaagctcactctgacaagtaagactactaccaccttatgtctccactacctggcccaggctctgcaggcacagccattgggtccccagctgagagatctgtgctctctcgctgcagagggaatttggcaaaagaaaactctattctccccagatgatctgcgaaaacacggtctggacggggccattatcagtacattcctcaagatgggaatcttacaggagcatcccattccgctctcatactctttcatccacctgtgttttcaggaattcttcgcagccatgagctatgtgctcgaggacgaaaagggccgaggaaagcatagcaactgcattatagacctggagaagacattggaggcatatgggattcacggactgtttggggcgtcaactacaagattcctactggggctgttgagcgatgagggggagcgggagatggagaacatttttcactgtcggcttagccaaggtcgtaacctgatgcaatgggttcctagtctccagctacttctgcaaccgcattctttggaatcgttgcattgcctttacgaaacacggaacaagactttcttgacacaggtgatggctcatttcgaggaaatgggaatgtgcgtcgagacggatatggagcttctggtttgtactttctgcattaaatttagtagacatgtgaagaagcttcagctaattgagggcagacagcacaggtcaacgtggtcaccaaccatggtggttctctttcggtgggtgcccgtgaccgacgcctattggcagatcctgttttccgtgctcaaagtcactaggaacctcaaagagctggacctctcaggaaattccctgtctcacagcgccgttaagagtttatgcaaaacattgcgccgcccgaggtgtttgctggagaccctgaggctggctggctgcggccttacagccgaagattgcaaggatctggcgtttgggcttcgcgccaaccagactctgacagagctggacttgtccttcaacgtattaaccgatgcaggcgcaaagcacctatgccagcggctgagacagcccagttgcaaactccaacgcctgcaattagttagttgcggacttacctctgattgctgccaagaccttgcttccgttctgagtgcctccccaagtctcaaagaactggatctgcagcagaataacttggatgatgtcggggtgcgcctcctatgcgagggattgagacacccggcgtgtaagttaatccgcttgggtctggatcagactactcttagtgacgagatgaggcaggagcttcgggcactcgagcaggaaaagccacagttgcttatcttctcccgacgaaagcccagtgtcatgacccctactgaaggtctggatacaggcgaaatgtcaaattctaccagttctcttaaacgccagcgactgggaagtgaacgcgcagcatcacacgtagcccaagcaaatctcaagctgctggacgtgtccaaaatatttccaatcgcagagatagcagaggaatcatcacccgaggtcgtcccggtagagctgttgtgcgtgcctagccctgcaagccagggagacctgcacaccaagcccctcggtaccgacgatgatttctggggacctacaggtcccgttgccactgaagtggttgataaagaaaagaacttgtaccgggtgcacttcccagtcgctggctcctaccgctggcctaatacaggtctttgtttcgtaatgcgggaagctgtgacagtggagatagagttttgtgtctgggaccagttccttggagagataaatccccagcattcatggatggtggctggacctttgctcgacattaaggccgagcccggagccgttgaagccgtacatctcccacacttcgtggccctgcaaggggggcacgttgatacctccctgtttcagatggctcactttaaagaagagggaatgttgttagagaagccagcacgcgtcgaactgcatcatattgtgctcgaaaatccctctttctctcctcttggcgttcttctcaagatgatccataacgccctacggtttattccagtgacgagcgtagtcttgttgtatcatcgggtacaccctgaggaggttaccttccacctgtacttaataccaagtgactgttcaattaggaaggagctggaactgtgttataggagtcccggcgaagatcaactattctctgaattctatgtgggacatctggggagtgggatccgtctgcaggtaaaagacaagaaggacgaaacgctcgtgtgggaggctttggttaaacccggagacttgatgcctgcaacaaccctgattccccctgcgaggatcgccgttccctcccccttggatgctccacagttgctccatttcgtcgaccaataccgggaacagctcattgctcgcgtgacatcagtggaggtggttctcgataagctgcatggtcaggtactatcccaagagcagtacgaacgcgtgctcgctgaaaataccaggccatctcagatgaggaaactgttttccctaagtcaatcttgggatagaaaatgtaaggacggtctgtatcaagctcttaaagagacacatccccatctcatcatggagctttgggaaaaggggtccaaaaaggggttgcttccactgagctcgtag

SEQ ID NO: 183192 - DNA, 4290 bp, Artificial Sequence
  derived and/or modified sequence
atggccggcggggcctggggccgcctggcctgctacctggagttcctgaagaaggaggagctgaaggagttccagctgctgctggccaacaaggcccacagccgcagcagcagcggggagaccccagcccagcctgagaagaccagcggcatggaggtggccagctacctggtggcccagtatggagagcagagggcctgggacctggccctgcacacctgggagcagatgggcctgcggagcctgtgtgcccaggcccaggagggcgccggccacagccccagcttcccctacagccccagcgagccccacctgggcagccccagccagcccaccagcacagctgtgctgatgccctggatccacgagctgcctgctggctgcacccagggcagcgagcggcgggtgctgcggcagctgcctgacaccagcggccgccgctggagggagatcagcgccagcctgctgtaccaggccctgcccagcagcccagaccacgagagccccagccaggagagccccaatgcccccaccagcacagctgtgctgggctcctggggcagccccccccagcccagcctggccccccgggagcaggaggcccctggcacccagtggcccctggatgagaccagcggcatctactacacagagatccgggagcgggagcgggagaagtctgagaagggccggcccccctgggccgctgtggtgggcaccccaccccaggcccacaccagcctgcagccccaccaccacccctgggagcccagcgtgcgggagagcctgtgcagcacctggccctggaagaatgaagacttcaaccagaagttcacccagctgctgctgctgcagaggccccaccccaggagccaggaccccctggtgaagaggtcctggccagactatgtggaggagaacagaggccacctgattgagatccgggacctgtttggacctggcctggacacccaggagcccagaattgtcatcctgcagggcgccgccggcatcggcaagagcaccctggcccggcaggtgaaggaggcctggggccggggccagctgtatggagaccgcttccagcacgtgttctacttcagctgccgggagctggcccagagcaaggtggtgtccctggccgagctgattggcaaggatggaacagccaccccagcccccatccggcagatcctgagcaggcctgagcggctgctcttcatcctggatggagtggatgagcccggctgggtgctgcaggagcccagcagcgagctgtgcctgcactggagccagccccagcctgcagatgccctgctgggcagcctgctgggcaagaccatcctgcctgaggccagcttcctgatcacagcccggaccacagccctgcagaacctgatccccagcctggagcaggcccgctgggtggaggtgctgggcttcagcgagagcagcaggaaggagtacttctaccgctacttcacagatgagcggcaggccatccgggccttccggctggtgaagagcaacaaggagctgtgggccctgtgcctggtgccctgggtgtcctggctggcctgcacctgcctgatgcagcagatgaagaggaaggagaagctgaccctgaccagcaagaccaccaccaccctgtgcctgcactacctggcccaggccctgcaggcccagcccctgggcccccagctgcgggacctgtgcagcctggccgctgagggcatctggcagaagaagaccctcttctccccagatgacctgaggaagcacggcctggatggagccatcatcagcaccttcctgaagatgggcatcctgcaggagcaccccatccccctgagctacagcttcatccacctgtgcttccaggagttctttgctgccatgtcctatgtgctggaggatgagaagggccggggcaagcacagcaactgcatcatcgacctggagaagaccctggaggcctacggcatccacggcctgtttggagccagcaccacccgcttcctgctgggcctgctgagtgatgaaggagagcgggagatggagaacatcttccactgccgcctgagccagggcaggaacctgatgcagtgggtgcccagcctgcagctgctgctgcagccccacagcctggagagcctgcactgcctgtatgagaccaggaacaagaccttcctgacccaggtgatggcccactttgaggagatgggcatgtgtgtggagacagacatggagctgctggtgtgcaccttctgcatcaagttcagcagacatgtgaagaagctgcagctgattgagggccggcagcacaggagcacctggagccccaccatggtggtgctcttccgctgggtgcctgtgacagatgcctactggcagatcctcttctctgtgctgaaggtgaccaggaacctgaaggagctggacctgagcggcaacagcctgagccacagcgctgtgaagagcctgtgcaagaccctgcggcggccccgctgcctgctggagaccctgcggctggccggctgcggcctgacagctgaggactgcaaggacctggccttcggcctgcgggccaaccagaccctgacagagctggacctgtccttcaacgtgctgacagatgctggggccaagcacctgtgccagaggctgcggcagcccagctgcaagctgcagaggctgcagctggtgtcctgtggcctgaccagtgactgctgccaggacctggcctctgtgctgagcgccagccccagcctgaaggagctggacctgcagcagaacaacctggatgatgtgggcgtgcggctgctgtgtgagggcctgcggcacccagcctgcaagctgatccggctgggcctggaccagaccaccctgagtgatgagatgaggcaggagctgcgggccctggagcaggagaagccccagctgctgatcttcagcaggaggaagcccagcgtgatgacccccacagagggcctggacaccggggagatgagcaacagcaccagcagcctgaagaggcagaggctgggcagcgagcgggccgccagccacgtggcccaggccaacctgaagctgctggatgtgtccaagatcttccccatcgccgagattgctgaggagagcagccctgaggtggtgcctgtggagctgctgtgtgtgcccagccctgccagccagggcgacctgcacaccaagcccctgggcacagatgatgacttctggggccccactggacctgtggccacagaggtggtggacaaggagaagaacctgtacagagtgcacttccctgtggccggcagctaccgctggcccaacacaggcctgtgctttgtgatgagggaggccgtgacagtggagattgagttctgtgtgtgggaccagttcctgggggagatcaacccccagcacagctggatggtggccggccccctgctggacatcaaggccgagcccggggctgtggaggccgtgcacctgccccactttgtggccctgcagggcggccacgtggacaccagcctcttccagatggcccacttcaaggaggagggcatgctgctggagaagccagcccgggtggagctgcaccacatcgtgctggagaaccccagcttcagccccctgggcgtgctgctgaagatgatccacaatgccctgcgcttcatccctgtgacctctgtggtgctgctgtaccaccgggtgcaccctgaggaggtgaccttccacctgtacctgatccccagcgactgcagcatcaggaaggagctggagctgtgctaccgcagccctggagaggaccagctgttcagcgagttctacgtgggccacctgggcagcggcatccggctgcaggtgaaggacaagaaggatgagaccctggtgtgggaggccctggtgaagccaggggacctgatgcctgccaccaccctcatccccccagccagaattgctgtgcccagccccctggatgccccccagctgctgcactttgtggaccagtaccgggagcagctgattgcccgggtgacctctgtggaggtggtgctggacaagctgcacggccaggtgctgagccaggagcagtatgagcgggtgctggccgagaacacccggcccagccagatgaggaagctgttcagcctgagccagagctgggacaggaagtgcaaggatggcctgtaccaggccctgaaggagacccacccccacctgatcatggagctgtgggagaagggcagcaagaagggcctgctgcccctgagcagctag

SEQ ID NO: 183193 - DNA, 4290 bp, Artificial Sequence
  derived and/or modified sequence
atggccggcggcgcctggggccggctggcctgctacctggagttcttgaagaaggaggagttgaaggaatttcagctcctcctggcgaacaaggcacactccagatcctcatctggcgagaccccggcacaacccgaaaagacttctggtatggaagtagccagttaccttgtggcacagtacggggagcagcgagcttgggaccttgccctccatacatgggagcagatgggactcaggtctttgtgcgcgcaggctcaggaaggagctgggcactcacccagcttcccttatagcccatctgagcctcatctgggaagtcccagccagcccacctcgacggctgtgctgatgccctggatccacgagctgccggcaggctgtacccagggatcagagcgacgcgttctgcgtcaattgccagataccagcggaaggcggtggagagaaatctctgcctccctgctgtaccaagccctgccatcgtcccccgatcatgagtcgccgagtcaagaatcacccaacgcccccaccagcacagctgtgctcgggtcttgggggtcaccaccccagccttcactggcacctcgggagcaggaagcacctggcacacagtggcccctcgatgaaacttccggtatttactacactgagatacgggaaagagagagggaaaaaagtgagaagggccggccaccttgggccgcagttgtcggcactcccccgcaggctcacacatccctgcagccccaccaccatccctgggagccttccgtaagagaaagtctgtgcagcacctggccatggaagaatgaggatttcaatcagaaatttacccagctgttactgctacagagaccccaccctagatcacaggatcctctggtgaagagatcctggcccgactacgtggaggagaatcgtggacacctcattgaaattcgagatctttttggccctggattagacacccaagaacctcgcattgtaattctccaaggagctgccgggattgggaagtcaaccctggcccgtcaggtgaaggaggcctggggtcgtgggcagctgtatggcgatcgatttcaacacgttttctacttctcctgccgggagctcgctcagtccaaggtggtgtcgttggccgaactcataggtaaagatggcacagctacacccgctccgatccgccagattctgtcccgacctgaacgcttgcttttcatactagacggggttgatgaacccggatgggtcctccaggaacccagttcggagctctgtctgcattggtcccaaccacagccagctgacgctctcttgggcagcctcttggggaaaacaattctaccagaagctagtttccttatcactgcacgaaccacagcgctgcagaatctgattcccagtctcgaacaggccagatgggttgaggtgttgggtttctctgagagcagcaggaaggaatatttctatcgttactttacagacgaaaggcaggctattcgggcttttagacttgttaagtccaacaaggagctctgggctctctgccttgtgccgtgggtgtcctggctggcctgcacctgcctcatgcaacagatgaagcgcaaggaaaaattgacactgactagtaaaacaactactaccctgtgcttacactacctcgctcaagccctgcaggcccagccactgggacctcagctgagggacctctgtagtctggcagcagagggtatatggcaaaagaagaccctcttcagcccagacgaccttaggaagcacgggcttgatggcgcaattatttcaacattcttgaaaatgggaattctgcaggagcaccccatccctttgtcctattcatttatacatctctgttttcaggaattttttgccgcaatgtcttatgttctcgaagatgagaagggtcgaggcaaacattcgaattgcataattgacctcgagaagacattggaggcctatggaattcatggcctgtttggcgctagtactaccagatttctcctgggcctgttgtctgatgagggagaacgagaaatggaaaacatcttccactgcaggctgtcccaggggagaaacctgatgcagtgggtcccgagcctacaactgctgctacagccgcactcactcgagagtctccactgcctgtatgagacccgcaataagaccttcctgactcaagttatggcccactttgaggagatgggaatgtgcgtcgagaccgacatggagttactagtatgtactttttgcattaagttcagtagacacgtgaagaagctccagctgatcgaggggcggcagcacagatctacttggtcgcccactatggtggtcttgttccgctgggtgccggtaacagacgcgtactggcaaatcttgtttagtgtgcttaaggtgacccggaacttaaaagaattggacctgtcaggcaacagtctgagccattccgctgttaaatccctctgcaaaaccctgcgcaggcctagatgcttgttggagaccctcaggcttgcaggatgcggccttactgctgaggactgcaaagacctcgcatttgggctgagggcaaatcagacactgactgaactcgatctctcctttaacgtgctaacagatgcgggggcaaaacatttatgccaacgcttacgacagccttcctgcaagcttcagcggcttcagttggtttcatgtgggctcaccagcgattgctgtcaggacctggctagtgtcctcagtgcttcaccttctctcaaggagctggacctacagcagaataacttagatgacgtaggggtcaggctgctctgcgagggcctgaggcatcccgcttgtaagttgattcgcctggggctggaccagacaactttaagcgatgagatgcgccaggaactgagagccttggaacaggagaagccccagctgctgatcttttcaagacgcaagccatctgttatgacgccaaccgagggactggacacgggggagatgtccaattcaacctcaagccttaagagacagcggcttgggtccgaaagggctgccagccatgtagcacaggccaatctgaagttactggacgtttctaaaatattccccatcgcggagattgcagaggaaagctcgcctgaagttgtccccgtggagctattgtgcgtcccaagccccgccagccagggggatctgcacacaaaacccttagggacagatgatgacttctggggaccaacaggaccagtggccaccgaggtcgttgacaaggagaagaacctttacagggttcacttcccagtcgctggctcgtataggtggcccaatacaggtctgtgcttcgttatgcgggaggccgttacagtggagattgaattctgtgtgtgggaccagttcttgggggaaatcaatccgcaacactcctggatggttgccggccccctccttgatatcaaagcagagcccggtgctgtggaggctgtccatcttccacattttgtggccttgcaaggtggacacgtggacacttcgctgttccagatggcccacttcaaggaggaagggatgctgcttgaaaaacccgcgcgggtcgagcttcatcatatcgtgctagaaaacccaagcttctctcctctgggagttctgctcaagatgattcataacgctctcaggtttatccctgtcacctctgtcgtgctgctctaccatcgcgtacatcccgaggaggttaccttccatttgtacctgataccctccgactgcagcatccgcaaggagttagagctgtgttaccgaagtccaggtgaagatcagctgttctcggaattttatgtgggccacttgggctcaggaatccgcctgcaagtcaaggacaagaaggatgaaacattggtttgggaagctctggtaaaacccggtgaccttatgcctgcaacgactctaattcctcctgccagaatcgccgttccctcgccgctcgatgcaccacagctgttacattttgtcgaccagtatcgggaacaactgatagcacgcgtgacttcagtcgaggtggtactggacaaacttcacggacaagtgctgtcccaggaacaatatgagagggtgctcgccgagaataccagaccaagtcagatgagaaaactgttcagcctgtctcagagctgggataggaaatgcaaagatggcctttaccaggcccttaaggagacgcatccccaccttatcatggaactgtgggagaaagggtcaaaaaagggcttgttaccattgtcgtcatag

SEQ ID NO: 183194 - DNA, 4290 bp, Artificial Sequence
  derived and/or modified sequence
atggccggaggcgcttgggggcgactagcgtgttatctggagttccttaaaaaggaggagcttaaggagtttcaactgctactcgccaataaggctcatagcagatcctccagcggcgagacacctgctcaacccgagaagactagtggaatggaggttgcctcttaccttgtggctcagtatggggaacagagagcatgggatctggcgctgcatacctgggagcaaatggggctgaggagcctttgcgcacaggcccaagaaggggcaggtcattccccctcatttccctattcaccctcggaaccccatctcgggtccccttctcagcccacttctaccgctgttttgatgccatggatacacgagcttcccgctggatgtacccagggaagcgagaggagagttcttcgccagctcccggacacgagcggcaggaggtggcgcgagatcagcgcatccctgttataccaggcattgccgtccagtcccgaccacgagtcaccgagccaggagtctcccaacgccccaacgtcaacagccgtgcttgggtcttgggggtcacctccgcagccctcgctggcacccagggaacaagaagcacctgggacccaatggcctttagatgagacgtcgggcatctattacaccgagatccgggaacgggagcgcgagaaatccgagaaaggcagaccaccgtgggcggctgtggtgggcaccccaccccaggcccacacatccttgcagccgcaccatcacccatgggaaccaagtgttcgggaatccctgtgttctacgtggccctggaagaacgaagattttaaccagaagttcacccaactgctcctattgcagcgccctcacccccgttctcaggatccactggtaaagcggagctggccagactacgtcgaggagaatcgcggtcacctcatcgaaattagagatctgttcggacccggtctggatacccaagagcctaggatcgtcatcttgcagggtgcagccggtattggcaaatccacattagccagacaagttaaggaagcttggggtcgaggccagctgtatggagataggttccagcacgtgttttatttctcctgccgcgagttggcccagtccaaagtcgtatccctggccgaactcattggcaaagatggcactgccactcctgccccaatacgccagatcctttctaggccggaacgcttgctgttcattctggacggcgtcgacgaacccggttgggtcctgcaggaaccatcaagtgaactgtgcttgcactggagccaacctcaaccagccgacgcccttttggggagccttctgggcaagacaatcttacctgaggccagttttttgattaccgccagaaccacagcattgcagaatctgattccttccttggagcaggccaggtgggttgaagttctgggattcagcgagtcgtcccggaaggagtacttttatcggtatttcacagatgagcgccaggccatccgagctttccgtctcgtgaagagtaacaaggaactgtgggcactgtgcctggttccatgggtaagttggttagcctgcacttgcctgatgcagcagatgaaaagaaaagagaaactgacactaacaagcaagaccaccacaaccctgtgcttgcactacctcgcccaggcgctccaggctcaacctcttggccctcagctcagggatctgtgctctctggctgcagagggcatctggcagaagaaaacactgtttagtccggatgatttaaggaaacatggcctcgacggggcaattatctccacattcttaaaaatgggtatcctccaggagcatccaatacccctgagctatagtttcatccacctttgtttccaagagttcttcgccgcaatgtcttatgtgctagaagacgagaagggccgtggcaagcactccaattgcatcattgacctggagaagacccttgaggcctatggaattcacggcttgtttggtgccagtactaccaggttcttactgggcctgctatccgacgaaggtgagcgggagatggagaatatctttcactgtcgactgtcacaggggaggaatttgatgcagtgggtaccaagcctgcaactccttctccagcctcactcactggaatcattgcactgcctgtatgaaactaggaataaaacgtttctcacccaggtcatggcccactttgaagagatgggtatgtgtgtagagactgacatggaattgttagtgtgcacattttgtattaagttctctaggcatgtgaaaaagctgcagttgatcgagggaaggcaacacagatctacatggtcacccactatggtggtgctcttccgctgggtgccagtgaccgacgcatactggcagattctcttcagcgtgctcaaggttactaggaacctgaaagagctggatcttagcgggaattccttgtcacactccgcagtgaagtcactgtgcaaaacattgagacgccctcgctgcctgctggagacattgcggctggcaggatgcgggttgaccgcagaagactgcaaggacttggctttcggacttcgcgctaaccaaactctaaccgagctggatttatcctttaatgtgctgacagatgccggtgctaaacatctgtgccagaggctcagacagcctagttgcaaactacagagactccagctggtatcctgcggtttgacgtcagactgctgccaggatctggcctcagtcctatcagcttctccttctcttaaagaactcgacctgcagcagaataacctcgacgatgtgggagtccggcttctatgtgagggcttaagacatcccgcatgcaagctgatcagattagggttggatcagacaaccctgagcgatgaaatgagacaggagttaagagctctggaacaggaaaagccccagctgttaattttttcccggagaaagccatccgtcatgacccccactgaaggcctagatactggggaaatgtcaaatagtactagcagtttgaagaggcagcgcctggggtctgagcgtgctgcttcccatgtggcccaggcgaatctgaagctgctcgacgtcagcaagatctttcccatcgctgagatcgccgaagaaagctcaccagaggtagtgcccgtggaactcctgtgcgttccctccccagccagccagggcgacctacatacaaaacccctgggtactgatgacgatttttggggacctaccgggccagtcgctaccgaggttgttgacaaagagaaaaacctgtaccgtgttcacttcccggtggcaggatcctaccgatggcctaacacagggctttgctttgttatgcgagaggcggtcactgtggagattgagttctgcgtctgggaccagtttctgggagagatcaatccccagcattcttggatggtggctggccctctgcttgatatcaaggccgaacctggcgctgtagaagctgttcatcttcctcattttgtcgctctacaggggggtcatgtggatactagtctattccaaatggcccatttcaaggaggagggaatgctactcgagaagcctgccagggtcgagctgcaccacatcgtgctggaaaaccctagcttctcacccctaggggtgttacttaaaatgatccataacgctctgaggtttatccctgttaccagcgttgtccttctgtaccatagggtacatccagaggaggttactttccacttatatttgatccccagcgattgtagcatccgcaaagagcttgaactatgttacaggtctcctggcgaagatcagttgttttctgaattttatgtcggtcacctcggcagcgggattagactacaggttaaagacaagaaggatgaaactctcgtgtgggaggcgttagtgaagccaggtgacctgatgcccgctacaacgttgatcccaccagcaagaatcgccgtcccttctcctcttgatgcaccacagctgcttcacttcgtagaccagtaccgagagcaattaatagccagagtaacttcagtggaggtcgtcctagacaagctccacggccaagtcctaagccaggagcagtatgaaagagtgttggccgaaaacacacgcccttcacagatgcgaaagctgttttctctaagccagtcatgggaccgtaaatgtaaggacggtctgtaccaggccctgaaagaaacccatcctcacctgataatggaactttgggagaagggaagcaaaaagggtctgctcccactctccagctag

SEQ ID NO: 183195 - DNA, 5480 bp, Artificial Sequence
  derived and/or modified sequence
cttgttgactaggcgctgttcttgctggctggtgccccagggcctggagaggtctgaagaaacctgggagccagcagcccggggctccactctgggttctgaaagcccattccctgctctgcggctcctcccaccccacctcttctcagccttgcagctcaagggttgatctcaggagtccaggacccaggagagggaagaatctgaggaacacagaacagtgagcgttgcccacaccccatctcccgtcaccacatctcccctcaccctcaccctccctgcctggccctggaccccatcccaggacctccctatcagctgacttcttccagtgtcttgcaggcccctctgggctcctccctcccctggcttttcctaccactccccctctatcggcgtctatctgtaggtgccctgggatttataaaactgggttccgaatgctgaataagagacggtaagagccaaggcaaaggacagcactgttctctgcctgcctgataccctcaccacctgggaacatcccccagacaccctcttaactccgggacagagatggctggcggagcctggggccgcctggcctgttacttggagttcctgaagaaggaggagctgaaggagttccagcttctgctcgccaataaagcgcactccaggagctcttcgggtgagacacccgctcagccagagaagacgagtggcatggaggtggcctcgtacctggtggctcagtatggggagcagcgggcctgggacctagccctccatacctgggagcagatggggctgaggtcactgtgcgcccaagcccaggaaggggcaggccactctccctcattcccctacagcccaagtgaaccccacctggggtctcccagccaacccacctccaccgcagtgctaatgccctggatccatgaattgccggcggggtgcacccagggctcagagagaagggttttgagacagctgcctgacacatctggacgccgctggagagaaatctctgcctcactcctctaccaagctcttccaagctccccagaccatgagtctccaagccaggagtcacccaacgcccccacatccacagcagtgctggggagctggggatccccacctcagcccagcctagcacccagagagcaggaggctcctgggacccaatggcctctggatgaaacgtcaggaatttactacacagaaatcagagaaagagagagagagaaatcagagaaaggcaggcccccatgggcagcggtggtaggaacgcccccacaggcgcacaccagcctacagccccaccaccacccatgggagccttctgtgagagagagcctctgttccacatggccctggaaaaatgaggattttaaccaaaaattcacacagctgctacttctacaaagacctcaccccagaagccaagatcccctggtcaagagaagctggcctgattatgtggaggagaatcgaggacatttaattgagatcagagacttatttggcccaggcctggatacccaagaacctcgcatagtcatactgcagggggctgctggaattgggaagtcaacactggccaggcaggtgaaggaagcctgggggagaggccagctgtatggggaccgcttccagcatgtcttctacttcagctgcagagagctggcccagtccaaggtggtgagtctcgctgagctcatcggaaaagatgggacagccactccggctcccattagacagatcctgtctaggccagagcggctgctcttcatcctcgatggtgtagatgagccaggatgggtcttgcaggagccgagttctgagctctgtctgcactggagccagccacagccggcggatgcactgctgggcagtttgctggggaaaactatacttcccgaggcatccttcctgatcacggctcggaccacagctctgcagaacctcattccttctttggagcaggcacgttgggtagaggtcctggggttctctgagtccagcaggaaggaatatttctacagatatttcacagatgaaaggcaagcaattagagcctttaggttggtcaaatcaaacaaagagctctgggccctgtgtcttgtgccctgggtgtcctggctggcctgcacttgcctgatgcagcagatgaagcggaaggaaaaactcacactgacttccaagaccaccacaaccctctgtctacattaccttgcccaggctctccaagctcagccattgggaccccagctcagagacctctgctctctggctgctgagggcatctggcaaaaaaagacccttttcagtccagatgacctcaggaagcatgggttagatggggccatcatctccaccttcttgaagatgggtattcttcaagagcaccccatccctctgagctacagcttcattcacctctgtttccaagagttctttgcagcaatgtcctatgtcttggaggatgagaaggggagaggtaaacattctaattgcatcatagatttggaaaagacgctagaagcatatggaatacatggcctgtttggggcatcaaccacacgtttcctattgggcctgttaagtgatgagggggagagagagatggagaacatctttcactgccggctgtctcaggggaggaacctgatgcagtgggtcccgtccctgcagctgctgctgcagccacactctctggagtccctccactgcttgtacgagactcggaacaaaacgttcctgacacaagtgatggcccatttcgaagaaatgggcatgtgtgtagaaacagacatggagctcttagtgtgcactttctgcattaaattcagccgccacgtgaagaagcttcagctgattgagggcaggcagcacagatcaacatggagccccaccatggtagtcctgttcaggtgggtcccagtcacagatgcctattggcagattctcttctccgtcctcaaggtcaccagaaacctgaaggagctggacctaagtggaaactcgctgagccactctgcagtgaagagtctttgtaagaccctgagacgccctcgctgcctcctggagaccctgcggttggctggctgtggcctcacagctgaggactgcaaggaccttgcctttgggctgagagccaaccagaccctgaccgagctggacctgagcttcaatgtgctcacggatgctggagccaaacacctttgccagagactgagacagccgagctgcaagctacagcgactgcagctggtcagctgtggcctcacgtctgactgctgccaggacctggcctctgtgcttagtgccagccccagcctgaaggagctagacctgcagcagaacaacctggatgacgttggcgtgcgactgctctgtgaggggctcaggcatcctgcctgcaaactcatacgcctggggctggaccagacaactctgagtgatgagatgaggcaggaactgagggccctggagcaggagaaacctcagctgctcatcttcagcagacggaaaccaagtgtgatgacccctactgagggcctggatacgggagagatgagtaatagcacatcctcactcaagcggcagagactcggatcagagagggcggcttcccatgttgctcaggctaatctcaaactcctggacgtgagcaagatcttcccaattgctgagattgcagaggaaagctccccagaggtagtaccggtggaactcttgtgcgtgccttctcctgcctctcaaggggacctgcatacgaagcctttggggactgacgatgacttctggggccccacggggcctgtggctactgaggtagttgacaaagaaaagaacttgtaccgagttcacttccctgtagctggctcctaccgctggcccaacacgggtctctgctttgtgatgagagaagcggtgaccgttgagattgaattctgtgtgtgggaccagttcctgggtgagatcaacccacagcacagctggatggtggcagggcctctgctggacatcaaggctgagcctggagctgtggaagctgtgcacctccctcactttgtggctctccaagggggccatgtggacacatccctgttccaaatggcccactttaaagaggaggggatgctcctggagaagccagccagggtggagctgcatcacatagttctggaaaaccccagcttctcccccttgggagtcctcctgaaaatgatccataatgccctgcgcttcattcccgtcacctctgtggtgttgctttaccaccgcgtccatcctgaggaagtcaccttccacctctacctgatcccaagtgactgctccattcggaaggaactggagctctgctatcgaagccctggagaagaccagctgttctcggagttctacgttggccacttgggatcagggatcaggctgcaagtgaaagacaagaaagatgagactctggtgtgggaggccttggtgaaaccaggagatctcatgcctgcaactactctgatccctccagcccgcatagccgtaccttcacctctggatgccccgcagttgctgcactttgtggaccagtatcgagagcagctgatagcccgagtgacatcggtggaggttgtcttggacaaactgcatggacaggtgctgagccaggagcagtacgagagggtgctggctgagaacacgaggcccagccagatgcggaagctgttcagcttgagccagtcctgggaccggaagtgcaaagatggactctaccaagccctgaaggagacccatcctcacctcattatggaactctgggagaagggcagcaaaaagggactcctgccactcagcagctgaagtatcaacaccagcccttgacccttgagtcctggctttggctgacccttctttgggtctcagtttctttctctgcaaacaagttgccatctggtttgccttccagcactaaagtaatggaactttgatgatgcctttgctgggcattatgtgtccatgccagggatgccacagggggccccagtccaggtggcctaacagcatctcagggaatgtccatctggagctggcaagacccctgcagacctcatagagcctcatctggtggccacagcagccaagcctagagccctccggatcccatccaggcgcaaagaggaataggagggacatggaaccatttgcctctggctgtgtcacagggtgagccccaaaattggggttcagcgtgggaggccacgtggattcttggctttgtacaggaagatctacaagagcaagccaacagagtaaagtggaaggaagtttattcagaaaataaaggagtatcacagctcttttagaatttgtctagcaggctttccagtttttaccagaaaacccctataaattaaaaattttttacttaaatttaagaattaaaaaaatacaaaaaagaaaaaatgaaaataaaggaataagaagttacctactcc

SEQ ID NO: 183196 - protein, 1142 aa, Artificial Sequence
  derived and/or modified sequence
MSGPAQVPMMSPNGSVPPIYVPPGYAPQVIEDNGVRRVVVVPQAPEFHPGSHTVLHRSPHPPLPGFIPVPTMMPPPPRHMYSPVTGAGDMTTQYMPQYQSSQVYGDVDAHSTHGRSNFRDERSSKTYERLQKKLKDRQGTQKDKMSSPPSSPQKCPSPINEHNGLIKGQIAGGINTGSAKIKSGKGKGGTQVDTEIEEKDEETKAFEALLSNIVKPVASDIQARTVVLTWSPPSSLINGETDESSVPELYGYEVLISSTGKDGKYKSVYVGEETNITLNDLKPAMDYHAKVQAEYNSIKGTPSEAEIFTTLSCEPDIPNPPRIANRTKNSLTLQWKAPSDNGSKIQNFVLEWDEGKGNGEFCQCYMGSQKQFKITKLSPAMGCKFRLSARNDYGTSGFSEEVLYYTSGCAPSMPASPVLTKAGITWLSLQWSKPSGTPSDEGISYILEMEEETSGYGFKPKYDGEDLAYTVKNLRRSTKYKFKVIAYNSEGKSNPSEVVEFTTCPDKPGIPVKPSVKGKIHSHSFKITWDPPKDNGGATINKYVVEMAEGSNGNKWEMIYSGATREHLCDRLNPGCFYRLRVYCISDGGQSAVSESLLVQTPAVPPGPCLPPRLQGRPKAKEIQLRWGPPLVDGGSPISCYSVEMSPIEKDEPREVYQGSEVECTVSSLLPGKTYSFRLRAANKMGFGPFSEKCDITTAPGPPDQCKPPQVTCRSATCAQVNWEVPLSNGTDVTEYRLEWGGVEGSMQICYCGPGLSYEIKGLSPATTYYCRVQALSVVGAGPFSEVVACVTPPSVPGIVTCLQEISDDEIENPHYSPSTCLAISWEKPCDHGSEILAYSIDFGDKQSLTVGKVTSYIINNLQPDTTYRIRIQALNSLGAGPFSHMIKLKTKPLPPDPPRLECVAFSHQNLKLKWGEGTPKTLSTDSIQYHLQMEDKNGRFVSLYRGPCHTYKVQRLNESTSYKFCIQACNEAGEGPLSQEYIFTTPKSVPAALKAPKIEKVNDHICEITWECLQPMKGDPVIYSLQVMLGKDSEFKQIYKGPDSSFRYSSLQLNCEYRFRVCAIRQCQDSLGHQDLVGPYSTTVLFISQRTEPPASTNRDTVESTRTRRALSDEQCAAVILVLFAFFSILIAFIIQYFVIK

SEQ ID NO: 183197 - DNA, 3429 bp, Artificial Sequence
  derived and/or modified sequence
atgagcggccccgcccaggtgcccatgatgagccccaacggcagcgtgccccccatctacgtgccccccggctacgccccccaggtgatcgaggacaacggcgtgagaagagtggtggtggtgccccaggcccccgagttccaccccggcagccacaccgtgctgcacagaagcccccacccccccctgcccggcttcatccccgtgcccaccatgatgccccccccccccagacacatgtacagccccgtgaccggcgccggcgacatgaccacccagtacatgccccagtaccagagcagccaggtgtacggcgacgtggacgcccacagcacccacggcagaagcaacttcagagacgagagaagcagcaagacctacgagagactgcagaagaagctgaaggacagacagggcacccagaaggacaagatgagcagcccccccagcagcccccagaagtgccccagccccatcaacgagcacaacggcctgatcaagggccagatcgccggcggcatcaacaccggcagcgccaagatcaagagcggcaagggcaagggcggcacccaggtggacaccgagatcgaggagaaggacgaggagaccaaggccttcgaggccctgctgagcaacatcgtgaagcccgtggccagcgacatccaggccagaaccgtggtgctgacctggagcccccccagcagcctgatcaacggcgagaccgacgagagcagcgtgcccgagctgtacggctacgaggtgctgatcagcagcaccggcaaggacggcaagtacaagagcgtgtacgtgggcgaggagaccaacatcaccctgaacgacctgaagcccgccatggactaccacgccaaggtgcaggccgagtacaacagcatcaagggcacccccagcgaggccgagatcttcaccaccctgagctgcgagcccgacatccccaacccccccagaatcgccaacagaaccaagaacagcctgaccctgcagtggaaggcccccagcgacaacggcagcaagatccagaacttcgtgctggagtgggacgagggcaagggcaacggcgagttctgccagtgctacatgggcagccagaagcagttcaagatcaccaagctgagccccgccatgggctgcaagttcagactgagcgccagaaacgactacggcaccagcggcttcagcgaggaggtgctgtactacaccagcggctgcgcccccagcatgcccgccagccccgtgctgaccaaggccggcatcacctggctgagcctgcagtggagcaagcccagcggcacccccagcgacgagggcatcagctacatcctggagatggaggaggagaccagcggctacggcttcaagcccaagtacgacggcgaggacctggcctacaccgtgaagaacctgagaagaagcaccaagtacaagttcaaggtgatcgcctacaacagcgagggcaagagcaaccccagcgaggtggtggagttcaccacctgccccgacaagcccggcatccccgtgaagcccagcgtgaagggcaagatccacagccacagcttcaagatcacctgggacccccccaaggacaacggcggcgccaccatcaacaagtacgtggtggagatggccgagggcagcaacggcaacaagtgggagatgatctacagcggcgccaccagagagcacctgtgcgacagactgaaccccggctgcttctacagactgagagtgtactgcatcagcgacggcggccagagcgccgtgagcgagagcctgctggtgcagacccccgccgtgccccccggcccctgcctgccccccagactgcagggcagacccaaggccaaggagatccagctgagatggggcccccccctggtggacggcggcagccccatcagctgctacagcgtggagatgagccccatcgagaaggacgagcccagagaggtgtaccagggcagcgaggtggagtgcaccgtgagcagcctgctgcccggcaagacctacagcttcagactgagagccgccaacaagatgggcttcggccccttcagcgagaagtgcgacatcaccaccgcccccggcccccccgaccagtgcaagcccccccaggtgacctgcagaagcgccacctgcgcccaggtgaactgggaggtgcccctgagcaacggcaccgacgtgaccgagtacagactggagtggggcggcgtggagggcagcatgcagatctgctactgcggccccggcctgagctacgagatcaagggcctgagccccgccaccacctactactgcagagtgcaggccctgagcgtggtgggcgccggccccttcagcgaggtggtggcctgcgtgaccccccccagcgtgcccggcatcgtgacctgcctgcaggagatcagcgacgacgagatcgagaacccccactacagccccagcacctgcctggccatcagctgggagaagccctgcgaccacggcagcgagatcctggcctacagcatcgacttcggcgacaagcagagcctgaccgtgggcaaggtgaccagctacatcatcaacaacctgcagcccgacaccacctacagaatcagaatccaggccctgaacagcctgggcgccggccccttcagccacatgatcaagctgaagaccaagcccctgccccccgacccccccagactggagtgcgtggccttcagccaccagaacctgaagctgaagtggggcgagggcacccccaagaccctgagcaccgacagcatccagtaccacctgcagatggaggacaagaacggcagattcgtgagcctgtacagaggcccctgccacacctacaaggtgcagagactgaacgagagcaccagctacaagttctgcatccaggcctgcaacgaggccggcgagggccccctgagccaggagtacatcttcaccacccccaagagcgtgcccgccgccctgaaggcccccaagatcgagaaggtgaacgaccacatctgcgagatcacctgggagtgcctgcagcccatgaagggcgaccccgtgatctacagcctgcaggtgatgctgggcaaggacagcgagttcaagcagatctacaagggccccgacagcagcttcagatacagcagcctgcagctgaactgcgagtacagattcagagtgtgcgccatcagacagtgccaggacagcctgggccaccaggacctggtgggcccctacagcaccaccgtgctgttcatcagccagagaaccgagccccccgccagcaccaacagagacaccgtggagagcaccagaaccagaagagccctgagcgacgagcagtgcgccgccgtgatcctggtgctgttcgccttcttcagcatcctgatcgccttcatcatccagtacttcgtgatcaagtag

SEQ ID NO: 183198 - DNA, 5714 bp, Artificial Sequence
  derived and/or modified sequence
agccgttctccaattaaagctgttaacgtgtactacgctgtttccttgttggattttcttgttctctgctgctactgtaaaaacgaaatgagtggtcctgctcaggttccaatgatgtccccaaatggttctgtgcctcctatctatgtgcctcctggatatgccccacaggttattgaagacaatggtgttcgaagagttgtcgtggtccctcaggcaccagagtttcaccctggtagtcacacagttctccaccgttctccacatcctcctctacctggtttcattcctgtcccaactatgatgccgcctccaccacgtcatatgtactcacccgtgactggagctggagacatgacaacacagtatatgccacagtatcagtcttcacaagtctatggagatgtagatgctcactctacacatggaaggtccaactttagagatgaacgatctagtaaaacatatgaacgtttgcagaaaaaattgaaggatcgccaaggaacacagaaagataaaatgagcagtccaccatcatcaccccagaaatgcccttctcccattaatgaacataatggacttataaaaggacaaattgctggtggtataaacacaggatcagcaaaaatcaagtctgggaaggggaaaggtggtacacaagttgatacagaaattgaagaaaaagatgaagaaactaaagcatttgaagcacttctttccaacattgtcaaaccagtggcctccgacatccaggcaaggacagtagtacttacctggtcaccaccttccagcctcattaatggtgaaacagatgaaagtagtgtaccagagctctatggttatgaagttctgatctcaagtactggaaaagatgggaaatacaaaagtgtatatgtaggagaagaaacaaatatcactttaaatgatctcaagccagccatggattaccatgcaaaagtccaggcagaatataattctataaagggaactccttcagaggctgaaatctttaccaccttgagctgtgaacctgatatacctaatccaccaaggatagccaatcggaccaaaaattcactcactttgcaatggaaggcacctagtgacaatggttctaaaatccaaaactttgtattagaatgggatgaaggaaaaggaaatggagaattttgtcagtgttacatgggctcacagaaacaatttaaaattactaaactttcaccagcaatgggctgtaaattcagactatcggccagaaatgactatggtacaagtggttttagtgaagaagtcttatattacacctcaggctgtgctccttctatgccagcaagtcctgtattaaccaaggctggaattacttggttatccttacaatggagtaagccctcaggaacaccatcagatgaaggaatttcttacattttagagatggaggaagaaacttcaggatatggttttaagcctaaatatgatggagaagatcttgcttacacagtgaaaaatctcagacgtagtactaagtataaatttaaggttattgcttacaactcagaaggtaaaagtaatccaagtgaagtagtagaatttactacttgccctgataaaccaggcatacctgtaaagccttcagtgaaaggaaagatacattcacacagttttaaaataacctgggatccaccaaaagacaatggcggagcaaccatcaataaatatgtagtggagatggcagaaggttctaacggaaacaaatgggaaatgatatacagtggtgctaccagggaacatctttgtgatcgactgaatccaggctgtttctatcgtttacgagtttactgcatcagtgatggaggacagagtgcggtctctgaatctttacttgtgcagactccagctgtgcctcctggcccatgcctccctcccagattacagggtagacccaaagcaaaagaaatacagttacgatggggaccccctctggttgatggtggatcacccatttcctgttacagtgtggaaatgtctcctatagaaaaagatgaacctagagaagtttaccaaggttctgaagtagaatgtacagtgagcagccttcttcctggaaagacatacagcttcagactacgtgcagctaacaaaatggggtttggaccattttcagaaaaatgtgatattactacagcccctgggccaccagatcagtgcaagccccctcaagtgacatgtagatctgcaacttgtgcacaagtgaattgggaggttcctttgagtaatggaacagatgtcactgaatatcgactggagtggggaggagttgaaggaagtatgcagatatgttactgtgggcctggtctcagttatgaaataaaaggactttcaccagcaactacctattattgcagggtccaggctctgagtgttgtgggtgcaggccctttcagtgaagtagtagcctgtgtgactccaccatcagttcctggcattgtgacctgtcttcaagaaataagcgatgatgagatagaaaatccccattattcaccttctacatgccttgcaataagctgggaaaagccttgtgatcatggttcggaaatccttgcctacagcatagactttggagataaacaatccctaacagtgggaaaggttacaagctatattatcaacaatttgcaaccagatacaacatacagaatacgaattcaagccttgaatagccttggagctggtcctttcagccatatgataaaattaaaaactaagcctctccctcctgatccacctcgtctggaatgtgttgcctttagccaccagaaccttaagctgaaatggggagaaggaactccaaagacattgtcaaccgattctattcagtaccaccttcagatggaggataagaatggacggtttgtatccctatacagaggaccatgtcatacatacaaagtacaaagacttaatgagtcaacatcctataaattctgtattcaagcttgtaatgaagctggggaaggtcccctctcccaagaatatattttcactactccaaaatctgtcccagctgccttgaaagcccccaaaatagagaaagtaaatgatcacatttgtgaaattacatgggagtgtttacagccaatgaaaggtgatccagttatttacagtcttcaagttatgttgggaaaagattcagaattcaaacagatttacaagggtcccgactcttccttccggtattccagccttcagctgaactgtgaatatcgcttccgtgtatgtgccattcgccagtgccaagactctctgggacaccaggacctcgtaggtccctacagcaccacagtgctcttcatctctcagaggactgaaccaccagccagcaccaacagagacactgtggaaagcacaaggacccgacgggcactgagtgacgagcagtgtgctgccgtcatccttgtgctgtttgctttcttttccattttgattgcctttatcattcagtactttgtaatcaagtgaaaatataactttattttttaactctattacattttattttgtcatgtactaaaattatttctgtattgcttttataaaaaacagtggcatttagcactggcattgagactatagcacatcatttttgccattttcagtgcttatattgttaggtagaggctggcactttattagaatgcaagccacaaaaatatcaattttgttttttttgttagggtgggtcttctttttttctttccctctctctttttttaacaaatgccttcttatagaaaaactttctaagaggcaacaatttagaatggatattttgacgaatcggcatgagtgtaacagtgataacctgatctgtttgttttaaagattattaccaagtgaaaaattcagaatgaatagaatttacactaacatgctatataaaatgttaaagtctgatgctgtgaaagcaatctagtgctatatttctacctcctcatttgtcttaattatttggtaagtgggattatgatgagtaactggaggggcttagaaacaaaaactggatgaaagagtatgcatgaagaaaagcttctttgataaatgtggagttcttcattataaatatatattcatgaattcacagataagtacttaaagaacagacagtttacttggcctaaaaatattttgatgtttactcaaaaagtacctcttcaggtcttgagaacatggaaaagaattgagtgcttttaaatactttttagaaagtaatcataaaagtaaattgaatttcaaacctatttggcttctgttttgtgaacctttgaactatatgtatgtgtataagggtatacacatacatatatggcatataacaagtgtacacatatacacataacaagtgtagaagtatatattacatacatacactcactctgtctggtataggctaattttgaagaactcccataagtttctgctgcttctcccataactgctgccaccaccatcagaattcataatcaaacctaacctttttgtttggggcaccaaatctgaagacaaaattaatttgcaccagtaaacttcaagctgctttctttcttgaaaactaaacgtttaacgtataatgtctgtttggatactgttccaaattgttgattgcatgtggttaatgttgcattagagcactttgcaattgcataattcattaatgttttgtgagcttgcatttgtgagttattggatgatcagactgaattttgtcaagtatcacattgtacatcttgcctagatgtcgatgactgcaagtaataatacagtttataatgaaactatctacaattcttgttttagcacatctgttatccgtaaaacacctgtaactagcttttttaatttattatttgaattttaggatagcgaatcactaatttttagttgctgaggttggcattttagtgattattaagcacttctgtcagtctttgaaaaaagaacgtattttttgtgctttgaagatctctgaagaatttcttttataatagaatgggcatgtattgtaacagttttatgtcaaatgatctgtgctgtagaaaaacattaacccttgttcaaaaaagaaatggataaacttggcctttctaagtggtaagaatgacctgtcactataatatactgtatgtttacattttatttaaatttaatctcttatgtatagggtgataaccttccccagaaacaacagtgattgcgattgttttctagaaacttctttaaagtgccacatttggcagtacaaatgagtctgagtgtaatagcccagagatttatatatagttgaatgtctaaaatggtaaaatgtgccactgtgtcaagttacagtggcttatgtttttcatagtaattcaaatgaacttcctatttttgatagtaaatgtcatttaatagtatacttgccatttgagcctcactgcaaaattagtgcagaggagaaaacaatttttaatgtaatcttgattttacctcatatactgtacattccaaaaactctaaactttttaaagattatagatacactaccaaacatatcaccttaaaattgtataaggctgaatgaacttcatacaaatgaaaaaaatctcataaaaatacataaactatgtagcaaaagtatctgtaaaatccatggaaaataaaagttgtatcattctttttga

SEQ ID NO: 183199 - DNA, 3429 bp, Artificial Sequence
  derived and/or modified sequence
atgagcggacctgcacaggtccccatgatgtctcctaatggaagcgtgccccctatttacgtgcctcccggttatgcaccgcaagtcattgaggataatggagtccggagggtagtggtcgtgccccaggctcccgaattccatccaggatcacatactgtactgcacagaagcccccatccacctttgccaggttttattcctgtgccgacaatgatgcctccaccgcctcgacacatgtatagccctgtgacaggagccggcgacatgactactcagtacatgccgcagtaccaaagcagccaggtctacggcgacgtcgacgctcactcgacacacggccgttcaaatttcagggatgagagaagctctaagacatacgagagactacagaagaagttgaaagaccgtcaaggcactcagaaggacaagatgagctccccgccctcatctcctcagaagtgcccctcgccaatcaatgaacacaacgggttaatcaagggacagatcgccggagggataaacactgggtctgctaaaattaagagtggaaaaggcaaggggggaacacaggtggacaccgagatcgaggaaaaggatgaggaaacgaaagctttcgaggctctgctttccaacattgtgaagcccgtggcatccgacattcaagccaggacggttgtactcacttggtcaccacctagttcactgattaatggagagaccgacgaaagttctgtgcccgagctctacggctatgaagtcctcatctccagcaccggtaaggatggaaagtataagtctgtgtatgtgggagaagagacaaatatcacacttaatgacttgaaaccggcaatggattatcatgccaaagtgcaagctgagtataacagcataaagggcaccccgtcagaggctgagatctttacaaccctgagttgtgaacccgatatccctaacccaccccggatcgccaatcgcacaaagaactccctcaccctacagtggaaagctccctctgacaacgggagcaaaatccagaactttgtactggagtgggacgagggaaaggggaacggggaattttgccagtgttacatggggtctcaaaagcagttcaaaatcacaaaactgagtcctgcgatggggtgtaaatttcgactgagtgctcgcaacgattatggcactagcggcttcagtgaggaagtcttgtactacaccagcggctgcgcaccctcgatgccagccagtcccgttttgactaaagctggaataacctggcttagcctgcagtggagcaagccgtcaggaacaccctctgacgagggaatctcctatattctcgagatggaggaggagacttccgggtacggatttaaacctaagtacgacggtgaagacttagcatataccgtaaaaaacctcagacgctccactaagtataaattcaaggtcatcgcttataatagcgagggcaaatctaatccttccgaggttgtggagttcactacctgtccagataagcccggcatcccagtaaagccctcagtaaagggcaaaatacattcgcacagttttaagataacatgggatccaccaaaagacaacggaggagctaccatcaacaagtatgtcgtcgagatggcggaggggtccaatggcaataaatgggaaatgatttatagtggagccactagggagcatttgtgtgaccgtcttaaccctggttgtttctatcgattgcgggtttattgcattagtgacggcggtcagagcgccgtgagcgagtcactcctggtgcagacacctgccgtcccccccggtccttgtctcccaccacgcctccaggggcgccccaaggctaaggagatacaactgaggtggggaccacccctggtggacgggggcagtccaatttcctgttactctgtcgaaatgagccctattgaaaaagatgagccgagggaagtctaccaagggtccgaagtcgaatgtacggtgtcatcgctattacctggaaagacatatagcttcagactgagggctgcaaacaagatgggctttgggcccttcagcgagaaatgtgatatcaccacggccccgggtccgccggaccagtgcaagcccccccaggtgacgtgccgctctgccacttgcgcccaggtgaactgggaggttccgctgtcgaatggaacggatgtgactgagtacagattggagtggggcggtgtcgagggatcaatgcagatctgctactgcggcccaggcctgagctatgaaatcaaaggccttagcccagcgacgacctattactgtagggtgcaggctctcagcgtcgtgggtgcaggcccttttagcgaggtcgtggcctgcgtcacacccccatcggtgccgggcatcgttacctgtctgcaagagatatccgacgatgaaattgagaacccgcactacagtccatccacctgtcttgcaattagttgggaaaaaccttgtgaccatggctcggagatccttgcatacagtatcgacttcggtgataagcagtccctgaccgtgggcaaggtcactagctatataataaacaacctgcagcctgatacgacttaccgaataaggatccaggcattaaattctctcggcgcaggtcctttctcccacatgataaaactgaaaaccaaaccattgcccccagatccacccaggcttgagtgtgtcgcctttagccatcagaacctgaagctgaagtggggtgaaggaacccctaagaccctgtcaacagacagcatccagtatcacctgcagatggaggataagaatggacgctttgtgagtctgtaccgcggcccctgtcatacatacaaggttcagcgcctaaacgagtcgactagttataagttctgcatccaggcatgtaatgaagccggagaaggtcctctctcccaggagtacatttttacgacccctaagtccgttcccgctgcactgaaggctcctaaaatcgaaaaagtgaatgaccacatatgtgagatcacctgggaatgtctccagcctatgaagggtgatccagtcatctactctctgcaggtgatgttgggtaaggacagcgaatttaagcaaatctacaaggggcctgattcttcattccgttattcctccctgcaactgaattgcgagtaccgatttagggtgtgcgccatcagacaatgccaggactctctgggtcaccaagatttagtaggaccatactcaaccactgtgttgttcatctcacaacgcactgaacctcccgcttctaccaacagggatacggtggaatctacacgcactagaagagccctgtctgacgagcagtgcgcagctgtgatcctggtgctgtttgcgttcttctcaatcctgattgcattcatcatccagtacttcgtcatcaaatag

SEQ ID NO: 183200 - DNA, 3429 bp, Artificial Sequence
  derived and/or modified sequence
atgagcggccctgcccaggtgcccatgatgagccccaatggatctgtgccccccatctacgtgcccccaggctacgccccccaggtgattgaagataatggagtgcggcgggtggtggtggtgccccaggcccctgagttccaccctggcagccacacagtgctgcacaggagcccccacccccccctgcccggcttcatccctgtgcccaccatgatgcctcctccacccaggcacatgtacagccctgtgactggagctggggacatgaccacccagtacatgccccagtaccagagcagccaggtgtatggagatgtggatgcccacagcacccacggccgcagcaacttcagagatgagaggagcagcaagacctatgagcggctgcagaagaagctgaaggaccggcagggcacccagaaggacaagatgagcagcccccccagcagcccccagaagtgccccagccccatcaatgagcacaacggcctcatcaagggccagattgctgggggcatcaacacaggcagcgccaagatcaagtctggaaaaggaaaaggaggcacccaggtggacacagaaattgaggagaaggatgaggagaccaaggcctttgaggccctgctgagcaacatcgtgaagcctgtggccagtgacatccaggccaggacagtggtgctgacctggagcccccccagcagcctcatcaacggggagacagatgagagctctgtgcctgagctgtatggctatgaggtgctgatcagcagcacaggcaaggatggcaagtacaagtctgtgtatgtgggggaggagaccaacatcaccctgaatgacctgaagccagccatggactaccacgccaaggtgcaggccgagtacaacagcatcaagggcaccccatctgaggccgagatcttcaccaccctgagctgtgagccagacatccccaaccccccaagaattgccaacagaaccaagaacagcctgaccctgcagtggaaggcccccagcgacaatggcagcaagatccagaactttgtgctggagtgggatgagggcaaaggaaatggagagttctgccagtgctacatgggcagccagaagcagttcaagatcaccaagctgagccctgccatgggctgcaagttccggctgagcgccagaaatgactatggcaccagcggcttcagcgaggaggtgctgtactacaccagcggctgtgcccccagcatgcctgccagccctgtgctgaccaaggccggcatcacctggctgagcctgcagtggagcaagcccagcggcacccccagtgatgagggcatctcctacatcctggagatggaggaggagaccagcggctacggcttcaagcccaagtatgatggagaggacctggcctacacagtgaagaacctgcggcgcagcaccaagtacaagttcaaggtgattgcctacaacagcgagggcaagagcaaccccagcgaggtggtggagttcaccacctgcccagacaagccaggcatccctgtgaagcccagcgtgaagggcaagatccacagccacagcttcaagatcacctgggacccccccaaggacaatggaggagccaccatcaacaagtatgtggtggagatggccgagggcagcaatggaaacaagtgggagatgatctacagcggggccacccgggagcacctgtgtgaccggctgaaccctggctgcttctaccgcctgcgggtgtactgcatcagtgatggcggccagagcgctgtgtctgagagcctgctggtgcagaccccagctgtgcccccaggcccctgcctgcccccccggctgcagggccggcccaaggccaaggagatccagctgcgctggggcccccccctggtggatggcggcagccccatcagctgctacagcgtggagatgagccccatcgagaaggatgagccccgggaggtgtaccagggcagcgaggtggagtgcaccgtgagcagcctgctgcccgggaagacctacagcttccggctgcgggccgccaacaagatgggcttcggccccttcagcgagaagtgtgacatcaccacagcccctggccccccagaccagtgcaagccaccccaggtgacctgccgcagcgccacctgtgcccaggtgaactgggaggtgcccctgagcaatggaacagatgtgacagagtaccgcctggagtggggcggcgtggagggctccatgcagatctgctactgcggccctggcctgtcctatgagatcaagggcctgagccctgccaccacctactactgccgggtgcaggccctgtctgtggtgggcgccggccccttcagcgaggtggtggcctgtgtgaccccaccttctgtgcccggcatcgtgacctgcctgcaggagatcagtgatgatgaaattgagaacccccactacagccccagcacctgcctggccatctcctgggagaagccctgtgaccacggcagcgagatcctggcctacagcattgactttggagacaagcagagcctgactgtgggcaaggtgaccagctacatcatcaacaacctgcagcctgacaccacctaccgcatccgcatccaggccctgaacagcctgggcgccggccccttcagccacatgatcaagctgaagaccaagcccctgcccccagaccccccccggctggagtgtgtggccttcagccaccagaacctgaagctgaagtggggcgagggcacccccaagaccctgagcacagacagcatccagtaccacctgcagatggaggacaagaatggccgctttgtgtccctgtaccggggcccctgccacacctacaaggtgcagaggctgaatgaaagcaccagctacaagttctgcatccaggcctgcaatgaagctggggagggccccctgagccaggagtacatcttcaccacccccaagtctgtgcctgctgccctgaaggcccccaagattgagaaggtgaatgaccacatctgtgagatcacctgggagtgcctgcagcccatgaagggggaccctgtgatctacagcctgcaggtgatgctgggcaaggacagcgagttcaagcagatctacaagggccctgacagcagcttccgctacagcagcctgcagctgaactgtgagtaccgcttccgggtgtgtgccatccggcagtgccaggacagcctgggccaccaggacctggtgggcccctacagcaccaccgtgctcttcatcagccagaggacagagcccccagccagcaccaacagagacacagtggagagcaccaggacccggcgggccctgagtgatgagcagtgtgccgctgtgatcctggtgctgtttgccttcttcagcatcctgattgccttcatcatccagtactttgtgatcaagtag

SEQ ID NO: 183201 - DNA, 3429 bp, Artificial Sequence
  derived and/or modified sequence
atgagcggccccgcccaggtgcccatgatgagccccaacggcagcgtacctcccatctatgtgcctccgggctatgcgcctcaggtaatcgaggataacggggtgcgccgggtggtggttgttccccaagctcccgagtttcacccagggagccacaccgtcctgcataggtcgccacatcccccacttccaggtttcattccagtccctaccatgatgccccctcccccacgacatatgtattcaccagtgactggggctggtgatatgactactcagtatatgccccagtatcagagcagccaggtgtatggggatgtcgatgctcatagtacacatggtcggtctaatttccgggacgaacggagctctaagacctacgaacgtctccagaaaaagctcaaagatcgccagggtactcaaaaggacaaaatgagctccccaccatcatcccctcagaagtgccctagccccatcaatgaacacaatggccttatcaagggacagattgcaggaggtatcaatacagggtcagcgaaaatcaagtctggaaagggcaagggggggacccaagtcgataccgaaatagaggagaaagatgaagagaccaaggctttcgaagcactactctccaatattgtcaaacccgtcgcatcagatattcaggccaggactgttgttctgacgtggtctcctccttcctcactgatcaacggagagactgacgaaagctccgttcctgagctctatgggtatgaggttctaatatcttccaccggcaaagacgggaagtataagtcagtctatgtgggggaagagaccaatatcactctgaatgatctcaaaccagccatggattatcatgcgaaggttcaggctgaatataactctattaagggaacgccttcggaggcggaaatattcacaaccttgtcttgtgaacccgacatcccgaatcccccaaggatcgccaacaggaccaaaaacagcctgactctccagtggaaggcgcccagtgacaacggcagcaaaatacagaatttcgttctggagtgggatgaaggtaagggaaacggggagttttgtcagtgctacatggggtcccagaagcagttcaaaatcacaaagctctcccctgccatggggtgtaaatttcgcttaagtgcaagaaatgactatggtacatccggatttagtgaagaggtgctgtactataccagtggttgtgcgccctctatgccagcaagccccgttctgacaaaagctggcatcacttggttgagcctacaatggtcaaagccttccgggaccccctctgatgagggcatctcttacattttggagatggaggaggagacatcaggctatggcttcaaacccaagtacgacggagaggatctggcctacactgtgaaaaatcttaggagatctacaaaatataaatttaaggtcatagcctacaactcagaggggaagtctaatccttcagaggtcgtggagtttaccacctgccccgacaagcctggcatacccgtcaaaccatctgtgaagggcaagattcattctcacagtttcaagatcacatgggatcccccaaaagacaacggaggcgccaccattaacaagtacgtcgtggaaatggctgagggctccaacgggaacaagtgggaaatgatatactccggtgcaacccgggaacacttgtgcgatagactgaacccaggttgtttctataggttacgagtgtattgcatatcagacggcggacagtctgccgtcagcgagagcctgttggtccagacacctgccgtgccccccggaccctgcctccctcctcgcctccaaggacgcccgaaagccaaagagatccaactcaggtggggacccccactggtcgacggcggatctcccatcagctgttatagtgtggagatgagccctatcgagaaagatgaaccaagggaggtttatcagggttcagaagtcgagtgcaccgtctcatccctactgcccgggaagacctactcctttagactccgagccgctaataagatgggattcgggcctttcagtgagaaatgtgacatcaccactgctcctgggccccccgatcagtgtaagcctccacaggttacatgcagatctgcaacgtgcgcacaggttaactgggaagttcctctttccaacggaaccgacgtgacagaatacaggctggaatgggggggtgttgaggggtcgatgcagatctgctactgcggtcccggcttatcctacgaaattaaaggtttgagccctgccactacgtattattgtagagtgcaggcattgtcagtggtcggcgccgggccatttagcgaggtggttgcttgtgttactccaccctcagtgcctggaatcgtgacatgtcttcaggaaattagtgacgatgagatagaaaatccccattactcacctagtacatgcttggccatttcatgggaaaagccatgcgaccacggaagcgaaatacttgcatatagcatcgattttggcgacaagcagagcctaactgttggtaaggtgacttcttacattatcaataacctacagcctgatactacctaccgcattagaattcaggcgttaaattcccttggcgcaggaccctttagccatatgattaagctcaagactaaacctttaccccccgatccacctcgcctggaatgcgtcgcattctctcaccagaatctcaagctcaagtggggtgaaggaactccgaaaaccctgtccacagacagtatacagtaccatctgcaaatggaagacaagaatgggaggtttgtgtctctttaccgcggaccttgccacacctacaaggttcagaggctgaacgagagcacttcctataaattctgtattcaagcatgcaacgaggcaggagagggccccctgtcacaggagtatatctttaccacccccaagtctgtgccagcagcattgaaggcgccaaagattgaaaaggtcaatgatcatatctgtgaaataacttgggaatgcctccaacctatgaaaggcgaccccgtcatttacagtctgcaagtgatgctgggcaaggattcagagtttaagcagatatacaaagggccagacagcagctttcgttatagttccctgcagctcaattgcgaataccgttttcgggtttgcgctatcaggcagtgccaggactcacttgggcaccaggaccttgttggaccgtattcaacaaccgtgctgtttatctctcagagaactgaaccgcctgcttctacgaatcgcgacactgtggaaagtacacgaactaggcgtgccctgtccgacgagcagtgtgctgcggtaatacttgtactgtttgcttttttcagcatcttgatagccttcattatccagtacttcgtgatcaagtag

SEQ ID NO: 183202 - DNA, 3429 bp, Artificial Sequence
  derived and/or modified sequence
atgagtggaccggcacaggtgcctatgatgagtccaaatggctccgtgccgcctatctatgtacccccaggctacgcacctcaagtgatagaggacaacggagtgagacgcgttgtcgtggtcccccaggcgcctgagttccaccccggatcacatacagtattacaccgctcccctcatcctcccctgcccggattcattcccgtccccacaatgatgcctcccccaccccgacatatgtattcacccgtaacaggggctggagacatgactacccagtatatgccacagtatcaatcaagccaggtgtacggagacgtggatgctcacagcacccacggcaggagtaattttcgcgatgaacggtctagtaaaacatacgagcgcctccaaaagaaactaaaggaccgacagggtacccagaaggataaaatgagctctcctccgtccagccctcagaaatgcccatcccctattaacgaacataacgggctgattaagggccaaatcgcaggcggtatcaacaccgggagcgccaagattaaatcaggcaagggaaagggcggtacgcaggtcgatacggagatcgaggaaaaggacgaagagacaaaagcatttgaggcattattgagtaatatcgtaaagcccgtggcctcagacatccaagccaggactgtcgtcttgacctggtctccccctagctctctgattaatggggagaccgacgaatcttctgtcccagagctttacggctatgaagtgctgatttcctctaccgggaaagatggcaaatataagtctgtctacgtaggagaggaaacaaacatcaccctcaatgatttgaagccggcaatggattatcacgcaaaagtgcaggcggagtacaactctatcaaaggtacgcctagcgaggccgagatatttacaacactgagctgcgaacctgacattcccaatcctcccagaattgccaataggaccaagaacagcctgactctacagtggaaagccccttcagataacgggtctaagatccaaaatttcgtgctagagtgggacgagggcaaaggcaacggggaattctgtcagtgttacatgggatcccagaagcagttcaaaataaccaaactatctccggcaatgggttgtaagttccggttatcggcccgtaatgattacggcacatccggcttctctgaagaggttttatattatacatccggctgtgcccctagtatgcccgcaagtccagtgctcacaaaagccggaatcacctggctaagtttgcagtggtctaaacccagcggcaccccatctgatgagggaattagttacatcctggaaatggaagaggaaacctccggctatggattcaagcctaagtacgatggcgaggatcttgcctacacagtgaagaacctccggagaagcactaaatacaagtttaaggtgatcgcatacaatagtgagggtaaatctaatccttccgaggtggtggagtttacgacatgccctgacaaaccgggtattcctgtaaaaccatccgtgaaggggaaaatccattctcattcttttaaaattacctgggatccgccaaaagacaacggcggagctacaattaataagtacgttgttgaaatggccgagggatctaatgggaacaagtgggaaatgatttatagcggcgctacaagagagcacctatgtgaccgccttaaccccggttgcttctaccgcctaagggtctactgtatcagcgacggaggacagtctgccgtctccgagtcccttttggtccagaccccagcagttccacccggaccttgcctacctcctagactccaggggcgtccaaaagccaaggagatacaactgcggtgggggcctcccttggtagacgggggatcccccatttcttgttactctgttgaaatgtcccccatcgagaaagacgaaccacgtgaagtctatcagggcagtgaagtggaatgtacggtgagctcccttctcccgggaaaaacgtacagctttaggctgcgtgcagccaacaagatgggatttgggcctttctccgagaagtgcgatatcaccacagcccctggtccaccggatcagtgtaaacccccacaggtgacgtgcagatctgccacttgcgcccaggtcaattgggaggtgccactgtccaacggcaccgatgtgaccgaataccggctggagtggggaggagttgaaggcagcatgcagatctgctattgtggacctggtctgtcatacgagattaaagggctctctcccgcaaccacttattattgtagggttcaggcactgtccgtcgtgggggcagggccattcagtgaggtggttgcctgcgtcaccccgcctagtgttccgggtatcgttacgtgtctgcaagagatttccgatgatgagatcgagaacccacattatagtccgtctacttgcttggctatttcctgggagaagccatgcgatcacgggtccgagatactagcatatagcattgattttggcgataagcaatcactgacagtcggaaaagtgactagctatatcatcaacaacctccagcccgatacaacataccgaatacgcattcaagctctgaactctttaggagcaggccctttcagtcatatgatcaaacttaaaacaaaacccctgccccctgacccacctaggctggagtgcgttgccttcagtcaccagaatctgaaactcaaatggggggaggggacacccaagacattgtccactgacagcatccagtaccacctccagatggaggacaagaacggtagattcgtatcgctctaccgtggaccttgccacacctataaagtgcagcggttgaacgaaagtaccagctacaagttctgtattcaggcctgcaatgaggctggggaggggcctctaagtcaggagtacatattcactactcctaagagtgttcctgctgccttgaaagcccctaagatcgaaaaagtaaatgaccacatctgtgaaatcacgtgggagtgtctgcagccgatgaagggggaccccgtcatctacagcctccaggtgatgctgggaaaggatagcgaatttaaacagatctacaaaggcccagatagtagttttagatattcctctttgcagctaaattgtgagtatcggttcagggtctgtgccatacgtcaatgccaggatagcttaggccatcaggacctggtaggcccttacagcactacagttctcttcatttcacagcgtactgaacctcctgccagtactaatcgagacaccgtcgagtctacccggacacgccgtgccctctccgatgaacaatgcgccgcagttatactggttctgttcgctttcttctctattctgatcgcttttatcatccaatatttcgtgataaagtag

SEQ ID NO: 183203 - protein, 977 aa, Artificial Sequence
  derived and/or modified sequence
MKPSIAEMLHRGRMLWIILLSTIALGWTTPIPLIEDSEEIDEPCFDPCYCEVKESLFHIHCDSKGFTNISQITEFWSRPFKLYLQRNSMRKLYTNSFLHLNNAVSINLGNNALQDIQTGAFNGLKILKRLYLHENKLDVFRNDTFLGLESLEYLQADYNVIKRIESGAFRNLSKLRVLILNDNLIPMLPTNLFKAVSLTHLDLRGNRLKVLFYRGMLDHIGRSLMELQLEENPWNCTCEIVQLKSWLERIPYTALVGDITCETPFHFHGKDLREIRKTELCPLLSDSEVEASLGIPHSSSSKENAWPTKPSSMLSSVHFTASSVEYKSSNKQPKPTKQPRTPRPPSTSQALYPGPNQPPIAPYQTRPPIPIICPTGCTCNLHINDLGLTVNCKERGFNNISELLPRPLNAKKLYLSSNLIQKIYRSDFWNFSSLDLLHLGNNRISYVQDGAFINLPNLKSLFLNGNDIEKLTPGMFRGLQSLHYLYFEFNVIREIQPAAFSLMPNLKLLFLNNNLLRTLPTDAFAGTSLARLNLRKNYFLYLPVAGVLEHLNAIVQIDLNENPWDCTCDLVPFKQWIETISSVSVVGDVLCRSPENLTHRDVRTIELEVLCPEMLHVAPAGESPAQPGDSHLIGAPTSASPYEFSPPGGPVPLSVLILSLLVLFFSAVFVAAGLFAYVLRRRRKKLPFRSKRQEGVDLTGIQMQCHRLFEDGGGGGGGSGGGGRPTLSSPEKAPPVGHVYEYIPHPVTQMCNNPIYKPREEEEVAVSSAQEAGSAERGGPGTQPPGMGEALLGSEQFAETPKENHSNYRTLLEKEKEWALAVSSSQLNTIVTVNHHHPHHPAVGGVSGVVGGTGGDLAGFRHHEKNGGVVLFPPGGGCGSGSMLLDRERPQPAPCTVGFVDCLYGTVPKLKELHVHPPGMQYPDLQQDARLKETLLFSAGKGFTDHQTQKSDYLELRAKLQTKPDYLEVLEKTTYRF

SEQ ID NO: 183204 - protein, 163 aa, Artificial Sequence
  derived and/or modified sequence
MKPSIAEMLHRGRMLWIILLSTIALGWTTPIPLIEDSEEIDEPCFDPCYCEVKESLFHIHCDSKGFTNISQITEFWSRPFKLYLQRNSMRKLYTNSFLHLNNAVSINLGNNALQDIQTGAFNGLKILKRLYLHENKLDVFRNDTFLGLESLEYLQADYNVIKR

SEQ ID NO: 183205 - DNA, 2934 bp, Artificial Sequence
  derived and/or modified sequence
atgaaaccgtccatcgctgaaatgttgcacaggggacggatgctgtggattattctgctatcaaccattgcactgggctggacgacaccgattcctctaatcgaggactcagaggagattgacgaaccctgctttgatccatgctactgtgaggtgaaagaatcgctctttcatattcattgcgattccaaggggttcaccaatattagccagatcacggaattttggtcacggccctttaaactctacttgcagcggaacagcatgcgaaaattatataccaactcttttctacatctgaacaacgccgtgagtataaacttgggcaacaatgcgttgcaggatatacagactggcgcattcaacggcctcaaaatcttgaagcgattgtacctgcacgagaacaaactcgacgttttcagaaatgacacctttctcggtctggagagcctggagtacttacaggctgattataatgttataaaacggattgagtccggagcatttagaaatctgagcaagctccgggtgctgatcttaaatgataatctcatccccatgttgccgaccaatctgttcaaagccgtctccctgacccacctcgacctgagggggaacagactgaaagtgcttttttaccgaggcatgctcgatcacattggccgatccctgatggagctccaacttgaagagaatccgtggaactgcacatgtgagattgttcagttgaaatcttggctggaaaggataccatatactgctctggtgggcgatatcacctgcgagacgccattccacttccatgggaaagatcttagagagattcgaaagacagagctctgcccactactctctgacagcgaggtcgaggcttctcttgggatcccccactcaagctcttctaaagagaatgcctggcctaccaaaccctcgtctatgctgtcatctgtccacttcaccgccagctctgtcgagtacaagtcaagcaacaagcaaccgaagcctacaaagcagccgagaacaccccgaccgccctccacaagtcaagcattgtaccctggacccaaccagccacccatcgccccttatcagactcgcccccccatcccgatcatttgtcccacagggtgtacctgtaatctgcacataaatgacttgggccttaccgttaattgtaaagagcgggggttcaataacatttcagaactgcttccacgccccctcaacgcaaagaaattgtatctgagttcgaacctgatccaaaagatttatcgatctgatttctggaatttttctagtcttgatctgcttcacttgggaaacaaccgaatttcgtacgttcaggacggcgcttttataaatctgcctaaccttaaaagcctgttcctcaacggtaatgatatcgagaagcttactcctggaatgttcagagggctccagagcctacactatctgtactttgaattcaatgtcatcagggaaatccagccagctgctttcagtttaatgcccaatctgaaactgctttttctaaacaacaatctgctgcgtaccctgccaacggacgctttcgccggaacttctctggcccgccttaatctccgcaagaactattttctctatcttcctgttgcgggcgtcctggagcacctcaacgctatcgtgcagatagacctcaacgagaatccatgggactgtacttgtgaccttgtcccatttaagcagtggattgagaccataagctctgtatctgtggtgggagatgttctgtgccgctcacctgagaaccttacccatcgggatgtacgaacaatcgagctcgaagtgttgtgccctgagatgcttcatgtagccccagccggcgaaagccccgctcagcccggagattcacacctgattggagctcctaccagtgctagtccctacgagttttctccccccggggggccagtccccctctctgtgctgattttaagtctcctggtattgttcttctctgccgttttcgtggccgctggcctgtttgcatatgtgctgcgcaggcggaggaaaaaactccctttcaggtcaaaacggcaggaaggcgtggatctcaccggtattcaaatgcagtgccacaggctgtttgaggacggaggcggcggcggcggaggaagcggggggggcggccgtccgactctttcttccccagagaaggcccctcctgttggtcatgtgtatgaatatattccgcatccagttactcaaatgtgcaacaacccaatctacaagcccagagaggaagaagaagtcgcagtgagcagtgcacaggaagcaggttcggctgaacggggaggcccgggtacacagcccccaggtatgggagaagccctccttggctcggaacaattcgccgagactccaaaagagaaccactcaaattaccgaacgcttcttgagaaagagaaggagtgggcactggccgtgtcatccagtcaacttaataccattgtgaccgtgaatcaccaccatccacatcaccccgcggttggaggcgtgagcggtgtggtcggcggaacggggggcgatcttgccgggttcagacaccacgaaaaaaatgggggtgttgtccttttcccacctggcggcggttgtgggtcaggaagtatgctgctagatcgggagcgaccacagcccgccccatgtactgtcggattcgtagattgcctttacggcaccgttcccaaattaaaagagctgcacgtgcacccacctgggatgcagtacccggatcttcagcaggacgcacgcctgaaagaaaccttgctctttagtgcaggtaagggtttcaccgatcatcaaactcagaagagcgactaccttgagctccgcgccaaactgcaaacaaaacctgattacctcgaggtgttggagaagacaacctatcgcttttag

SEQ ID NO: 183206 - DNA, 2934 bp, Artificial Sequence
  derived and/or modified sequence
atgaaaccatccatcgctgaaatgctccaccgaggccggatgttatggattatcctgttgtcaacaattgctttggggtggaccacccctatacccttgattgaagatagtgaggagatcgatgagccatgtttcgacccatgttattgtgaggtcaaggagagcttgttccatatccattgcgatagcaaagggttcaccaacatcagtcagatcaccgagttttggtcccgcccattcaagctgtatctccagagaaacagcatgcggaaattgtacaccaacagcttcttgcacctgaacaacgccgtgagtatcaacctgggtaacaacgcactgcaggacattcagacgggagcctttaatggtttgaagattctgaaaaggttatacctccacgaaaataagctggacgtgtttcggaatgacaccttcttgggcctggagtcccttgagtacttgcaggccgactataatgtgattaagaggatcgaaagtggggcttttaggaatctcagcaagctgagggttctcatcctgaacgacaacctcatccccatgctaccaacaaatctctttaaagcggtctcacttacccacctcgacctgcggggaaacagactgaaggtcttgttctaccgcggcatgcttgaccatatcggacgcagtttaatggagttgcagctagaagagaacccgtggaactgcacctgtgagattgtacagttgaagtcatggcttgaacgaataccatacaccgcacttgtgggagacattacttgtgagacacccttccatttccatggcaaggacctaagggaaatccgtaagactgagctgtgtcctctgctctctgatagtgaagtagaggcgagcctcgggataccacacagtagttccagcaaggagaatgcatggcccactaagcccagctcaatgctctcctctgtacatttcacagcttcttctgtcgaatataaatctagtaataagcagccaaaaccaacaaagcaaccgaggaccccaaggcccccctctacaagccaggccttataccccggaccgaatcagcctcctatcgccccttatcagacaaggcctccaatacccattatttgccctactgggtgtacctgtaacttgcatatcaatgacttaggactaacggtgaactgcaaagagaggggttttaacaacatatccgagctcctccctaggccgttgaatgcgaagaagctgtatctgtccagcaatctgatacaaaagatttatcggagcgatttttggaactttagtagtttggatttactgcatctcggcaataataggatcagttatgtgcaggacggagccttcattaatctgccgaatctgaagagcttattccttaacggaaacgacattgagaagttaacacccgggatgtttcgggggctgcagagccttcattacctgtatttcgaattcaacgtgataagggaaattcagcccgccgcgttttccctgatgcccaacctcaagttgctgtttctgaacaacaacttgttgaggactttgccaaccgatgctttcgccgggaccagcctggcaaggttgaatctcaggaaaaactactttttgtatcttccggtcgccggtgttttggaacatctgaatgcaatagtccaaatcgatctgaatgaaaatccctgggactgtacctgtgatctcgtgccctttaagcagtggattgaaaccatctcaagcgtgtccgttgtaggtgacgtactttgtcggtcaccggaaaacctgacccatcgcgacgttcggaccatagagttagaggtgctttgccctgaaatgctgcatgtggcacctgcaggtgaatcacccgctcagccaggggatagccacctcatcggcgcccctactagtgcctccccttacgagtttagtccaccgggagggcctgtccctctgagtgtgctcattctctcattactggtgcttttcttctccgctgttttcgtggccgcaggattgttcgcgtacgtacttcgtcggcgacggaagaaactgcccttcagatccaagcggcaagagggcgtagacctaactgggattcagatgcagtgccatcgtctctttgaagacggaggcggaggtggggggggatcagggggaggaggtagacctactctgagcagccctgaaaaggccccccctgtaggccacgtgtacgagtacatcccccatcccgtgactcaaatgtgtaacaacccaatatataagccccgagaggaagaggaggtcgccgtgtccagtgcccaggaagctggttccgccgagcgcggcggacccgggacgcagccccctggcatgggggaggctttactgggtagcgaacaatttgctgagacaccaaaagagaaccattcgaattatagaacactcctggagaaggaaaaggagtgggcgctggccgtgtcttcctcacagctgaacactatcgtcaccgtgaatcaccaccatccccatcatcccgctgtgggtggagtgtcgggggtcgtcgggggaaccggtggcgacctggcagggtttcgccatcacgagaaaaacggcggcgtggtcttgttcccccccggcgggggttgtggctccggtagcatgcttctggatcgcgagcgcccccaaccagccccttgcacagtcgggttcgtagactgtctgtatggcacagtccctaaacttaaggagctacacgtccatccgccaggcatgcagtaccccgaccttcaacaagatgctaggctgaaggagacgctcctattttctgccggcaagggctttaccgaccaccaaacccaaaagtctgattacttagagctccgggctaaacttcagaccaagccagactaccttgaggtgctagagaaaacgacttacagattctag

SEQ ID NO: 183207 - DNA, 492 bp, Artificial Sequence
  derived and/or modified sequence
atgaagcccagtattgcagagatgctgcacagaggacgtatgttgtggataatactgctgagcacgatcgccctggggtggactacccctattccgctcatcgaggacagtgaagagatcgatgaaccatgctttgatccttgctactgcgaggtcaaagagtccctcttccacattcactgtgacagcaaaggattcacaaacatctcacaaattaccgagttctggtctagaccctttaaactgtatctgcagcgtaacagcatgagaaagctgtacacgaactcctttctacacctcaacaacgctgtttctatcaacctcgggaacaatgctcttcaggacatccagacaggggccttcaacggcttgaagatccttaagcgtctgtatctgcacgaaaataagctcgacgtgttcagaaacgatacttttcttggcctggaatcgctggaatatctccaggccgactataacgtgattaaacgatag

SEQ ID NO: 183208 - DNA, 2934 bp, Artificial Sequence
  derived and/or modified sequence
atgaagcccagcattgctgagatgctgcaccggggccgcatgctgtggatcatcctgctgagcaccatcgccctgggctggaccacccccatccccctgattgaagattctgaggagattgatgagccctgctttgacccctgctactgtgaggtgaaggagagcctcttccacatccactgtgacagcaagggcttcaccaacatcagccagatcacagagttctggagccggcccttcaagctgtacctgcagaggaacagcatgaggaagctgtacaccaacagcttcctgcacctgaacaatgctgtgtccatcaacctgggcaacaatgccctgcaggacatccagacaggagccttcaacggcctgaagatcctgaagaggctgtacctgcacgagaacaagctggatgtgttcagaaatgacaccttcctgggcctggagagcctggagtacctgcaggccgactacaacgtcatcaagagaattgagagcggggccttcaggaacctgagcaagctgcgggtgctgatcctgaatgacaacctgatccccatgctgcccaccaacctcttcaaggctgtgtccctgacccacctggacctgcggggcaaccggctgaaggtgctcttctaccggggcatgctggaccacatcggccgcagcctgatggagctgcagctggaggagaacccctggaactgcacctgtgagatcgtgcagctgaagtcctggctggagcgcatcccctacacagccctggtgggggacatcacctgtgagacccccttccacttccacggcaaggacctgcgggagatcaggaagacagagctgtgccccctgctgagtgacagcgaggtggaggccagcctgggcatcccccacagcagcagcagcaaagaaaatgcctggcccaccaagcccagctccatgctgagctctgtgcacttcaccgccagctctgtggagtacaagagcagcaacaagcagcccaagcccaccaagcagcccaggaccccccggccccccagcaccagccaggccctgtacccaggccccaaccagccccccatcgccccctaccagaccaggcctcccatccccatcatctgccccaccggctgcacctgcaacctgcacatcaatgacctgggcctgactgtgaactgcaaggagcggggcttcaacaacatcagcgagctgctgccccggcccctgaatgccaagaagctgtacctgagcagcaacctgatccagaagatctacagaagtgacttctggaacttcagcagcctggacctgctgcacctgggcaacaaccgcatctcctatgtgcaggatggagccttcatcaacctgcccaacctgaagagcctcttcctgaatggaaatgacatcgagaagctgaccccaggcatgttccggggcctgcagagcctgcactacctgtactttgagttcaacgtcatccgggagatccagcctgctgccttcagcctgatgcccaacctgaagctgctcttcctgaacaacaacctgctgcggaccctgcccacagatgcctttgctggcaccagcctggcccggctgaacctgaggaagaactacttcctgtacctgcctgtggccggcgtgctggagcacctgaatgccatcgtgcagattgacctgaatgaaaacccctgggactgcacctgtgacctggtgcccttcaagcagtggattgagaccatcagctctgtgtctgtggtgggagatgtgctgtgccgcagccctgagaacctgacccacagagatgtgaggaccatcgagctggaggtgctgtgcccagagatgctgcacgtggccccagctggggagagccctgcccagcccggggacagccacctgattggagcccccaccagcgccagcccctatgagttcagccccccaggcggccctgtgcccctgtctgtgctgatcctgagcctgctggtgctcttcttctctgctgtgtttgtggccgccggcctgtttgcctacgtgctgcggcggcggaggaagaagctgcccttccgcagcaagaggcaggagggcgtggacctgaccggcatccagatgcagtgccaccggctgtttgaagatggcggcggcggcggcggcggcagcggcggcggcggccggcccaccctgagcagccctgagaaggcccctcctgtgggccacgtgtatgagtacatcccccaccctgtgacccagatgtgcaacaaccccatctacaagccccgggaggaggaggaggtggccgtgagcagcgcccaggaggccggcagcgctgagcggggcggccctggcacccagcccccaggcatgggagaggccctgctgggcagcgagcagtttgctgagacccccaaggagaaccacagcaactaccgcaccctgctggagaaggagaaggagtgggccctggccgtgagcagcagccagctgaacaccatcgtgacagtgaaccaccaccacccccaccaccctgctgtgggcggcgtgtctggagtggtgggcggcactggaggagacctggccggcttccgccaccacgagaagaatggaggagtggtgctcttccccccaggcggcggctgcggcagcggctccatgctgctggaccgggagcggccccagcctgccccctgcaccgtgggctttgtggactgcctgtatggcaccgtgcccaagctgaaggagctgcacgtgcaccccccaggcatgcagtacccagacctgcagcaggatgcccggctgaaggagaccctgctcttctctgctgggaagggcttcacagaccaccagacccagaagagtgactacctggagctgcgggccaagctgcagaccaagccagactacctggaggtgctggagaagaccacctaccgcttctag

SEQ ID NO: 183209 - DNA, 492 bp, Artificial Sequence
  derived and/or modified sequence
atgaagcccagcattgctgagatgctgcaccggggccgcatgctgtggatcatcctgctgagcaccatcgccctgggctggaccacccccatccccctgattgaagattctgaggagattgatgagccctgctttgacccctgctactgtgaggtgaaggagagcctcttccacatccactgtgacagcaagggcttcaccaacatcagccagatcacagagttctggagccggcccttcaagctgtacctgcagaggaacagcatgaggaagctgtacaccaacagcttcctgcacctgaacaatgctgtgtccatcaacctgggcaacaatgccctgcaggacatccagacaggagccttcaacggcctgaagatcctgaagaggctgtacctgcacgagaacaagctggatgtgttcagaaatgacaccttcctgggcctggagagcctggagtacctgcaggccgactacaacgtcatcaagaggtag

SEQ ID NO: 183210 - DNA, 2934 bp, Artificial Sequence
  derived and/or modified sequence
atgaagcccagcatcgccgagatgctgcaccggggccggatgctgtggatcatcttgttgtcgaccatcgctctagggtggactactccgattcccctgattgaagatagcgaggaaatcgatgagccctgctttgacccctgttactgcgaagttaaggagagtctcttccacattcactgtgactcaaagggctttaccaacatcagccagattacagagttctggtcgagaccctttaaactttatctccagcggaatagtatgcggaagttgtatacaaattccttcctccatctcaataacgcagtgagtataaacttgggaaacaacgctctacaggatatccagaccggagcttttaacggcctgaagatactgaagagactttacctccacgagaataagctagacgtattcaggaatgataccttcctgggtttggaatctttggaatatctccaggcagactacaatgtcatcaagagaattgagtccggggctttcaggaatttgagcaaactgcgcgtactcatcctcaacgacaatctcatccctatgctgcctacgaatttgttcaaggccgtgtcccttacacacctcgatttaagaggaaaccgcctgaaagtgctcttttatagagggatgctagatcacattgggcgctccctgatggagcttcagctcgaagaaaatccttggaactgcacatgtgaaatcgtgcagctgaaatcctggcttgagcggattccctacactgctctagtgggggacattacctgtgaaactccattccactttcatggaaaggacctaagagaaattaggaagaccgagctctgtccacttctctcggacagcgaagtggaggctagcttagggataccacattctagctcctccaaggagaacgcctggcccaccaaaccctcttccatgctctcctccgtccactttaccgcttcctccgtggaatacaagagctctaacaagcagcctaagcccaccaaacagccgcggacaccaaggccaccctccacctcccaggcactttatcccggcccgaaccaaccaccaattgcgccataccagacccgtccgcccattcccatcatctgtccaaccgggtgcacttgtaatcttcatatcaacgacctcgggctgactgtgaattgcaaggaacggggattcaataatatctctgagttactcccacgaccgcttaacgccaaaaagctctacctctcgtcgaacctgatccagaagatttaccggagcgacttctggaacttttcctctttagaccttctgcacctcgggaacaataggattagctacgtgcaggacggcgccttcatcaacctccctaacttgaagagcctctttctcaatgggaatgacatagagaagcttacccctggtatgttcagaggccttcagagcctacactacctgtattttgagtttaacgtgatccgggagatccagcccgctgctttctccttaatgcccaacctgaagctgctgtttttaaataacaacctgctgcggaccttgccaaccgatgcctttgctgggacatctctggcccgcctaaacctccgcaagaattattttctttatctgcctgtcgccggtgtcttggagcacttgaacgctattgtgcagatcgacctcaatgagaatccatgggattgcacctgcgacttagttccattcaaacagtggattgagacgattagtagtgtttcagtcgttggcgatgtgctgtgtcggtctcccgagaatctgactcaccgtgatgtgagaactattgagctcgaagtactctgcccagagatgctgcatgtcgcgcccgctggagagtcgccggcccaacccggcgattctcaccttattggagcccccaccagcgcttctccatacgagtttagtcctccaggaggccccgtgcctctgtctgtgttaatccttagcttgctggtgctttttttctctgcagtgttcgtggctgccggtttgtttgcctacgtgctgcggcggcgtcggaagaagctaccttttagaagcaaaagacaggagggtgtggacctgaccggtattcagatgcagtgccaccggctattcgaggatggcggcggtggaggcggaggcagtggcggtggcgggaggccaaccctctcctcacctgagaaggccccccccgttggccacgtttatgagtatatcccacaccctgtaacccaaatgtgtaataatccaatttataaacctagagaagaggaagaggtggcggtgtctagtgcacaggaagcaggtagtgccgagcgagggggccccggtacccaaccccctggaatgggtgaggccctccttggtagcgagcaattcgccgagaccccgaaagagaaccacagtaattacagaacactcctggagaaagagaaagagtgggccctggcggtctcgagctcacaacttaatacaatcgttaccgtgaaccaccatcacccccatcaccctgccgtgggcggggtcagcggagtggtcggcggaacggggggcgatctagccggtttccggcatcacgagaagaatgggggcgtcgtgttattccctcccgggggtggttgcgggtctggtagcatgctgctcgaccgggagaggccacagccagccccctgtacagtgggattcgttgattgtctgtacggcaccgtgcctaagctgaaagagctgcacgtgcacccaccaggcatgcagtatccagatctccagcaggatgcgcgtcttaaagagacattacttttttcagccggaaagggattcacagaccaccagacccagaaatctgattatctggaactgagggccaagctgcaaactaagcccgattacctcgaagtgctcgaaaaaactacttacagattttag

SEQ ID NO: 183211 - DNA, 2934 bp, Artificial Sequence
  derived and/or modified sequence
atgaagcccagcatcgccgagatgctgcaccggggccggatgctgtggatcatactgttatcaaccattgctcttggctggactactcccatcccactgatcgaagatagcgaagaaatcgacgagccatgtttcgatccttgctattgtgaagtaaaagagtccctgttccacattcattgcgatagtaaaggcttcaccaacataagccagattactgaattttggtcacgtccctttaagctctatcttcagagaaacagcatgcgcaagctgtatactaacagctttctgcacttaaacaacgctgtgtctattaacctgggcaataatgctctacaagacatacagactggcgcattcaacgggctgaagatcctcaagcgattgtatctgcacgagaacaagttggacgtgttcagaaatgacacgtttttgggtctggaatctctggagtatctacaagcagactacaacgtcatcaaacggatcgagagtggtgcctttagaaatctgtccaagcttagggtcctgattctgaacgataacctgattcctatgctccccactaacctcttcaaagctgtctctctgacgcaccttgacctgcgagggaaccgcctgaaggttctcttctaccgagggatgctggaccatatcggaagaagtctcatggagttacagctcgaggagaatccatggaactgcacctgtgaaatcgtgcagctgaaatcttggttggaaaggatcccttacacggccctagttggagacattacatgcgaaacaccctttcactttcatggaaaagatctgcgcgaaattcggaagactgaactatgcccactgctgtcagattcagaggtagaggcctctctggggatcccacattccagtagttccaaagagaacgcttggcccacgaagccatcatccatgctttccagtgtacattttactgcaagctccgtagagtacaaaagtagtaataaacagcctaagcctacaaagcagcctagaactccccgtccaccttcaacgtctcaagcattgtacccagggcctaatcaacctccgatcgccccctatcaaaccaggcctcctattcccatcatctgccccacaggctgtacctgcaatttacacatcaacgacctaggactcacagtcaattgcaaggagagaggcttcaataatatcagcgaacttctgccacggcctctgaacgctaagaaactgtacctctcttcaaaccttatccagaaaatctatcgctccgacttctggaacttttcctcactggatctcctgcatctcgggaacaaccggatatcatatgtccaggacggagccttcatcaacctgcccaatctgaaaagcttgttcctgaacgggaacgacatcgaaaaattaaccccaggaatgtttcgcgggttacagagcctgcactacttgtattttgagtttaatgtcattagagagatccagccagccgccttttccctaatgccaaatctcaagctcctgtttctgaacaacaacctgctccggacacttccaactgatgcatttgccggcacctccctggcgaggctgaatctgagaaaaaattattttctctatctgccagtggctggcgtgttggagcatcttaatgccatcgtgcagattgacctgaacgagaacccctgggattgcacatgtgatctagtgcctttcaaacaatggattgaaactattagctctgtatcagtggtgggagacgttttatgccgatcaccggagaatctgacacatcgagatgtccgcactatcgagctggaagtgctttgtcccgaaatgttgcatgtcgctcccgccggagaaagccccgcacagcctggagactcgcatctgattggcgccccgacctcagcatccccatacgaattttcaccgcctggcgggcctgtcccactgtccgttcttatcctgagcctacttgtcctgttcttcagcgccgtgtttgtagccgcggggctgtttgcatatgtgctgagaaggcggcgaaagaaactgccatttaggtctaaaagacaggaaggagtggatctgactggtatacagatgcagtgccacaggctgttcgaggatgggggcgggggaggtggtggtagcggcgggggtgggcgacctacactgagcagccccgaaaaagccccccccgtgggccacgtctatgagtacatcccgcaccccgtcactcagatgtgcaacaatccaatttacaagcctcgggaggaagaggaggttgcagtctcatccgcgcaggaggctggctcagctgaaaggggaggaccgggtacacagcctccaggaatgggagaggctctactggggagtgagcaatttgccgaaaccccaaaggaaaatcattcaaattatcgtacgctgcttgaaaaagaaaaagagtgggcgctggctgtgtcttcctcccagttaaatacaatagttactgtgaaccaccatcaccctcatcatccggcagtgggcggcgttagtggcgtggtgggcggcacgggcggggacctggcaggcttccgccaccacgaaaaaaacggcggggtcgtgctgttccccccgggcggtggatgtggctccgggagtatgctgttagacagagagcgtccccagcctgccccatgtaccgtgggatttgttgattgcctgtatggaaccgtgcctaagttgaaggagctgcacgtccatccccctggaatgcaataccctgatcttcagcaagacgccaggctgaaagagactctgcttttctccgcaggaaaaggtttcacagaccatcagacccagaaatccgattacctcgagctgagagcaaagttgcagaccaagcctgactatctagaggtgctcgaaaaaaccacctatagattctag

SEQ ID NO: 183212 - DNA, 492 bp, Artificial Sequence
  derived and/or modified sequence
atgaagcccagcatcgccgagatgctgcaccggggccggatgctgtggattattctgctctccacgatcgcactggggtggacaacacctatccctctgatcgaagactccgaagagatcgatgagccgtgctttgatccctgctactgcgaggtgaaagagtccctgttccatatccactgtgattctaagggcttcactaatatcagtcagattactgaattttggtcaaggcctttcaagctctatctgcagcgtaactccatgaggaaactctacaccaactcctttcttcaccttaataatgcagtttccatcaatcttggtaacaatgcattacaggatatacagactggagccttcaacgggctgaagattctcaaacgcctctatctccacgagaacaagcttgatgtcttccggaacgatacctttctgggactggagtccctggagtacctccaggctgattacaacgttataaagcgctag

SEQ ID NO: 183213 - DNA, 2934 bp, Artificial Sequence
  derived and/or modified sequence
atgaaaccatccatagctgagatgctgcaccggggaaggatgctgtggatcattcttctctctaccatcgctttaggctggacaacccccataccccttatcgaagactcagaggagattgacgagccctgctttgatccgtgttattgcgaggttaaggaatccctctttcatatccactgtgactcaaaggggtttaccaacatttcccagattactgaattttggagtcggccattcaaattgtatctccaacgcaacagtatgcggaagctgtacacgaacagtttcttgcacctgaacaatgctgtatccattaacttaggaaacaatgcacttcaggacatacagacgggcgcattcaatggcttgaagattttgaagagactgtatcttcacgaaaataaactcgacgtcttcagaaacgacacctttcttggactggaatcactcgagtatttgcaagcggattataatgttatcaaacgcatcgagtccggcgcttttcggaacttgagcaagcttcgagttcttatcttgaatgacaacctgattccaatgctgcctacaaacctgtttaaagcagtctcacttactcacctggacctgcgaggcaaccggcttaaagtgctgttctaccgtggtatgcttgaccacatcggacgatccctgatggagctgcaactggaggaaaatccctggaactgtacctgcgagattgtgcagctcaaaagctggcttgaacggattccatatacagctcttgtgggggatataacatgtgaaacaccctttcactttcatggaaaagatttacgcgaaatcaggaagaccgagttgtgtccattgctgagcgactccgaagtcgaggcttcacttgggattccccacagctctagcagtaaggaaaacgcttggccaactaagccatcttctatgttatcttcggtgcacttcacagccagtagcgtggaatataaatcaagcaacaagcagccgaagcccaccaagcagccacgtacccctcggcctccttccacatcccaggccttgtaccccggtcccaaccagcctcccatcgctccatatcagacgagaccacccatccctattatctgtcctacgggatgtacgtgcaatcttcacataaatgatctgggcttgacagtaaactgtaaggagcgcggatttaataacatttccgagctgctccctagaccccttaatgccaagaaactatatcttagttccaatctgattcaaaaaatttatcgctccgatttttggaattttagctcattggatttacttcacctggggaataaccggattagttacgtgcaggacggcgcttttattaacctgcccaaccttaagtctctgttcctaaatggaaatgacattgagaaactgaccccaggaatgtttcggggacttcaatccctccattatctgtactttgagttcaacgtcataagggaaattcagcctgccgcatttagcctcatgcctaatctcaagctgctttttctgaacaataacctgctccgcactctcccaacagacgcgtttgccggaaccagcctggcacggttgaacttacggaagaactatttcctgtacttgccagtggccggagtactggaacatctcaacgcaattgtgcagatcgatctgaacgagaatccatgggattgtacatgcgaccttgtaccctttaaacaatggattgaaaccatttcgagtgtgagtgtggtgggtgacgtcttatgccgctcaccagagaacctaacacaccgcgacgtgcgcacaatagagctggaggtactatgccccgagatgttacacgtcgcaccagccggtgagagcccggctcagcctggagattctcatctgattggagccccaacttcggcttccccgtacgagtttagtcctcctggcggtcccgtgccactctcagtgctcatcctttctctcctggttctgtttttctcagctgtttttgtggccgctggcctgttcgcatatgtcctgcggagaaggagaaagaaactgcccttccgctcaaagaggcaggaaggagtggacttaaccggcattcagatgcagtgccacagactgtttgaggatgggggtggcggtgggggtggatctggaggtggtgggcgtcccaccctctcttcgccagaaaaggctccaccagtgggacatgtttatgaatatattcctcacccggtgacccagatgtgcaataatcctatctacaaacccagggaagaggaggaagtcgcagtgtcgagtgcccaagaagctggatctgccgaacgcggtggccctggaacgcaacctccagggatgggcgaagctctgttgggcagtgagcagtttgccgaaacccccaaagaaaaccacagtaattatcgaaccctgctcgagaaggaaaaagagtgggctttggcagttagttcgtctcaattgaatactattgtcacggtgaaccatcatcacccccatcacccagctgtaggcggagtgtcgggtgtggtgggaggaactggtggcgaccttgccggttttagacaccatgagaaaaatgggggagtggtcctcttccccccagggggtggttgcggctcaggcagtatgctgctcgatcgggagagaccacaaccagcaccatgcaccgtgggatttgtggattgtttatacggcacggtcccaaagctcaaagaacttcacgtccatccacccggtatgcaatatcctgatcttcagcaggacgccaggctgaaagagactctcttgtttagcgcgggtaaaggctttaccgaccaccagactcaaaaaagcgactacctggagctccgagccaagctgcaaacgaaaccagattacttagaggtgcttgagaagaccacctacaggttttag

SEQ ID NO: 183214 - DNA, 2934 bp, Artificial Sequence
  derived and/or modified sequence
atgaagccaagcatagcagaaatgttgcatcggggtcggatgctctggataatcctgttaagcaccattgctttagggtggaccacgccaatcccacttatagaggattcagaagaaatcgatgaaccttgttttgatccctgctactgtgaggtgaaagaaagcttgttccatatccattgcgatagtaagggtttcactaatatctcccagattacagagttttggagtaggccttttaagctctacctgcagcgcaattccatgcgcaaactgtacaccaactcattcttacatctgaataatgcggtgtctattaaccttggcaacaatgcactccaggacatccagaccggcgcattcaatggcttaaagatattgaagcgtctttacctccatgaaaacaagttagacgtgtttaggaatgacaccttcctgggcctggaaagcctggagtatttgcaggcggattacaatgtgattaagcgaatcgagagcggagcctttagaaacctgagtaagctccgggtgctaatcctaaatgacaatttgatccccatgcttcccactaatctatttaaggccgtgtcgctgacgcatttagatttgagaggcaataggctgaaagttttattttatcgtggcatgttggatcacattggaagatccctgatggagttgcagctcgaagagaatccctggaattgtacgtgcgaaatagtccagctgaaatcatggttagagagaatcccatatacagccctcgttggcgatatcacatgtgaaaccccctttcacttccacgggaaggatctgcgagagatccgcaagactgagctgtgcccgctcttgtctgactccgaggtggaggccagcctcggcatcccccattcttcctcaagtaaggaaaacgcctggcctacaaaaccatcctccatgctctcttccgtgcactttacggcaagctctgtggaatacaaatcatcgaataaacaacctaagccaacgaaacaacctcggacgccaaggccaccttccacgagccaagccctatacccgggacccaaccagccccctattgctccatatcagaccagaccacccatccctatcatctgcccaaccgggtgcacctgcaatctccacattaatgacctgggtctcaccgttaattgcaaagagagggggttcaataatatatccgaacttctgcctcgaccccttaatgctaagaaactgtacctgagctccaatttgattcaaaaaatttaccgctccgacttttggaacttttcctccttggacctgctgcacctcggaaataacaggatctcctatgtgcaagacggtgcattcatcaacctgcctaacctgaaaagtctcttccttaacgggaacgatatcgaaaagcttacccccggaatgttccggggactccagtccctgcattatttatactttgaattcaatgtcatacgggagatccagccagccgctttctctctaatgccaaacctgaagctcctctttctcaataacaacttgttacgcactctccccacagatgcctttgcgggtactagccttgccaggttgaatctgcgaaagaactacttcctctatctccctgtcgccggagttctcgaacatctcaatgccatagtgcagatcgatctgaacgagaatccatgggactgcacatgcgaccttgtgcctttcaagcagtggattgagacaatatcctcagttagcgttgttggagatgtgctttgtagatccccagagaatctgacccatagggatgtgcggacaattgaactagaagttttatgccccgagatgttacacgttgcccctgctggagaatcccccgcacagcccggtgactcccacctgattggggcacccaccagcgcctccccctacgagtttagtccgcctggtggaccagtccctctatcagtgctaatcctctccttgctggtgttgttcttctccgcagttttcgtcgccgctggcctcttcgcttacgttctgcgacggaggcggaaaaagcttcctttccggtccaaaaggcaagagggagtggatctcactggtatccaaatgcagtgccataggctgtttgaggacgggggaggtggaggcggaggctcagggggtggtggacggccaacgctgtctagtcccgaaaaggcgcctccggttggacacgtgtacgagtacattccacacccagtgacccaaatgtgcaataaccccatctacaaacccagagaagaagaggaggttgcagtttccagtgcgcaggaagcgggaagtgccgaaagagggggaccagggacacagcctccagggatgggcgaggccctcctcgggtctgagcagtttgctgaaacacctaaggagaaccacagtaattacaggacactgttagaaaaggaaaaggaatgggcgttggcagtgtcctctagccagctcaacaccattgtcaccgtcaaccatcaccacccacaccatccagcagtcggtggagtctctggggtggtgggcggaaccggcggagacctagcaggatttcgccatcacgaaaagaatggaggcgtcgtgcttttccctcccggtggaggttgcggttctgggtctatgctgctcgacagggagcggccacaaccggctccctgtactgttgggtttgtcgactgtctctacggaaccgttccaaaactgaaggagttgcacgttcatcccccaggtatgcagtaccccgatttacagcaggacgccagactgaaggagacactgctgttctctgccggaaaagggttcacagaccaccagacccagaaaagtgattacctcgagctgcgggctaagctgcagactaaacccgactacctggaggtccttgagaaaaccacctatcgattttag

SEQ ID NO: 183215 - DNA, 492 bp, Artificial Sequence
  derived and/or modified sequence
atgaaaccctcaattgcagagatgttgcataggggaagaatgttgtggatcattcttctctccacaatcgccctagggtggaccaccccaattcctctaatcgaggactcagaggaaatcgatgaaccctgctttgacccttgctactgtgaggtgaaagaatcccttttccatattcattgtgactctaagggctttaccaacatcagccagataacagagttctggagccgccctttcaaactctacttgcagcgcaatagtatgagaaaattatacaccaactcatttttgcacctcaataatgccgtttctattaatctgggaaataatgccctgcaagacatccaaacaggcgcattcaatggcctgaagattctgaaaagactctacttacacgaaaataagctagacgtatttagaaatgatactttcctagggctcgagagtctagagtaccttcaggcggactacaacgttatcaagcgatag

SEQ ID NO: 183216 - DNA, 4391 bp, Artificial Sequence
  derived and/or modified sequence
aagccgggattttgcctgcgatgcgcggcgagaggactgcggcggctgatttacacagttggcgcggaggaggggccgggggtgcgggggggacgcgctggcggagctccggcgatgggctgatctgggggctcccgagcgccgctcccttggtgcgcgatttgggggcggctgatggatttgcattcaggttccagccctgcgtttcctatattgactccttatacacgacctggcgctccagtttaggaggagacgttgttttgtaatcaaccacgaacgatgaaaccttccatagctgagatgcttcacagaggaaggatgttgtggataattcttctaagcacaattgctctaggatggactaccccgattcccctaatagaggactcagaggaaatagatgagccctgttttgatccatgctactgtgaagttaaagaaagcctctttcatatacattgtgacagtaaaggatttacaaatattagtcagattaccgagttctggtcaagaccttttaaactgtatctgcagaggaattctatgaggaaattatataccaacagttttcttcatttgaataatgctgtgtctattaatcttgggaacaatgcattgcaggacattcagactggagctttcaatggtcttaagattttaaagagactatatctacatgaaaacaaactagatgtcttcagaaatgacaccttccttggcttggaaagtctagaatatctgcaggcagattacaatgtcattaaacgtattgagagtggggcatttcggaacctaagtaaattgagggttctgattttaaatgataatctcatccccatgcttccaaccaatttatttaaggctgtctctttaacccatttggacctacgtggaaataggttaaaggttcttttttaccgaggaatgctagatcacattggcagaagcctgatggagctccagctggaagaaaacccttggaactgtacatgtgaaattgtacaactgaagagttggctggaacgcattccttatactgccctggtgggagacattacctgtgagacccctttccacttccatggaaaggacctacgagaaatcaggaagacagaactctgtcccttgttgtctgactctgaggtagaggctagtttgggaattccacattcgtcatcaagtaaggagaatgcatggccaactaagccttcctcaatgctatcctctgttcattttactgcttcttctgtcgaatacaagtcctcaaataaacagcctaagcccaccaaacagcctcgaacaccaaggccaccctccacctcccaagctttatatcctggtccaaaccagcctcccattgctccttatcagaccagaccaccaatccccattatatgccccactgggtgtacctgtaatttgcacatcaatgaccttggcttgactgtcaactgcaaagagcgaggatttaataacatttctgaacttcttccaaggcccttgaatgccaagaaactgtatctgagtagcaatctgattcagaaaatataccgttctgatttttggaatttttcttccttggatctcttgcatctggggaacaatcgtatttcctatgtccaagatggggcctttatcaacttgcccaacttaaagagcctcttccttaatggcaacgatatagagaagctgacaccaggcatgttccgaggcctacagagtttgcactacttgtactttgagttcaatgtcatccgggaaatccagcctgcagccttcagcctcatgcccaacttgaagctgctattcctcaataataacttactgaggactctgccaacagacgcctttgctggcacatccctggcccggctcaacctgaggaagaactacttcctctatcttcccgtggctggtgtcctggaacacttgaatgccattgtccagatagacctcaatgagaatccttgggactgcacctgtgacctggtcccctttaaacagtggatcgaaaccatcagctcagtcagtgtggttggtgatgtgctttgcaggagccctgagaacctcacgcaccgtgatgtgcgcactattgagctggaagttctttgcccagagatgctgcacgttgcaccagctggagaatccccagcccagcctggagattctcaccttattggggcaccaaccagtgcatcaccttatgagttttctcctcctgggggccctgtgccactttctgtgttaattctcagcctgctggttctgtttttctcagcagtctttgttgctgcaggcctctttgcctacgtgctccgaaggcgtcgaaagaagctgcccttcagaagcaagcggcaggaaggtgtggaccttactggcatccaaatgcaatgccacaggctgtttgaggatggtggaggtggtggtggcggaagtgggggtggtggtcgaccaactctttcctctccagagaaggcccctcccgtgggtcatgtgtatgagtacatcccccacccggttacccaaatgtgcaacaaccccatctacaagcctcgtgaggaggaggaggtggctgtttcatcagcccaagaagcagggagtgcagaacgtgggggtccagggacacaaccaccgggaatgggtgaggctctcctaggaagtgagcagtttgctgagacacccaaggagaaccatagtaactaccggaccttgctggaaaaagagaaggagtgggccctagcagtgtccagctcccagcttaacaccatagtgacggtgaatcaccatcaccctcaccacccagcagttggtggggtttcaggagtagttgggggaactgggggagacttggcagggttccgccaccatgagaaaaatggtggggtggtgctgtttcctcctgggggaggctgtggtagtggcagtatgctactagatcgagagaggccacagcctgccccctgcacagtgggatttgtggactgtctctatggaacagtgcccaaattaaaggaactgcacgtgcaccctcctggcatgcaatacccagacttacagcaggatgccaggctcaaagaaacccttctcttctcggctggaaagggcttcacagaccaccaaacccaaaaaagtgattacctcgagttaagggccaaacttcaaaccaagccggattacctcgaagtcctggagaagacaacatacaggttctaacagagagaagaaaatatattagtgctttttttttttcaaaagaaaaggaaaataaaagaaatatatcccttgctccctttacacttgtcccagtaactccatcctcacgatctttcctaccctgaacaaaactaaaaccgcatgataactagagaatacagatgtatgctctcccctctcagatgcgatttggaggaagggccatactcagatcattaatcaatgaaagtgccttcgcagacttttgccagcaaatgttatcattatttttttatactgaaacttgagactttgactgtgccatgtataagatatactggggatcattgtatggatcctaattaagtaaaattcaatgtgtctttttattttcagtaactattttttttatagttgtagttttgatttaaagggggggaaacaagttgacatttgtcatttgtggctttctttcttatcatcatggcacagattctgtacatgtattaacaatgcagtttgctgcatgcctggaaactgcaagatggggagggagggggcgggtcttgctcgaatgttctcactcactatcttgtctctcatacacatatccatctgcagaccatggtccctaaacctgcagtttcttcctgctggtgcaggtacacacacacacacacacacacacacacacacacacacacactccataccatttccattcaactcaatctgcttagttcgggtttgatccatttttctcctctccatagttctaccacccttcactgctagtgtacagctcacagcatctctcctaccaccctgggaaaagtcacattctaggctggattctactgaagtagaggcctggtggtttaacagccgaagacacacgcctagggatgagcaccctctttgtgacacttcatcctgatgccaagattttttggagaacatctgcactttcttatatatatatataatattaaaaaaagcaactgggtatatatcactaacagctttgtaggaagcacttttaatgttttctctctcacacacaaagattcaaaagaaatgtgcatatatttattctgtaatttcagtgattataaattgtaaaggtaatgtttaatcattgtatagtgattatgcctctggtatagctttcctaataaaaagtttttgaaaaacat

SEQ ID NO: 183217 - DNA, 4555 bp, Artificial Sequence
  derived and/or modified sequence
aaatccagagactgagctcaggctctcgggaacaacgaagctctccactgatccagagcaccgagattttaaatcaaaggaacctagtcctgggacactcactctgcctgcctgcctaccaaccatcgagggcatagggagctgtggtcgtgagctccctgtcgctggcatcgccgcgctaggtgcgcgccccgctctcccattggtatgcagcgaccatttccctgcaagtctcaaaggtggaaacatttaaacggattacaagcgtgattcggtagcctttcggaaagttggtggccagaagaggagaagctacaaggctacagtatgatggatacaattcagcttcgcagagagtttgcccctcctgctgggtagcccctcgcagcaaacctcggagatcctgagcgctctgcaccatagttttgtaatcaaccacgaacgatgaaaccttccatagctgagatgcttcacagaggaaggatgttgtggataattcttctaagcacaattgctctaggatggactaccccgattcccctaatagaggactcagaggaaatagatgagccctgttttgatccatgctactgtgaagttaaagaaagcctctttcatatacattgtgacagtaaaggatttacaaatattagtcagattaccgagttctggtcaagaccttttaaactgtatctgcagaggaattctatgaggaaattatataccaacagttttcttcatttgaataatgctgtgtctattaatcttgggaacaatgcattgcaggacattcagactggagctttcaatggtcttaagattttaaagagactatatctacatgaaaacaaactagatgtcttcagaaatgacaccttccttggcttggaaagtctagaatatctgcaggcagattacaatgtcattaaacgtattgagagtggggcatttcggaacctaagtaaattgagggttctgattttaaatgataatctcatccccatgcttccaaccaatttatttaaggctgtctctttaacccatttggacctacgtggaaataggttaaaggttcttttttaccgaggaatgctagatcacattggcagaagcctgatggagctccagctggaagaaaacccttggaactgtacatgtgaaattgtacaactgaagagttggctggaacgcattccttatactgccctggtgggagacattacctgtgagacccctttccacttccatggaaaggacctacgagaaatcaggaagacagaactctgtcccttgttgtctgactctgaggtagaggctagtttgggaattccacattcgtcatcaagtaaggagaatgcatggccaactaagccttcctcaatgctatcctctgttcattttactgcttcttctgtcgaatacaagtcctcaaataaacagcctaagcccaccaaacagcctcgaacaccaaggccaccctccacctcccaagctttatatcctggtccaaaccagcctcccattgctccttatcagaccagaccaccaatccccattatatgccccactgggtgtacctgtaatttgcacatcaatgaccttggcttgactgtcaactgcaaagagcgaggatttaataacatttctgaacttcttccaaggcccttgaatgccaagaaactgtatctgagtagcaatctgattcagaaaatataccgttctgatttttggaatttttcttccttggatctcttgcatctggggaacaatcgtatttcctatgtccaagatggggcctttatcaacttgcccaacttaaagagcctcttccttaatggcaacgatatagagaagctgacaccaggcatgttccgaggcctacagagtttgcactacttgtactttgagttcaatgtcatccgggaaatccagcctgcagccttcagcctcatgcccaacttgaagctgctattcctcaataataacttactgaggactctgccaacagacgcctttgctggcacatccctggcccggctcaacctgaggaagaactacttcctctatcttcccgtggctggtgtcctggaacacttgaatgccattgtccagatagacctcaatgagaatccttgggactgcacctgtgacctggtcccctttaaacagtggatcgaaaccatcagctcagtcagtgtggttggtgatgtgctttgcaggagccctgagaacctcacgcaccgtgatgtgcgcactattgagctggaagttctttgcccagagatgctgcacgttgcaccagctggagaatccccagcccagcctggagattctcaccttattggggcaccaaccagtgcatcaccttatgagttttctcctcctgggggccctgtgccactttctgtgttaattctcagcctgctggttctgtttttctcagcagtctttgttgctgcaggcctctttgcctacgtgctccgaaggcgtcgaaagaagctgcccttcagaagcaagcggcaggaaggtgtggaccttactggcatccaaatgcaatgccacaggctgtttgaggatggtggaggtggtggtggcggaagtgggggtggtggtcgaccaactctttcctctccagagaaggcccctcccgtgggtcatgtgtatgagtacatcccccacccggttacccaaatgtgcaacaaccccatctacaagcctcgtgaggaggaggaggtggctgtttcatcagcccaagaagcagggagtgcagaacgtgggggtccagggacacaaccaccgggaatgggtgaggctctcctaggaagtgagcagtttgctgagacacccaaggagaaccatagtaactaccggaccttgctggaaaaagagaaggagtgggccctagcagtgtccagctcccagcttaacaccatagtgacggtgaatcaccatcaccctcaccacccagcagttggtggggtttcaggagtagttgggggaactgggggagacttggcagggttccgccaccatgagaaaaatggtggggtggtgctgtttcctcctgggggaggctgtggtagtggcagtatgctactagatcgagagaggccacagcctgccccctgcacagtgggatttgtggactgtctctatggaacagtgcccaaattaaaggaactgcacgtgcaccctcctggcatgcaatacccagacttacagcaggatgccaggctcaaagaaacccttctcttctcggctggaaagggcttcacagaccaccaaacccaaaaaagtgattacctcgagttaagggccaaacttcaaaccaagccggattacctcgaagtcctggagaagacaacatacaggttctaacagagagaagaaaatatattagtgctttttttttttcaaaagaaaaggaaaataaaagaaatatatcccttgctccctttacacttgtcccagtaactccatcctcacgatctttcctaccctgaacaaaactaaaaccgcatgataactagagaatacagatgtatgctctcccctctcagatgcgatttggaggaagggccatactcagatcattaatcaatgaaagtgccttcgcagacttttgccagcaaatgttatcattatttttttatactgaaacttgagactttgactgtgccatgtataagatatactggggatcattgtatggatcctaattaagtaaaattcaatgtgtctttttattttcagtaactattttttttatagttgtagttttgatttaaagggggggaaacaagttgacatttgtcatttgtggctttctttcttatcatcatggcacagattctgtacatgtattaacaatgcagtttgctgcatgcctggaaactgcaagatggggagggagggggcgggtcttgctcgaatgttctcactcactatcttgtctctcatacacatatccatctgcagaccatggtccctaaacctgcagtttcttcctgctggtgcaggtacacacacacacacacacacacacacacacacacacacacactccataccatttccattcaactcaatctgcttagttcgggtttgatccatttttctcctctccatagttctaccacccttcactgctagtgtacagctcacagcatctctcctaccaccctgggaaaagtcacattctaggctggattctactgaagtagaggcctggtggtttaacagccgaagacacacgcctagggatgagcaccctctttgtgacacttcatcctgatgccaagattttttggagaacatctgcactttcttatatatatatataatattaaaaaaagcaactgggtatatatcactaacagctttgtaggaagcacttttaatgttttctctctcacacacaaagattcaaaagaaatgtgcatatatttattctgtaatttcagtgattataaattgtaaaggtaatgtttaatcattgtatagtgattatgcctctggtatagctttcctaataaaaagtttttgaaaaacataa

SEQ ID NO: 183218 - DNA, 585 bp, Artificial Sequence
  derived and/or modified sequence
acaaatcaatccacgggtacagaatgctgacttcccgacactcaatttcacagggtgtctcttgaagagctgccagttttgtaatcaaccacgaacgatgaaaccttccatagctgagatgcttcacagaggaaggatgttgtggataattcttctaagcacaattgctctaggatggactaccccgattcccctaatagaggactcagaggaaatagatgagccctgttttgatccatgctactgtgaagttaaagaaagcctctttcatatacattgtgacagtaaaggatttacaaatattagtcagattaccgagttctggtcaagaccttttaaactgtatctgcagaggaattctatgaggaaattatataccaacagttttcttcatttgaataatgctgtgtctattaatcttgggaacaatgcattgcaggacattcagactggagctttcaatggtcttaagattttaaagagactatatctacatgaaaacaaactagatgtcttcagaaatgacaccttccttggcttggaaagtctagaatatctgcaggcagattacaatgtcattaaacg

SEQ ID NO: 183219 - DNA, 2934 bp, Artificial Sequence
  derived and/or modified sequence
atgaagcccagcatcgccgagatgctgcacagaggcagaatgctgtggatcatcctgctgagcaccatcgccctgggctggaccacccccatccccctgatcgaggacagcgaggagatcgacgagccctgcttcgacccctgctactgcgaggtgaaggagagcctgttccacatccactgcgacagcaagggcttcaccaacatcagccagatcaccgagttctggagcagacccttcaagctgtacctgcagagaaacagcatgagaaagctgtacaccaacagcttcctgcacctgaacaacgccgtgagcatcaacctgggcaacaacgccctgcaggacatccagaccggcgccttcaacggcctgaagatcctgaagagactgtacctgcacgagaacaagctggacgtgttcagaaacgacaccttcctgggcctggagagcctggagtacctgcaggccgactacaacgtgatcaagagaatcgagagcggcgccttcagaaacctgagcaagctgagagtgctgatcctgaacgacaacctgatccccatgctgcccaccaacctgttcaaggccgtgagcctgacccacctggacctgagaggcaacagactgaaggtgctgttctacagaggcatgctggaccacatcggcagaagcctgatggagctgcagctggaggagaacccctggaactgcacctgcgagatcgtgcagctgaagagctggctggagagaatcccctacaccgccctggtgggcgacatcacctgcgagacccccttccacttccacggcaaggacctgagagagatcagaaagaccgagctgtgccccctgctgagcgacagcgaggtggaggccagcctgggcatcccccacagcagcagcagcaaggagaacgcctggcccaccaagcccagcagcatgctgagcagcgtgcacttcaccgccagcagcgtggagtacaagagcagcaacaagcagcccaagcccaccaagcagcccagaacccccagaccccccagcaccagccaggccctgtaccccggccccaaccagccccccatcgccccctaccagaccagaccccccatccccatcatctgccccaccggctgcacctgcaacctgcacatcaacgacctgggcctgaccgtgaactgcaaggagagaggcttcaacaacatcagcgagctgctgcccagacccctgaacgccaagaagctgtacctgagcagcaacctgatccagaagatctacagaagcgacttctggaacttcagcagcctggacctgctgcacctgggcaacaacagaatcagctacgtgcaggacggcgccttcatcaacctgcccaacctgaagagcctgttcctgaacggcaacgacatcgagaagctgacccccggcatgttcagaggcctgcagagcctgcactacctgtacttcgagttcaacgtgatcagagagatccagcccgccgccttcagcctgatgcccaacctgaagctgctgttcctgaacaacaacctgctgagaaccctgcccaccgacgccttcgccggcaccagcctggccagactgaacctgagaaagaactacttcctgtacctgcccgtggccggcgtgctggagcacctgaacgccatcgtgcagatcgacctgaacgagaacccctgggactgcacctgcgacctggtgcccttcaagcagtggatcgagaccatcagcagcgtgagcgtggtgggcgacgtgctgtgcagaagccccgagaacctgacccacagagacgtgagaaccatcgagctggaggtgctgtgccccgagatgctgcacgtggcccccgccggcgagagccccgcccagcccggcgacagccacctgatcggcgcccccaccagcgccagcccctacgagttcagcccccccggcggccccgtgcccctgagcgtgctgatcctgagcctgctggtgctgttcttcagcgccgtgttcgtggccgccggcctgttcgcctacgtgctgagaagaagaagaaagaagctgcccttcagaagcaagagacaggagggcgtggacctgaccggcatccagatgcagtgccacagactgttcgaggacggcggcggcggcggcggcggcagcggcggcggcggcagacccaccctgagcagccccgagaaggccccccccgtgggccacgtgtacgagtacatcccccaccccgtgacccagatgtgcaacaaccccatctacaagcccagagaggaggaggaggtggccgtgagcagcgcccaggaggccggcagcgccgagagaggcggccccggcacccagccccccggcatgggcgaggccctgctgggcagcgagcagttcgccgagacccccaaggagaaccacagcaactacagaaccctgctggagaaggagaaggagtgggccctggccgtgagcagcagccagctgaacaccatcgtgaccgtgaaccaccaccacccccaccaccccgccgtgggcggcgtgagcggcgtggtgggcggcaccggcggcgacctggccggcttcagacaccacgagaagaacggcggcgtggtgctgttcccccccggcggcggctgcggcagcggcagcatgctgctggacagagagagaccccagcccgccccctgcaccgtgggcttcgtggactgcctgtacggcaccgtgcccaagctgaaggagctgcacgtgcacccccccggcatgcagtaccccgacctgcagcaggacgccagactgaaggagaccctgctgttcagcgccggcaagggcttcaccgaccaccagacccagaagagcgactacctggagctgagagccaagctgcagaccaagcccgactacctggaggtgctggagaagaccacctacagattctag

SEQ ID NO: 183220 - DNA, 492 bp, Artificial Sequence
  derived and/or modified sequence
atgaagcccagcatcgccgagatgctgcacagaggcagaatgctgtggatcatcctgctgagcaccatcgccctgggctggaccacccccatccccctgatcgaggacagcgaggagatcgacgagccctgcttcgacccctgctactgcgaggtgaaggagagcctgttccacatccactgcgacagcaagggcttcaccaacatcagccagatcaccgagttctggagcagacccttcaagctgtacctgcagagaaacagcatgagaaagctgtacaccaacagcttcctgcacctgaacaacgccgtgagcatcaacctgggcaacaacgccctgcaggacatccagaccggcgccttcaacggcctgaagatcctgaagagactgtacctgcacgagaacaagctggacgtgttcagaaacgacaccttcctgggcctggagagcctggagtacctgcaggccgactacaacgtgatcaagagatag

SEQ ID NO: 183221 - protein, 898 aa, Artificial Sequence
  derived and/or modified sequence
MALIMEPVSKWSPSQVVDWMKGLDDCLQQYIKNFEREKISGDQLLRITHQELEDLGVSRIGHQELILEAVDLLCALNYGLETENLKTLSHKLNASAKNLQNFITGRRRSGHYDGRTSRKLPNDFLTSVVDLIGAAKSLLAWLDRSPFAAVTDYSVTRNNVIQLCLELTTIVQQDCTVYETENKILHVCKTLSGVCDHIISLSSDPLVSQSAHLEVIQLANIKPSEGLGMYIKSTYDGLHVITGTTENSPADRCKKIHAGDEVIQVNHQTVVGWQLKNLVNALREDPSGVILTLKKRPQSMLTSAPALLKNMRWKPLALQPLIPRSPTSSVATPSSTISTPTKRDSSALQDLYIPPPPAEPYIPRDEKGNLPCEDLRGHMVGKPVHKGSESPNSFLDQEYRKRFNIVEEDTVLYCYEYEKGRSSSQGRRESTPTYGKLRPISMPVEYNWVGDYEDPNKMKRDSRRENSLLRYMSNEKIAQEEYMFQRNSKKDTGKKSKKKGDKSNSPTHYSLLPSLQMDALRQDIMGTPVPETTLYHTFQQSSLQHKSKKKNKGPIAGKSKRRISCKDLGRGDCEGWLWKKKDAKSYFSQKWKKYWFVLKDASLYWYINEEDEKAEGFISLPEFKIDRASECRKKYAFKACHPKIKSFYFAAEHLDDMNRWLNRINMLTAGYAERERIKQEQDYWSESDKEEADTPSTPKQDSPPPPYDTYPRPPSMSCASPYVEAKHSRLSSTETSQSQSSHEEFRQEVTGSSAVSPIRKTASQRRSWQDLIETPLTSSGLHYLQTLPLEDSVFSDSAAISPEHRRQSTLPTQKCHLQDHYGPYPLAESERMQVLNGNGGKPRSFTLPRDSGFNHCCLNAPVSACDPQDDVQPPEVEEEEEEEEEEGEAAGENIGEKS

SEQ ID NO: 183222 - protein, 1034 aa, Artificial Sequence
  derived and/or modified sequence
MALIMEPVSKWSPSQVVDWMKGLDDCLQQYIKNFEREKISGDQLLRITHQELEDLGVSRIGHQELILEAVDLLCALNYGLETENLKTLSHKLNASAKNLQNFITGRRRSGHYDGRTSRKLPNDFLTSVVDLIGAAKSLLAWLDRSPFAAVTDYSVTRNNVIQLCLELTTIVQQDCTVYETENKILHVCKTLSGVCDHIISLSSDPLVSQSAHLEVIQLANIKPSEGLGMYIKSTYDGLHVITGTTENSPADRCKKIHAGDEVIQVNHQTVVGWQLKNLVNALREDPSGVILTLKKRPQSMLTSAPALLKNMRWKPLALQPLIPRSPTSSVATPSSTISTPTKRDSSALQDLYIPPPPAEPYIPRDEKGNLPCEDLRGHMVGKPVHKGSESPNSFLDQEYRKRFNIVEEDTVLYCYEYEKGRSSSQGRRESTPTYGKLRPISMPVEYNWVGDYEDPNKMKRDSRRENSLLRYMSNEKIAQEEYMFQRNSKKDTGKKSKKKGDKSNSPTHYSLLPSLQMDALRQDIMGTPVPETTLYHTFQQSSLQHKSKKKNKGPIAGKSKRRISCKDLGRGDCEGWLWKKKDAKSYFSQKWKKYWFVLKDASLYWYINEEDEKAEGFISLPEFKIDRASECRKKYAFKACHPKIKSFYFAAEHLDDMNRWLNRINMLTAGYAERERIKQEQDYWSESDKEEADTPSTPKQDSPPPPYDTYPRPPSMSCASPYVEAKHSRLSSTETSQSQSSHEEFRQEVTGSSAVSPIRKTASQRRSWQDLIETPLTSSGLHYLQTLPLEDSVFSDSAAISPEHRRQSTLPTQKCHLQDHYGPYPLAESERMQVLNGNGGKPRSFTLPRDSGFNHCCLNAPVSACDPQDDVQPPEVEEEEEEEEEEGEAAGENIGEKSESREEKLGDSLQDLYRALEQASLSPLGEHRISTKMEYKLSFIKRCNDPVMNEKLHRLRILKSTLKAREGEVAIIDKVLDNPDLTSKEFQQWKQMYLDLFLDICQNTTSNDPLSISSEVDVITSSLAHTHSYIETHV

SEQ ID NO: 183223 - DNA, 3105 bp, Artificial Sequence
  derived and/or modified sequence
atggccctgatcatggagcccgtgtccaaatggtctcctagtcaggtggtggactggatgaaaggcttagacgactgcctgcaacagtatataaagaactttgagagggaaaaaatcagcggcgaccagttactgcgaatcacccatcaggagcttgaggatctgggggtgtcccgcatcggtcaccaggagcttatccttgaagccgttgatctgctttgcgccttgaattacggcctggagaccgagaacttaaagactttgtcccataagcttaacgccagcgccaagaatctgcagaacttcataacgggcagacgacggagcggccactacgatggaagaacaagccgaaaattacccaatgattttctcacgtcggtggtagacttgatcggagcagcgaaatccctcctcgcctggttagaccgctcgccatttgcagctgtgaccgactattctgtcacgaggaataatgtgatacagctttgcctggaactgactactattgtgcagcaggattgcaccgtgtacgagaccgagaataagatcttacacgtctgcaaaacgcttagcggggtctgcgatcatattatctccctctcttccgacccattggtgtcacagagcgcccatctggaggtgattcagctggcaaatatcaagccctccgaagggctcggtatgtatataaagtctacatatgatggactacacgtcatcacaggcaccacagagaacagtcccgccgatagatgcaaaaagatacacgccggggacgaagtgatacaagtgaatcatcagacagtggtcggctggcagctgaagaatctcgtgaatgccctccgagaggatccatccggggtcatcctgacactgaaaaagcgcccacagagtatgctaacaagcgcccccgcgcttctcaaaaacatgagatggaagcctttggccttacagccgcttattccaaggagcccaacttccagcgtcgcaactccatcctctacgatcagcacgcctacaaaaagggattcatccgcgctgcaggacctgtacatccccccacctcccgccgagccgtatattccacgcgatgagaaagggaacctgccgtgtgaggatctgcgaggacacatggtgggcaaaccagtgcacaaaggaagcgaatcacctaacagtttcctggaccaggagtacagaaagagattcaatattgtggaggaagatacagtgctgtattgctacgagtatgagaaaggacgctcttcctcgcagggcaggcgcgaatcaactccaacatacgggaaactgagacccatttctatgccggtggagtacaattgggtaggcgattacgaggaccctaacaagatgaaacgcgactcgaggagagaaaacagccttctccggtacatgtcaaatgaaaagattgcacaggaagagtacatgtttcagaggaattctaagaaggacacaggcaaaaagtctaaaaagaagggcgataagagcaacagcccaacacattactcactcctgccatcattgcagatggacgcactgaggcaggatatcatgggcacccccgttcctgagacaaccttgtaccacaccttccagcaatcctctctacagcacaaaagcaagaagaaaaataagggaccgatagccggcaaaagcaaaagaaggatctcttgcaaagatcttggtagaggagattgcgaaggctggctctggaaaaagaaggacgctaagagctatttttctcagaagtggaaaaaatattggtttgtgttgaaagatgcgagtttgtactggtacataaacgaggaagatgagaaagccgagggtttcattagcttaccagagttcaaaattgacagagcatctgaatgtcgaaaaaagtacgcctttaaggcctgtcatccgaaaataaagtctttctatttcgcagccgaacacctcgacgatatgaatcgatggcttaataggatcaacatgctgaccgcagggtatgcagaaagagaacggatcaagcaagagcaagattactggtcggaatcagacaaggaagaagctgacactcctagtactccaaaacaagactctccaccccctccatacgatacttacccaaggcctccctccatgtcctgcgcatcgccctatgtagaggctaagcattctcgcctctcctctacagagacctcccaatcgcaaagtagccacgaggagttcagacaggaggtcacaggctcttccgcagtttctccaattcgtaaaactgcttcacagcgacggtcatggcaggacctgattgaaacccccttgacttcgagcgggctgcattatctgcagacactgccactagaggattcggttttttcagattcagctgcaatttcacccgaacaccgacgccagtctacactgcccacgcagaagtgtcatcttcaggaccactacggtccttaccctctggccgaatctgagcggatgcaggtgctgaatggaaacggcggaaagccccggagctttacccttcctcgggactccggctttaatcactgttgcctcaatgcaccagtgagcgcctgcgatcctcaggatgatgtgcagccacccgaggtggaggaagaggaggaagaagaagaagaggagggcgaagctgctggcgagaacatcggtgagaagtcagagtcgcgcgaggaaaaactgggcgactccctgcaggacctttatagagcactggagcaggccagcttgagtcccctgggagagcaccgtatttccacgaagatggagtacaagctgagcttcatcaagcgctgcaatgatccggtcatgaacgagaaactgcataggttgaggattctgaaatccactttgaaagctagagagggggaagtggctattatcgataaggtgctggacaaccctgatctcaccagcaaggagttccagcagtggaagcaaatgtatctcgacctgttcctggacatttgtcaaaacaccacatcgaacgacccactgagcatttcatcggaagtggacgtaatcacgagtagtctggctcacacccacagctatatcgagactcacgtgtag

SEQ ID NO: 183224 - DNA, 3105 bp, Artificial Sequence
  derived and/or modified sequence
atggccctgatcatggagcctgtgtccaagtggagccccagccaggtggtggactggatgaagggcctggatgactgcctgcagcagtacatcaagaactttgagcgggagaagatcagcggggaccagctgctgcgcatcacccaccaggagctggaggacctgggcgtgagccgcatcggccaccaggagctgatcctggaggccgtggacctgctgtgtgccctgaactacggcctggagacagagaacctgaagaccctgagccacaagctgaatgccagcgccaagaacctgcagaacttcatcaccggcagaagaagaagtggccactatgatggccgcaccagcaggaagctgcccaatgacttcctgacctctgtggtggacctgattggagctgccaagagcctgctggcctggctggacaggagcccctttgctgctgtgacagactacagcgtgaccagaaataatgtcatccagctgtgcctggagctgaccaccatcgtgcagcaggactgcaccgtgtatgaaacagagaacaagatcctgcacgtgtgcaagaccctgagcggcgtgtgtgaccacatcatcagcctgagcagtgaccccctggtgtcccagagcgcccacctggaggtgatccagctggccaacatcaagcccagcgagggcctgggcatgtacatcaagagcacctatgatggcctgcacgtgatcaccggcaccacagagaacagccctgctgaccgctgcaagaagatccacgccggagatgaggtgatccaggtgaaccaccagacagtggtgggctggcagctgaagaacctggtgaatgccctgcgggaggaccccagcggggtcatcctgaccctgaagaagaggccccagagcatgctgaccagcgccccagccctgctgaagaacatgcgctggaagcccctggccctgcagcccctcatccccaggagccccaccagctctgtggccacccccagcagcaccatcagcacccccaccaagagggacagcagcgccctgcaggacctgtacatccccccacctcctgctgagccctacatccccagagatgagaagggcaacctgccctgtgaggacctgcggggccacatggtgggcaagcctgtgcacaagggcagcgagagccccaacagcttcctggaccaggagtacaggaagcgcttcaacatcgtggaggaggacacagtgctgtactgctatgaatatgagaagggccgcagcagcagccagggcagaagagagagcacccccacctacggcaagctgcggcccatctccatgcctgtggagtacaactgggtgggggactatgaggaccccaacaagatgaagagggacagcagaagagagaacagcctgctgcgctacatgagcaatgagaagatcgcccaggaggagtacatgttccagaggaacagcaagaaggacaccgggaagaagagcaagaagaagggggacaagagcaacagccccacccactacagcctgctgcccagcctgcagatggatgccctgcggcaggacatcatgggcacccctgtgcctgagaccaccctgtaccacaccttccagcagagcagcctgcagcacaagagcaagaagaagaacaagggccccatcgccggcaagagcaagaggcgcatcagctgcaaggacctgggccgcggggactgtgagggctggctgtggaagaagaaggatgccaagagctacttcagccagaagtggaagaagtactggtttgtgctgaaggatgccagcctgtactggtacatcaatgaggaggatgagaaggccgagggcttcatcagcctgcctgagttcaagattgaccgggccagcgagtgcaggaagaagtatgccttcaaggcctgccaccccaagatcaagagcttctactttgctgctgagcacctggatgacatgaaccgctggctgaaccgcatcaacatgctgacagctggctacgccgagcgggagcgcatcaagcaggagcaggactactggagcgagagtgacaaggaggaggccgacacccccagcacccccaagcaggacagccccccaccaccctatgacacctaccccaggcctccttccatgagctgtgccagcccctacgtggaggccaagcacagccggctgagcagcacagagaccagccagagccagagcagccatgaggagttccggcaggaggtgacaggcagcagcgctgtgagccccatcaggaagacagccagccagaggaggtcctggcaggacctgattgagacccccctgaccagcagcggcctgcactacctgcagaccctgcccctggaggacagcgtcttcagtgacagcgctgccatcagccctgagcaccggcggcagagcaccctgcccacccagaagtgccacctgcaggaccactacggcccctaccccctggccgagagcgagaggatgcaggtgctgaatggaaatggaggcaagcccaggagcttcaccctgccccgggacagcggcttcaaccactgctgcctgaatgcccctgtgtctgcctgtgacccccaggatgatgtgcagcccccagaggtggaggaggaggaggaggaggaggaggaggagggggaggccgccggggagaacatcggggagaagtctgagagccgggaggagaagctgggggacagcctgcaggacctgtaccgggccctggagcaggccagcctgagccccctgggggagcaccgcatcagcaccaagatggagtacaagctgtccttcatcaagcgctgcaatgaccctgtgatgaatgagaagctgcaccggctgcgcatcctgaagagcaccctgaaggcccgggagggggaggtggccatcatcgacaaggtgctggacaacccagacctgaccagcaaggagttccagcagtggaagcagatgtacctggacctcttcctggacatctgccagaacaccaccagcaatgaccccctgagcatcagcagcgaggtggatgtgatcaccagcagcctggcccacacccacagctacatcgagacccacgtgtag

SEQ ID NO: 183225 - DNA, 3105 bp, Artificial Sequence
  derived and/or modified sequence
atggccctgatcatggagcccgtgagcaagtggagccccagccaggttgtggattggatgaagggactggatgattgtctacagcagtatattaaaaactttgagagagaaaagattagcggcgaccagctacttagaataacgcaccaggagctggaagacttgggagtttcccggattggccaccaggagctgattctcgaggctgttgacctgttatgtgcgctgaactacgggctcgagactgaaaacctgaagactctttcacataagcttaacgcgtctgcaaagaatctacagaattttatcacaggaagacgtcgttccggccactatgacggtaggacttcacgtaaattgccaaacgattttctcacctcagtcgtggatctgatcggcgctgccaaatctctgctggcatggttggatcgctctccctttgctgccgtgacggactactctgttactaggaacaacgtgatccagctctgcctcgagttaactacgatagtccagcaggattgcacagtttacgagaccgagaacaagatactgcacgtctgcaaaaccctgtcgggggtatgtgatcatatcatctccctatcttccgatccactcgtatcccagtccgctcatcttgaggtcatacaactggctaatattaaacctagcgaaggtctggggatgtacatcaagtctacatacgatggcttgcacgtgatcacgggcaccacagagaactctcccgctgataggtgtaagaaaatccacgctggcgacgaggtgattcaggtcaatcatcagacagtagtaggatggcagcttaagaatttggtcaatgctctacgagaagacccatctggggtgattctgacactgaaaaagcggccacaatctatgcttacatccgccccagcactgttaaagaatatgagatggaaaccgctggcccttcagcctttgattcctaggagtcctacaagctcggtggcaacacccagttctaccatatctacccccactaaacgggatagctctgctctgcaagatctgtacattcccccaccccctgccgagccatatattcctcgggacgagaagggaaacctgccgtgtgaggacctgcggggtcacatggttgggaagccggttcacaaaggctccgagtctcctaattcattcctggaccaggagtatcgtaaacgctttaacatcgtcgaggaagacactgttctgtactgctatgagtacgaaaaaggccggtcctctagccaaggcagaagggagtcaacgcccacatacggcaagctgcgccccattagtatgcccgtggagtataactgggttggagattatgaagatcctaacaaaatgaagagggatagtaggagagagaatagtctgctgcgctatatgtccaacgaaaaaattgcacaggaagagtatatgtttcaacgcaacagcaaaaaagatactggtaaaaagagcaagaaaaaaggtgataagtccaactccccaactcactacagcctgcttccctccctgcagatggacgcccttagacaggatattatgggcactcctgtgccagaaactaccctgtaccacactttccaacagagctcccttcagcataaatcaaaaaagaagaacaagggacccattgcaggtaaatccaagaggagaatatcctgtaaagacctggggcgcggggactgcgagggttggctgtggaagaagaaggatgcaaaatcctactttagtcaaaaatggaagaaatactggtttgtcctcaaggacgcaagcttatattggtacattaacgaagaggacgagaaagctgagggtttcatctccctgcccgagttcaagattgaccgagccagcgaatgtcgaaagaaatatgcttttaaggcttgccaccctaaaattaagagcttctatttcgccgccgagcacctggacgacatgaacagatggctcaaccgcatcaacatgcttacagcaggttacgccgagagagaacgaatcaagcaagaacaggattactggtccgaatccgacaaggaggaagcagacactccttcgacacctaaacaggactcacccccccctccgtacgacacttacccgcggcccccaagcatgtcgtgcgcttccccctacgtggaagcaaagcactctaggcttagctctacagagacatcacaatcccagtcaagccatgaggaattccggcaagaggtgacaggatcctctgcagtcagcccaattagaaaaaccgcatcacagcgacgatcatggcaagatttgattgaaacccctcttacatcaagtggactgcattacctgcaaactcttccactggaggatagtgtgtttagcgattccgcagctatctcaccagagcataggcggcagtctacactgccaactcagaaatgccacctacaggatcactacggtccctatccattggcagagtctgaacgtatgcaggttctcaatggtaacggtggcaaaccaagatccttcactttaccacgggatagcggtttcaaccactgttgtctaaacgcccctgtcagtgcctgcgacccgcaggatgatgtgcagccgcctgaagtggaggaagaggaagaagaagaggaagaagagggagaggccgccggtgagaatattggcgagaagtcggagtcccgggaggaaaagctgggggatagtttgcaagacctttaccgtgccctggaacaggcgagcttgtccccactgggtgagcaccggatatccacaaagatggagtataagcttagctttatcaagaggtgtaatgatccggtgatgaatgagaagttgcaccgactacgcattcttaagtctaccctgaaagcccgggaaggcgaagtggctattatcgacaaggtcctagacaatccagatcttacatcgaaggaatttcaacagtggaaacaaatgtacctggacctgttcttggatatctgtcagaacacaactagtaatgatcccctcagcatcagttccgaagtggatgtgatcacctcatcactcgctcatacgcactcctatatcgaaacacacgtgtag

SEQ ID NO: 183226 - DNA, 3105 bp, Artificial Sequence
  derived and/or modified sequence
atggcattgattatggagccagtgtctaagtggtctccatctcaggtggtggactggatgaaaggcctcgacgactgcctgcagcaatacatcaagaatttcgaacgggagaaaatctcaggcgatcagttgctcaggatcacacaccaggagttagaggatctgggcgtgagtagaatcggtcaccaggaactcattctggaggcagtggacctgctgtgtgcactaaactatggtctggagactgaaaatctcaagacactctcgcataaactaaacgcctccgcaaagaacctgcagaatttcatcaccggcagacggcgatctggccactatgatggtcggacatccagaaagctgcccaatgactttctgacttctgtcgtagatctgataggagcagccaaaagtttgctcgcatggctggatcggtctccatttgcagctgtcaccgactacagcgtgacgcgcaacaatgtcatacaactgtgtctggagctgacgacaattgtgcagcaggactgcacggtctatgaaacagaaaataagatcctgcacgtgtgcaagacactgagtggcgtgtgcgaccacattatctccctaagcagtgacccccttgtgagccagtctgcccatctggaggttatacagctggcaaacatcaagccatctgaaggcttaggcatgtacatcaagtctacctacgacggccttcatgtgatcacggggaccaccgaaaattctcccgcagaccgatgtaaaaaaatccatgccggagacgaagttatccaagtaaatcatcagaccgtggtgggttggcagctgaagaacctggtgaatgcactgcgagaagatcctagtggcgtaattttgaccctgaagaagcggcctcagtctatgcttacctccgctccagctttgctgaaaaacatgcgctggaagccacttgctctgcagccgctgatccctcgcagccctacatccagcgtggctaccccatccagtaccatatcaacaccgacaaaacgcgactcctctgctctccaggatctgtatatcccaccacctccagcagaaccatacatacccagagatgaaaaagggaatcttccatgtgaagatctgagaggccacatggtgggaaagcctgtgcataaggggagcgagtcaccaaacagctttttagaccaggaatataggaagagatttaacatagtagaagaggacaccgtgctgtattgctacgagtacgagaagggtaggtcttcgtcccagggtaggcgggagtctacacctacctatggcaaactgcgacctatcagtatgccagttgaatacaactgggtaggagactatgaagaccctaacaaaatgaagcgggactctcgcagggaaaactccctcctgcggtatatgtcaaacgagaagattgcgcaggaggaatacatgttccaaaggaactccaaaaaggacaccgggaagaagagcaaaaaaaagggagacaagtctaattctcccactcattactccctcttaccatcgctccaaatggatgcattgcgtcaggacattatggggactcccgtccctgaaaccacactgtaccacacatttcaacagtcttccctgcaacacaagagcaaaaagaagaataagggacctatcgctgggaaatctaagagacgcatcagctgtaaagacctcgggaggggcgactgcgaggggtggctttggaagaagaaagacgccaagagctacttttcacagaagtggaaaaaatactggttcgtactcaaggatgccagcctctattggtacatcaacgaggaagatgagaaggccgaaggatttattagcctccccgagttcaaaattgacagggctagcgagtgcaggaaaaagtatgcttttaaagcctgtcatcctaagataaagagcttctacttcgctgctgaacatctggacgatatgaatcggtggctaaaccggatcaacatgctgactgcaggttacgctgagcgggaacgtatcaagcaggagcaggactactggagtgagagcgacaaggaggaagctgacaccccttcaaccccaaaacaggactctcctccgccaccttatgacacctatccaaggccaccatcaatgtcttgcgcatccccttacgtagaggcaaaacactcccggttatctagcacagagacgtctcaatcccaatcttcccatgaggagttcagacaagaggtgaccgggagttccgccgtgagcccgattcgaaagaccgcatcccagcgcaggagttggcaggaccttatcgaaactccgttgacgagctccggcctgcattatctccagaccctgccactggaagattcagttttttcggattccgccgctatctcgccagaacacagacggcagagcactcttcctactcaaaaatgtcaccttcaagatcactacgggccatatccactggctgaatcagaacgtatgcaagtactcaacggaaacgggggaaagccacgaagttttaccttacctagggacagcggctttaaccactgctgtctgaatgcacctgtcagcgcttgcgaccctcaggacgacgtccagccgcctgaggtggaagaggaggaggaagaagaagaggaggagggggaggcggctggcgagaacatcggcgaaaagagtgagagccgcgaggagaaattgggcgatagtctgcaagacctctacagggccttggaacaggcatctcttagcccactgggcgaacatagaatcagcacgaagatggagtataaattatccttcattaagagatgcaatgacccagtgatgaacgaaaaactccatcgactccgcatcctgaaaagtacactgaaggcacgtgaaggcgaggttgcaatcattgacaaggttttggataaccccgatctgacatcaaaagagtttcaacaatggaagcagatgtacctcgatctgtttttggatatctgtcagaacacgacctccaacgatccattgagcattagcagtgaggttgatgtcatcactagcagtctggctcacacccatagttacattgagacacacgtctag

SEQ ID NO: 183227 - DNA, 5315 bp, Artificial Sequence
  derived and/or modified sequence
gagctctgcgctctgcacggaaccgaccccgtacccatggctctgataatggaaccggtgagcaaatggtctccgagtcaagtagtggactggatgaaaggtcttgatgactgtttgcagcagtatattaagaactttgagagggagaagatcagtggggaccagctgctgcgcattacacatcaggagctagaagatctgggggtcagccgcattggccatcaggaactgatcttggaagcagttgaccttctgtgtgcattgaattatggcttggaaacagaaaatctaaaaaccctttctcacaagttgaatgcatctgccaaaaatctgcagaattttataacaggaaggagaaggagtggccattatgatgggaggaccagccgaaaattgccaaacgactttctgacctcagttgtggatctgattggagcagccaagagtctgcttgcctggttggacaggtcaccatttgctgctgtgacagactattcagttacaagaaataatgtcatacaactctgcctggagttaacaacaattgtgcaacaggattgtactgtatatgaaacagagaataaaattcttcacgtgtgtaaaactctttctggagtctgtgaccacatcatatccctgtcgtcagatcctctggtttcacagtctgctcacctggaagtgattcaactggcaaacattaaaccaagcgaagggctgggtatgtatattaaatctacatatgatggcctccatgtaattactggaaccacagaaaattcacctgcagatcggtgcaagaaaatccatgctggcgatgaagtgattcaagttaatcatcagactgtggtggggtggcagttgaaaaatttggtgaatgcactacgagaggacccgagtggtgttatcttaactttgaaaaagcgacctcagagcatgcttacctcagcaccagctttactgaaaaatatgagatggaagccccttgctctgcagcctcttatacctagaagtcccacaagcagcgttgccacgccttccagcaccatcagtacacccaccaaaagagacagttctgccctccaggatctctacattccccctcctcctgcagaaccatatattcccagggatgaaaaaggaaaccttccttgtgaagacctcagaggacatatggtgggcaagccagtgcataagggatctgaatcaccaaattcatttctggatcaggaatatcgaaagagatttaatattgtcgaagaagatactgtcttatattgctatgaatatgaaaaaggaagatcaagtagtcaaggaagacgagaaagcaccccaacttatggcaagctacgacctatatctatgccagtggaatataattgggtgggggactatgaagatccaaataagatgaagagagatagtagaagagaaaactctctacttcggtatatgagcaatgaaaagattgctcaagaagaatacatgtttcagagaaacagcaaaaaggacacagggaagaagtcaaaaaagaagggtgataagagtaatagcccaactcactattcattgctacctagtttacaaatggatgcactgagacaagacatcatgggcactcctgtgccagagaccacactataccatacatttcagcagtcctcactgcagcacaaatcaaagaagaaaaacaaaggtcctatagcaggcaagagcaaaagacgaatttcttgcaaagatcttggccgtggtgactgtgagggctggctttggaaaaagaaagatgcgaagagttacttttcacagaaatggaaaaaatattggtttgtcctaaaggatgcatccctttattggtatattaatgaggaggatgaaaaagcagaaggattcattagcctgcctgaatttaaaattgatagagccagtgaatgccgcaaaaaatatgcattcaaagcctgtcatcctaaaatcaaaagcttttattttgctgctgaacatcttgatgatatgaacaggtggcttaacagaattaatatgctgactgcaggatatgcagaaagagagaggattaagcaggaacaagattactggagtgagagtgacaaggaagaagcagatactccatcaacaccaaaacaagatagccctccacccccatatgatacatacccacgacctccctcgatgagttgcgccagtccttatgtggaagcaaaacatagccgactttcctccacggagacttctcagtctcagtcttctcatgaggagtttcgccaggaagtaactgggagcagtgcagtgtctcccattcgcaagacagccagtcagcgccgctcctggcaggatttaattgagacgccactgacaagttcaggcttacactatcttcagactctgcccctggaggattctgtcttctctgactccgcggccatctccccagagcacaggcggcagtctaccctgccaactcagaaatgccacctgcaggatcactatgggccataccccttagctgagagtgagaggatgcaagtgctaaatggaaatgggggcaagcctcgaagttttactctgcctcgagatagcgggttcaaccattgctgtctgaatgctccagttagtgcctgtgacccacaggatgacgtgcaacccccagaggtggaggaagaggaggaggaggaggaggaggaaggggaggcagcaggggaaaacataggagaaaaaagtgaaagcagagaagaaaagttaggagactcattgcaagatttatacagggcactggagcaggccagtctgtcaccactaggagaacatcgtatttcaaccaagatggaatacaagctatcatttataaaaagatgtaatgatcctgtaatgaatgaaaaactacaccggctgagaattctcaaaagcactttaaaggccagagaaggggaagtagccattatcgataaagtcctagacaatccagacttgacatctaaagaattccaacaatggaagcagatgtacctcgaccttttcttggatatctgtcaaaataccacctcaaatgacccactgagtatttcttctgaagtagatgtaatcacttcctctctagcacacactcattcatacattgaaacgcatgtctaaatgtattctgccttcagaccatctagtacctgctggtactctgaacaagtatataaggtagtttttatatcaatgtgtggaacacttgacaagctatactttaatgttaccaaactatatgaaacaaaccatatatggtcacaataccactatctttaatgagcatttgtatattttatatgcaacagtgctcagcttatgtttaccatgtgcaaaatcaactgtctttaatgacttaaaattaacttttgcaaacaattctaaatacaggtggtcttcaagtagtaaaaccacaaaaggcagttttctatctatggtcatcttttctccctttaagttaattttatataaacaagacttcaaaagtaaatcacattttttcaggtgcagacatccttgtgggtgggaaagaatttaaaccttttttatatttattaaaatgttctaagaattttcttaaacattgcacaaagtttaatgctgtagttttatttttgtgaaatgtagatgcgcatacaagagctaagcaaaatagaagagcatcgacataagaaaagttcaggtatctaatattcgtcttaatagtctattaacttgtgaaagctaagttaatggaaatattattccaaatctatgagaacacttggtgtatcagggcaaagctttgtaagatgtttttgtaactaagaccaaaattgaagatagagctgctttattttcttggtttaaatcttcctttatttttgtagtgatgagatgctgattgtgtacagaagaatttgagaggggatttttaaaaactgacttaacacacccagaaaggcagctaacagctatatatatatataaatttcagcccaaactcatgtttttaaactccaactcttaaaagacaacaaggtataaactgaaatgaatcaactttccacttagtttccaattttcccctagtccactaattaaacttaggtaattatacttcaggtagggaagtacaatatgtttagtttcaggctgatgtgtgttataaaaaacaacactgaaaaataaaaatgtacttcccttctaaggagcaagcaggtgatggtcattcaaagagatgtcacattgaattatgagagaaacaatttagaggtttttttcctggcttcatgaattgttctatagagtggatgaagtctaaggaaaagtcctcttcatatatttccatttataagcgtcttgtttttgaaagtgatcacagcatgaaaatgactgtgctgctttttagtgtctggctgcataatgtacaagtcacaatttgctgtttttttcaggaggagaaagggaacctcctttactattctatatcctaaaatctacttctaatcagctttatactgttgcctgtacagctcagtgaatgtactttcatctttaagagttcagatatatgccagtgaatatttttgctgtagaggagaaagtaaaaactccacagcggggatctttttctttgcttttgaaaccaccattgaatcactatcgttttgcagactttgcacaactgtacaggagagtggcctttctacagcacattttcagtaatcctatatttagtcaaaatggatgagaaatcatgtattaatgtttgtatggaattttgggtccagtgtaatatttttatcatttaaaaagaactctatttgtaaaaacatttatttactgcatggatattgacgcacattaaatttgtgggattttgtatatgtaaaaaaaaaaaaaaaaaaaaaacaaaaaacctcttgtcctaaaatgaagtgtgcttgttaacaggtgtttagacttattgatgtttactagaccaaatgtgtatgttcacttaaaaatatatgtacctgatggatgtgtcatgtttacagtggccaggttgtggcctgtaaacagcaagcagttgacgggaagactagctctgttgctactaagcagcttttacttttgtaaagtcagctctgttgttttaaatggtaaaaattaaactaatgaatttgacaagactcgtggctagcctagcatgaaagagaccttttaacactatataatatctgtacattttattgcattcgtttcaaatctaggagagaggcagcactgtaaactgaagtcaaataaattcagctcttaatgaatcctta

SEQ ID NO: 183228 - DNA, 3105 bp, Artificial Sequence
  derived and/or modified sequence
atggccctgatcatggagcccgtgagcaagtggagccccagccaggtggtggactggatgaagggcctggacgactgcctgcagcagtacatcaagaacttcgagagagagaagatcagcggcgaccagctgctgagaatcacccaccaggagctggaggacctgggcgtgagcagaatcggccaccaggagctgatcctggaggccgtggacctgctgtgcgccctgaactacggcctggagaccgagaacctgaagaccctgagccacaagctgaacgccagcgccaagaacctgcagaacttcatcaccggcagaagaagaagcggccactacgacggcagaaccagcagaaagctgcccaacgacttcctgaccagcgtggtggacctgatcggcgccgccaagagcctgctggcctggctggacagaagccccttcgccgccgtgaccgactacagcgtgaccagaaacaacgtgatccagctgtgcctggagctgaccaccatcgtgcagcaggactgcaccgtgtacgagaccgagaacaagatcctgcacgtgtgcaagaccctgagcggcgtgtgcgaccacatcatcagcctgagcagcgaccccctggtgagccagagcgcccacctggaggtgatccagctggccaacatcaagcccagcgagggcctgggcatgtacatcaagagcacctacgacggcctgcacgtgatcaccggcaccaccgagaacagccccgccgacagatgcaagaagatccacgccggcgacgaggtgatccaggtgaaccaccagaccgtggtgggctggcagctgaagaacctggtgaacgccctgagagaggaccccagcggcgtgatcctgaccctgaagaagagaccccagagcatgctgaccagcgcccccgccctgctgaagaacatgagatggaagcccctggccctgcagcccctgatccccagaagccccaccagcagcgtggccacccccagcagcaccatcagcacccccaccaagagagacagcagcgccctgcaggacctgtacatcccccccccccccgccgagccctacatccccagagacgagaagggcaacctgccctgcgaggacctgagaggccacatggtgggcaagcccgtgcacaagggcagcgagagccccaacagcttcctggaccaggagtacagaaagagattcaacatcgtggaggaggacaccgtgctgtactgctacgagtacgagaagggcagaagcagcagccagggcagaagagagagcacccccacctacggcaagctgagacccatcagcatgcccgtggagtacaactgggtgggcgactacgaggaccccaacaagatgaagagagacagcagaagagagaacagcctgctgagatacatgagcaacgagaagatcgcccaggaggagtacatgttccagagaaacagcaagaaggacaccggcaagaagagcaagaagaagggcgacaagagcaacagccccacccactacagcctgctgcccagcctgcagatggacgccctgagacaggacatcatgggcacccccgtgcccgagaccaccctgtaccacaccttccagcagagcagcctgcagcacaagagcaagaagaagaacaagggccccatcgccggcaagagcaagagaagaatcagctgcaaggacctgggcagaggcgactgcgagggctggctgtggaagaagaaggacgccaagagctacttcagccagaagtggaagaagtactggttcgtgctgaaggacgccagcctgtactggtacatcaacgaggaggacgagaaggccgagggcttcatcagcctgcccgagttcaagatcgacagagccagcgagtgcagaaagaagtacgccttcaaggcctgccaccccaagatcaagagcttctacttcgccgccgagcacctggacgacatgaacagatggctgaacagaatcaacatgctgaccgccggctacgccgagagagagagaatcaagcaggagcaggactactggagcgagagcgacaaggaggaggccgacacccccagcacccccaagcaggacagccccccccccccctacgacacctaccccagaccccccagcatgagctgcgccagcccctacgtggaggccaagcacagcagactgagcagcaccgagaccagccagagccagagcagccacgaggagttcagacaggaggtgaccggcagcagcgccgtgagccccatcagaaagaccgccagccagagaagaagctggcaggacctgatcgagacccccctgaccagcagcggcctgcactacctgcagaccctgcccctggaggacagcgtgttcagcgacagcgccgccatcagccccgagcacagaagacagagcaccctgcccacccagaagtgccacctgcaggaccactacggcccctaccccctggccgagagcgagagaatgcaggtgctgaacggcaacggcggcaagcccagaagcttcaccctgcccagagacagcggcttcaaccactgctgcctgaacgcccccgtgagcgcctgcgacccccaggacgacgtgcagccccccgaggtggaggaggaggaggaggaggaggaggaggagggcgaggccgccggcgagaacatcggcgagaagagcgagagcagagaggagaagctgggcgacagcctgcaggacctgtacagagccctggagcaggccagcctgagccccctgggcgagcacagaatcagcaccaagatggagtacaagctgagcttcatcaagagatgcaacgaccccgtgatgaacgagaagctgcacagactgagaatcctgaagagcaccctgaaggccagagagggcgaggtggccatcatcgacaaggtgctggacaaccccgacctgaccagcaaggagttccagcagtggaagcagatgtacctggacctgttcctggacatctgccagaacaccaccagcaacgaccccctgagcatcagcagcgaggtggacgtgatcaccagcagcctggcccacacccacagctacatcgagacccacgtgtag

SEQ ID NO: 183229 - protein, 710 aa, Artificial Sequence
  derived and/or modified sequence
MLTTLKPFGSVSVESKMNNKAGSFFWNLRQFSTLVSTSRTMRLCCLGLCKPKIVHSNWNILNNFHNRMQSTDIIRYLFQDAFIFKSDVGFQTKGISTLTALRIERLLYAKRLFFDSKQSLVPVDKSDDELKKVNLNHEVSNEDVLTKETKPNRISSRKLSEECNSLSDVLDAFSKAPTFPSSNYFTAMWTIAKRLSDDQKRFEKRLMFSHPAFNQLCEHMMREAKIMQYKYLLFSLHAIVKLGIPQNTILVQTLLRVTQERINECDEICLSVLSTVLEAMEPCKNVHVLRTGFRILVDQQVWKIEDVFTLQVVMKCIGKDAPIALKRKLEMKALRELDRFSVLNSQHMFEVLAAMNHRSLILLDECSKVVLDNIHGCPLRIMINILQSCKDLQYHNLDLFKGLADYVAATFDIWKFRKVLFILILFENLGFRPVGLMDLFMKRIVEDPESLNMKNILSILHTYSSLNHVYKCQNKEQFVEVMASALTGYLHTISSENLLDAVYSFCLMNYFPLAPFNQLLQKDIISELLTSDDMKNAYKLHTLDTCLKLDDTVYLRDIALSLPQLPRELPSSHTNAKVAEVLSSLLGGEGHFSKDVHLPHNYHIDFEIRMDTNRNQVLPLSDVDTTSATDIQRVAVLCVSRSAYCLGSSHPRGFLAMKMRHLNAMGFHVILVNNWEMDKLEMEDAVTFLKTKIYSVEALPVAAVNVQSTQ

SEQ ID NO: 183230 - protein, 124 aa, Artificial Sequence
  derived and/or modified sequence
MLTTLKPFGSVSVESKMNNKAGSFFWNLRQFSTLVSTSRTMRLCCLGLCKPKIVHSNWNILNNFHNRMQSTDIIRYLFQDAFIFKSDVGFQTKGISTLTALRIERLLYAKRLFFDSKQSLVPVD

SEQ ID NO: 183231 - DNA, 3188 bp, Artificial Sequence
  derived and/or modified sequence
aaagtctggcgcccagcagaggttaggtgtttaaagttaggacctgaatgggttacgttgcgatacacgatcaaacatcgcccttataagctctgtggtatccccgagccccactcctgtatgcagggaaattagtcattctccttggtaaactttcttcaagtaagtccttcagctacagccgcgaacatatgctttttgacctttgagggaatccgtaagatctcgtgagaagcgcagcttctcggggaagctgtcatggctgctcctgtacgtagtcacggtcttgtgctctaaggaaaacgacagcacgtgttctttttcactagtagaagtgacgttggtttcatgttgacaactttgaagccatttggaagtgtttcagtggagagcaaaatgaataacaaagcgggctcctttttctggaaccttagacaattcagtacattagtttcaacaagcagaactatgaggctatgttgtttgggactttgcaaaccaaaaatagttcattcaaactggaacattttaaataactttcataacagaatgcaatcaactgatatcattagatatctctttcaggatgcattcatttttaaatcagatgttggctttcaaacaaagggcataagcactctaacagcccttagaattgaaagactactttatgctaaaagactgttttttgactcaaagcagtctcttgtccctgttgataaatctgatgatgaattgaagaaagtaaaccttaatcatgaagtctccaatgaagatgttcttaccaaggaaacaaaaccaaaccgtatcagcagtagaaaactgtctgaggaatgtaattccctgagtgatgtgttagatgcattttcaaaagcgcccacatttcctagtagcaactatttcacagcaatgtggacaattgccaaaagactgtctgatgaccagaagcgctttgaaaaacgactgatgtttagccaccctgcatttaatcagctctgtgaacatatgatgagagaagccaagatcatgcagtataagtacctactgttcagtcttcacgccatagtgaagcttggaatccctcagaacactattttggtgcagactttgctgagggtgacccaggaacgtatcaatgagtgtgatgagatatgcctttcagttttgtcaactgttttagaggcaatggaaccatgcaagaatgttcatgttctacgaacgggattcagaatactagttgatcagcaagtttggaaaatagaagatgtcttcacattacaagttgtgatgaagtgtattggaaaagatgcaccgattgctcttaagaggaaactggagatgaaagccttgagggaattagacagattttctgttttgaatagccaacacatgtttgaagtactagctgccatgaatcaccgatctcttatactcctggatgaatgcagtaaggtggtcctagataatatccatgggtgtcctttaagaataatgatcaacatattgcagtcctgcaaagacctccagtaccataatttggatctcttcaagggacttgcagattatgtggctgcaactttcgacatctggaagttcagaaaagttctttttatcctcattttatttgaaaaccttggctttcgacctgttggtttaatggacctgtttatgaagagaatagtagaggatcctgaatccctaaacatgaaaaacattctatctattcttcatacttactcttctctcaatcatgtctacaaatgccagaacaaagaacagttcgtggaagttatggctagtgctctgactggttatcttcacactatttcttctgaaaacttattggatgcagtatattcattttgcttgatgaattactttcccctggctccttttaatcagcttctgcaaaaagacatcatcagtgagctgctgacatcagatgacatgaagaatgcttacaagctgcatactttggatacttgtctaaaacttgatgatactgtctatctgagggacatagccttgtcactcccacagctgccgcgggagctgccatcgtcacatacaaatgcaaaggtggcagaggtgctgagcagccttctgggaggtgaaggacacttctcaaaggatgtgcacttgccacacaattatcatattgattttgaaatcagaatggacactaacaggaatcaagtgctaccactttctgatgtggatacaacttctgctacagatattcaaagagtagctgtgctatgtgtttccagatctgcttattgtttgggttcaagccaccccagaggattccttgctatgaaaatgcggcatttgaatgcaatgggttttcatgtgatcttggtcaataactgggagatggacaaactagagatggaagatgcagtcacatttttgaagactaaaatctattcagtagaagctcttcctgttgctgctgtaaatgtgcaaagcacacaataaagtgaaaatcaaccttttcatattaggagacatgcatttgtaaaaattaataaagatgacaagtcagttgtcaatggaattgagctatctgctaagacaaaaaatgttacctcagttcactattaaaattaattttaggagtggaagaaatgttgttactgccatttaaaaatatgctgagaaaattccagaagggttatttttccaaccacacctattccctctagtgcccagatatttgatttgtgagctgtacgtttcaccttttcatctttgatctactaaaaactggtttcttagttgtgaggtgtcacaggcaggttgatgtgggtagtagtccttgtctttggaatctgaatatttatactcctgctctaagctgttctaagacttggggttatgcctttaaatcattttcaagcattggccaaataataattggacaaagttctaaagttgtcaagtgtgtaagaattagtgaggtagctgttgaaaatgagtgaggatggtatttgtatttgtaataagcactgcaggtagagatatttcatgggttataataagagaaacacagatgagatgtagatggtaaggagtcttactgttgttggggtccttcctttctctttcttttttcccccttacccctcccacaatttcatgaagtcttttaaattaaatatatagctgaattgtgttgtgaatca

SEQ ID NO: 183232 - DNA, 2586 bp, Artificial Sequence
  derived and/or modified sequence
catcgcccttataagctctgtggtatccccgagccccactcctgtatgcagggaaattagtcattctccttggtaaactttcttcaagtaagtccttcagctacagccgcgaacatatgctttttgacctttgagggaatccgtaagatctcgtgagaagcgcagcttctcggggaagctgtcatggctgctcctgtacgtagtcacggtcttgtgctctaaggtgagtggaggacgagcttgggcttagcggcagcccgtatcacatcctagactttttacttcgaggagaagagtctcacgagttgtcctggaagaaaacgacagcacgtgttctttttcactagtagaagtgacgttggtttcatgttgacaactttgaagccatttggaagtgtttcagtggagagcaaaatgaataacaaagcgggctcctttttctggaaccttagacaattcagtacattagtttcaacaagcagaactatgaggctatgttgtttgggactttgcaaaccaaaaatagttcattcaaactggaacattttaaataactttcataacagaatgcaatcaactgatatcattagatatctctttcaggatgcattcatttttaaatcagatgttggctttcaaacaaagggcataagcactctaacagcccttagaattgaaagactactttatgctaaaagactgttttttgactcaaagcagtctcttgtccctgttgataaatctgatgatgaattgaagaaagtaaaccttaatcatgaagtctccaatgaagatgttcttaccaaggaaacaaaaccaaaccgtatcagcagtagaaaactgtctgaggaatgtaattccctgagtgatgtgttagatgcattttcaaaagcgcccacatttcctagtagcaactatttcacagcaatgtggacaattgccaaaagactgtctgatgaccagaagcgctttgaaaaacgactgatgtttagccaccctgcatttaatcagctctgtgaacatatgatgagagaagccaagatcatgcagtataagtacctactgttcagtcttcacgccatagtgaagcttggaatccctcagaacactattttggtgcagactttgctgagggtgacccaggaacgtatcaatgagtgtgatgagatatgcctttcagttttgtcaactgttttagaggcaatggaaccatgcaagaatgttcatgttctacgaacgggattcagaatactagttgatcagcaagtttggaaaatagaagatgtcttcacattacaagttgtgatgaagtgtattggaaaagatgcaccgattgctcttaagaggaaactggagatgaaagccttgagggaattagacagattttctgttttgaatagccaacacatgtttgaagtactagctgccatgaatcaccgatctcttatactcctggatgaatgcagtaaggtggtcctagataatatccatgggtgtcctttaagaataatgatcaacatattgcagtcctgcaaagacctccagtaccataatttggatctcttcaagggacttgcagattatgtggctgcaactttcgacatctggaagttcagaaaagttctttttatcctcattttatttgaaaaccttggctttcgacctgttggtttaatggacctgtttatgaagagaatagtagaggatcctgaatccctaaacatgaaaaacattctatctattcttcatacttactcttctctcaatcatgtctacaaatgccagaacaaagaacagttcgtggaagttatggctagtgctctgactggttatcttcacactatttcttctgaaaacttattggatgcagtatattcattttgcttgatgaattactttcccctggctccttttaatcagcttctgcaaaaagacatcatcagtgagctgctgacatcagatgacatgaagaatgcttacaagctgcatactttggatacttgtctaaaacttgatgatactgtctatctgagggacatagccttgtcactcccacagctgccgcgggagctgccatcgtcacatacaaatgcaaaggtggcagaggtgctgagcagccttctgggaggtgaaggacacttctcaaaggatgtgcacttgccacacaattatcatattgattttgaaatcagaatggacactaacaggaatcaagtgctaccactttctgatgtggatacaacttctgctacagatattcaaagagtagctgtgctatgtgtttccagatctgcttattgtttgggttcaagccaccccagaggattccttgctatgaaaatgcggcatttgaatgcaatgggttttcatgtgatcttggtcaataactgggagatggacaaactagagatggaagatgcagtcacatttttgaagactaaaatctattcagtagaagctcttcctgttgctgctgtaaatgtgcaaagcacacaataaagtgaaaatcaaccttttcatattaggagacatgcatttgtaaaaattaataaagatgacaagtcagttgtcaatggaattgagcta

SEQ ID NO: 183233 - DNA, 2344 bp, Artificial Sequence
  derived and/or modified sequence
gaagctgtcatggctgctcctgtacgtagtcacggtcttgtgctctaaggtgagtggaggacgagcttgggcttagcggcagcccgtatcacatcctagactttttacttcgaggagaagagtctcacgagttgtcctggaagtaagtttaaaggaggaaaacgacagcacgtgttctttttcactagtagaagtgacgttggtttcatgttgacaactttgaagccatttggaagtgtttcagtggagagcaaaatgaataacaaagcgggctcctttttctggaaccttagacaattcagtacattagtttcaacaagcagaactatgaggctatgttgtttgggactttgcaaaccaaaaatagttcattcaaactggaacattttaaataactttcataacagaatgcaatcaactgatatcattagatatctctttcaggatgcattcatttttaaatcagatgttggctttcaaacaaagggcataagcactctaacagcccttagaattgaaagactactttatgctaaaagactgttttttgactcaaagcagtctcttgtccctgttgataaatctgatgatgaattgaagaaagtaaaccttaatcatgaagtctccaatgaagatgttcttaccaaggaaacaaaaccaaaccgtatcagcagtagaaaactgtctgaggaatgtaattccctgagtgatgtgttagatgcattttcaaaagcgcccacatttcctagtagcaactatttcacagcaatgtggacaattgccaaaagactgtctgatgaccagaagcgctttgaaaaacgactgatgtttagccaccctgcatttaatcagctctgtgaacatatgatgagagaagccaagatcatgcagtataagtacctactgttcagtcttcacgccatagtgaagcttggaatccctcagaacactattttggtgcagactttgctgagggtgacccaggaacgtatcaatgagtgtgatgagatatgcctttcagttttgtcaactgttttagaggcaatggaaccatgcaagaatgttcatgttctacgaacgggattcagaatactagttgatcagcaagtttggaaaatagaagatgtcttcacattacaagttgtgatgaagtgtattggaaaagatgcaccgattgctcttaagaggaaactggagatgaaagccttgagggaattagacagattttctgttttgaatagccaacacatgtttgaagtactagctgccatgaatcaccgatctcttatactcctggatgaatgcagtaaggtggtcctagataatatccatgggtgtcctttaagaataatgatcaacatattgcagtcctgcaaagacctccagtaccataatttggatctcttcaagggacttgcagattatgtggctgcaactttcgacatctggaagttcagaaaagttctttttatcctcattttatttgaaaaccttggctttcgacctgttggtttaatggacctgtttatgaagagaatagtagaggatcctgaatccctaaacatgaaaaacattctatctattcttcatacttactcttctctcaatcatgtctacaaatgccagaacaaagaacagttcgtggaagttatggctagtgctctgactggttatcttcacactatttcttctgaaaacttattggatgcagtatattcattttgcttgatgaattactttcccctggctccttttaatcagcttctgcaaaaagacatcatcagtgagctgctgacatcagatgacatgaagaatgcttacaagctgcatactttggatacttgtctaaaacttgatgatactgtctatctgagggacatagccttgtcactcccacagctgccgcgggagctgccatcgtcacatacaaatgcaaaggtggcagaggtgctgagcagccttctgggaggtgaaggacacttctcaaaggatgtgcacttgccacacaattatcatattgattttgaaatcagaatggacactaacaggaatcaagtgctaccactttctgatgtggatacaacttctgctacagatattcaaagagtagctgtgctatgtgtttccagatctgcttattgtttgggttcaagccaccccagaggattccttgctatgaaaatgcggcatttgaatgcaatgggttttcatgtgatcttggtcaataactgggagatggacaaactagagatggaagatgcagtcacatttttgaagactaaaatctattcagtagaagctcttcctgttgctgctgtaaatgtgcaaagcacacaataaagtg

SEQ ID NO: 183234 - DNA, 576 bp, Artificial Sequence
  derived and/or modified sequence
gcgcccagcagaggttaggtgtttaaagttaggacctgaatgggttacgttgcgatacacgatcaaacatcgcccttataagctctgtggtatccccgagccccactcctgtatgcagggaaattagtcattctccttggtaaactttcttcaagaaaacgacagcacgtgttctttttcactagtagaagtgacgttggtttcatgttgacaactttgaagccatttggaagtgtttcagtggagagcaaaatgaataacaaagcgggctcctttttctggaaccttagacaattcagtacattagtttcaacaagcagaactatgaggctatgttgtttgggactttgcaaaccaaaaatagttcattcaaactggaacattttaaataactttcataacagaatgcaatcaactgatatcattagatatctctttcaggatgcattcatttttaaatcagatgttggctttcaaacaaagggcataagcactctaacagcccttagaattgaaagactactttatgctaaaagactgttttttgactcaaagcagtctcttgtccctgttgat

SEQ ID NO: 183235 - DNA, 2133 bp, Artificial Sequence
  derived and/or modified sequence
atgcttacaactctaaagccctttgggagcgtctcagtcgaaagcaaaatgaacaacaaggccggctccttcttctggaatttacgccaattttctaccttggtttcaactagcaggaccatgcgactgtgctgcctgggcctgtgcaagcctaaaatcgtacactcaaactggaatatattgaacaactttcacaaccgtatgcagtccaccgatatcattcgctatctttttcaagacgcatttattttcaaatccgacgtcggatttcagactaaagggatctccacacttacagctctgaggatagagcgccttctctacgccaaacgcctgtttttcgacagtaagcagagcctggtgcccgtggataagtctgacgatgaactcaaaaaggtgaacctgaatcacgaggtcagtaacgaggacgtcctaaccaaagaaacgaaaccgaaccgcattagctctagaaagctgagtgaagagtgcaattcccttagtgacgtcctcgacgcgttttcaaaagctccaaccttcccgagcagcaactattttacagctatgtggacaattgccaaacgcttgtcagacgatcagaagagatttgaaaagaggcttatgttctctcatcctgcattcaatcagctttgtgaacacatgatgcgggaggccaagattatgcagtacaagtacctgctatttagtctgcacgccatcgtgaagctcggcatcccccagaacacaatcctagtgcagaccctcttgagagtgacccaggagagaattaacgagtgtgatgaaatatgcctgtccgtgctgagtacagtattagaggcgatggagccttgcaagaatgtccatgtcctgcgtacagggttccgcatactcgtcgaccagcaggtgtggaaaattgaggatgtgtttaccctgcaggtggtgatgaaatgcattgggaaagacgcccccatcgcattaaagaggaagctggagatgaaagctctcagggagctggaccggtttagcgtgctgaatagtcagcacatgtttgaagttcttgccgccatgaatcatcgctctctcatcttgttggacgaatgttcaaaagttgtcttggataacatccatggatgtcccctccgcatcatgattaacatattacagtcttgcaaggatttgcagtaccacaacttggacttgttcaagggcctggctgattatgtggccgccacattcgacatttggaagttcaggaaggttctgttcattctgatattattcgagaatttgggattccgccccgtaggccttatggacctgttcatgaagcgcatcgtggaggaccccgagtcccttaatatgaagaatattttatccattctgcacacttattctagcctgaatcatgtgtacaagtgtcagaacaaagaacagttcgtagaagttatggcttcagctctcactggataccttcatactatctcatcagaaaatctgctcgacgccgtgtatagcttctgcctcatgaactattttcccctggccccctttaaccagttgttgcagaaggacatcatctccgaactcctcactagcgatgacatgaaaaatgcctataaactacacacgcttgatacttgcctaaaactggacgacactgtatatctgagggatatcgctctgagcctcccccagcttccacgggaactgccttcaagccacacaaatgccaaggtggcagaagtgctgtcgtcactgcttggcggagaagggcactttagtaaagacgtgcacctcccccataattatcacattgactttgaaataaggatggacactaaccgaaaccaagtactgcctctgtcggacgtggacacgacaagcgccaccgatatccagcgggtggccgtgctatgtgtctcccggtcagcttactgtcttgggtccagccacccacgcggatttcttgccatgaaaatgcgacacttgaacgccatgggcttccacgtcattttggtgaacaactgggaaatggacaaactcgaaatggaggacgcggtgaccttcctgaagaccaagatctacagcgtggaagctttacccgttgcggccgtcaatgtccagtctacccaatag

SEQ ID NO: 183236 - DNA, 2133 bp, Artificial Sequence
  derived and/or modified sequence
atgttaacgacacttaaacctttcggaagcgtgtccgttgaatctaaaatgaataacaaggccggctcatttttctggaatttacgacagttcagcacgctcgtgagtacaagtagaactatgaggctatgttgcctagggctgtgtaagcccaagattgtgcattcaaattggaatatcctgaacaatttccacaatagaatgcaaagtaccgatattattaggtacctctttcaggatgcgttcatttttaagtccgacgttggcttccaaaccaaagggattagcacactcactgcactgcggatcgaacgtcttctgtacgcaaagaggttgtttttcgacagcaagcagtcactggtgcccgttgacaaaagcgacgatgagctcaagaaagttaacctgaatcacgaggtctcaaatgaagatgtgttaacgaaggaaacaaagcccaaccgcatcagctctagaaagcttagcgaagaatgcaattctctgagcgatgtgcttgacgctttttctaaggctcctacattcccatctagcaattactttacggccatgtggacgattgccaagagactgtccgatgaccaaaaaagattcgaaaaacgtcttatgtttagtcaccctgcattcaatcagctttgtgaacatatgatgagagaagctaagattatgcagtacaagtatctgctgttttccctccatgccatcgtcaaactgggtattccccagaacacaatactagtgcagactttgttgagggtaacacaggaacgcataaacgagtgcgacgaaatttgcctaagcgtgctaagcactgtgctggaagccatggagccctgtaaaaatgtgcacgtgctgaggacagggtttagaatccttgtcgatcagcaagtgtggaaaatcgaggacgtgttcaccctgcaggtggtaatgaaatgtattggcaaggatgcaccaatcgcactcaagcgaaaattagagatgaaagccttgagggagttggaccgcttctccgtgctgaactctcaacacatgtttgaagtgctagcagctatgaatcacaggtctctgatcttgctcgatgaatgcagtaaggtcgtgttggacaatatccacgggtgtcctctccggattatgattaacatccttcagagctgtaaggacttgcagtatcataacctggacctgttcaaaggcctcgctgattatgtcgcagccacatttgacatatggaagttccgaaaggttcttttcattctgatcctgttcgaaaacctggggtttcgtcccgtgggccttatggatctgttcatgaagaggatagtagaggatccagagtcgttgaatatgaagaacattctatcaattctccatacatactccagcctgaatcacgtgtataaatgccagaacaaggagcagttcgtcgaagttatggcatccgcgctcaccggctatctgcacacaatctcctcagagaacctactagacgctgtatattctttctgcttaatgaattatttcccgcttgcccctttcaaccaactgttgcagaaagatatcataagcgagctcctgacatccgacgacatgaaaaacgcctacaaactgcatactctcgacacctgcctcaaactcgatgatacagtgtacttaagagatatagcactgtcactcccacagctgccaagggaactcccatcttctcatacgaacgctaaagttgcggaggtgctttcgagtctgttgggcggggagggacatttctctaaagatgtgcacttacctcacaactaccatatcgattttgagattcgcatggacacaaatcgaaaccaggtgttgcctctttcagacgtcgacaccacatccgcaactgacatacagagagtggcagtgttgtgtgtcagtagatcggcgtactgtttgggatcttcccacccccgcggatttctggccatgaaaatgcgtcatctgaatgccatggggtttcatgtgatcctcgtaaacaactgggaaatggataagctggaaatggaggacgccgtgacctttctgaaaaccaagatctacagcgtcgaggcgctccccgtcgccgccgtcaacgtgcagagtacccagtag

SEQ ID NO: 183237 - DNA, 2133 bp, Artificial Sequence
  derived and/or modified sequence
atgttgaccactctgaagcctttcggatctgtgagcgtggagtcaaagatgaacaacaaagcgggcagtttcttttggaacttgaggcagtttagcactcttgtctcgacaagtcggaccatgcggctctgttgtcttgggctttgcaagccaaagattgtacactccaattggaatattctgaacaacttccacaaccgaatgcagtcaaccgacataatccgttatctgttccaggacgccttcatttttaagtctgatgtcggctttcagacgaagggcatatcaacactgactgcactcaggatcgaacgacttctctacgcgaaacggctgtttttcgattcaaagcaaagtctcgtgcctgtagacaaaagcgacgacgagttaaagaaagttaatctgaaccatgaggtgtccaacgaagacgtcctaactaaggagaccaagcctaaccgaatctcttcaagaaaattgtctgaagaatgtaacagcctgagcgacgtgttggacgctttcagcaaggcacccactttcccgtcctccaattacttcacagcaatgtggacgatcgccaagaggctttcagacgaccagaagaggttcgaaaagcgtctgatgttttcccatccagctttcaaccagctctgcgagcacatgatgagagaagccaaaatcatgcaatataagtatctgctattttctctgcatgctatcgtgaaacttgggattccccaaaatactatccttgtgcagactctgctaagggtaacacaggaaaggatcaacgaatgcgatgagatttgcctctctgtgctctccaccgtgcttgaagccatggagccctgcaaaaatgtacacgtgctcaggaccggttttcgtatcctggtagatcagcaggtgtggaaaatcgaggacgtgttcactctgcaagtggtaatgaaatgcattggcaaagacgcaccgatcgcgcttaaacgcaagttagaaatgaaggccctgagggagctggaccggttctcggtgttgaatagccagcacatgttcgaagttctggctgctatgaatcatagatctctgattctgctcgacgaatgctccaaggtggtactcgacaatatccatgggtgccccttgagaataatgatcaacatcctccagtcttgcaaggatcttcagtatcacaatctcgacctgttcaagggtctcgccgattacgtcgctgccacctttgacatctggaaattcaggaaggttttattcatcctgatactgtttgaaaatcttgggttccggccagtagggttgatggacttgtttatgaagcgaattgtggaggatcccgagtctcttaatatgaaaaacatattgtccattctgcacacttattcctctttaaaccatgtctataagtgtcaaaataaggagcagttcgtcgaggtgatggcaagcgctttaacaggatatctacacaccatcagttccgaaaatcttctggatgctgtctactccttctgcctgatgaattactttccactcgctcctttcaaccagcttctgcagaaggatataatctctgaactgttaacatcagacgacatgaagaacgcttataagctgcacactctggatacttgcctcaagttagacgatacagtgtatctgcgggatatcgctctatctttaccccagttgccccgggagctacctagcagtcacacaaacgccaaggtcgctgaggttttgtccagcctactgggcggcgaaggacatttttccaaggacgtgcacttaccgcacaattatcacatcgacttcgagattcggatggataccaaccgcaaccaggtgctgcctctgtcagatgtggacacaaccagcgcgacagacatacagagggtggccgtcctctgcgtgtctcgatctgcctattgtctagggagtagccacccacgcggctttctagcaatgaagatgcgtcacctgaacgctatgggctttcacgtgattctcgtgaacaattgggagatggacaaattagagatggaagatgctgtcactttcctaaagacaaagatctactctgtggaagctctgcccgttgcagccgtcaatgtgcagagtacccagtag

SEQ ID NO: 183238 - DNA, 375 bp, Artificial Sequence
  derived and/or modified sequence
atgctgaccacgctgaaaccctttggtagtgtaagcgtggagtctaaaatgaacaacaaagcaggcagcttcttctggaatttgagacagttttctactttggtcagcaccagccgaaccatgaggctctgctgccttgggctctgcaagccaaagatagtccattccaattggaacattctgaacaacttccataatcgaatgcagtcgacagatatcatcaggtacctgttccaggacgcgttcatctttaagtccgacgtgggattccaaactaaggggatatcaacccttaccgccctgagaatcgaacggttgttgtatgctaagcgtctcttttttgactccaagcagtcgttagtgcccgtggattag

SEQ ID NO: 183239 - DNA, 2133 bp, Artificial Sequence
  derived and/or modified sequence
atgctgaccaccctgaagcccttcggctctgtgtctgtggagagcaagatgaacaacaaggccggcagcttcttctggaacctgcggcagttcagcaccctggtgtccaccagcaggaccatgaggctgtgctgcctgggcctgtgcaagcccaagatcgtgcacagcaactggaacatcctgaacaacttccacaacaggatgcagagcacagacatcatccgctacctgttccaggatgccttcatcttcaagagtgatgtgggcttccagaccaagggcatcagcaccctgacagccctgagaattgagcggctgctgtatgccaagaggctcttctttgacagcaagcagagcctggtgcctgtggacaagagtgatgatgagctgaagaaggtgaacctgaaccacgaggtgtccaatgaagatgtgctgaccaaggagaccaagcccaaccgcatcagcagcaggaagctgtctgaggagtgcaacagcctgagtgatgtgctggatgccttcagcaaggcccccaccttccccagcagcaactacttcaccgccatgtggaccatcgccaagaggctgagtgatgaccagaagagatttgagaagaggctgatgttcagccacccagccttcaaccagctgtgtgagcacatgatgagggaggccaagatcatgcagtacaagtacctgctcttcagcctgcacgccatcgtgaagctgggcatcccccagaacaccatcctggtgcagaccctgctgcgggtgacccaggagcgcatcaatgaatgtgatgagatctgcctgtctgtgctgagcacagtgctggaggccatggagccctgcaagaatgtgcacgtgctgaggacaggcttccgcatcctggtggaccagcaggtgtggaagattgaagatgtgttcaccctgcaggtggtgatgaagtgcatcggcaaggatgcccccatcgccctgaagaggaagctggagatgaaggccctgcgggagctggaccgcttctctgtgctgaacagccagcacatgtttgaggtgctggccgccatgaaccacaggagcctcatcctgctggatgaatgttccaaggtggtgctggacaacatccacggctgccccctgcgcatcatgatcaacatcctgcagagctgcaaggacctgcagtaccacaacctggacctcttcaagggcctggccgactatgtggccgccacctttgacatctggaagttcaggaaggtgctcttcatcctgatcctgtttgagaacctgggcttccggcctgtgggcctgatggacctcttcatgaagagaattgtggaggaccctgagagcctgaacatgaagaacatcctgagcatcctgcacacctacagcagcctgaaccacgtgtacaagtgccagaacaaggagcagtttgtggaggtgatggccagcgccctgaccggctacctgcacaccatcagcagcgagaacctgctggatgctgtgtacagcttctgcctgatgaactacttccccctggcccccttcaaccagctgctgcagaaggacatcatcagcgagctgctgaccagtgatgacatgaagaatgcctacaagctgcacaccctggacacctgcctgaagctggatgacacagtgtacctgcgggacatcgccctgagcctgccccagctgccccgggagctgcccagcagccacaccaatgccaaggtggccgaggtgctgagcagcctgctgggcggggagggccacttcagcaaggatgtgcacctgccccacaactaccacatcgactttgagatccgcatggacaccaacagaaaccaggtgctgcccctgagtgatgtggacaccaccagcgccacagacatccagagggtggccgtgctgtgtgtgagccgcagcgcctactgcctgggcagcagccacccccggggcttcctggccatgaagatgaggcacctgaatgccatgggcttccacgtgatcctggtgaacaactgggagatggacaagctggagatggaggatgctgtgaccttcctgaagaccaagatctacagcgtggaggccctgcctgtggccgctgtgaatgtgcagagcacccagtag

SEQ ID NO: 183240 - DNA, 375 bp, Artificial Sequence
  derived and/or modified sequence
atgctgaccaccctgaagcccttcggctctgtgtctgtggagagcaagatgaacaacaaggccggcagcttcttctggaacctgcggcagttcagcaccctggtgtccaccagcaggaccatgaggctgtgctgcctgggcctgtgcaagcccaagatcgtgcacagcaactggaacatcctgaacaacttccacaacaggatgcagagcacagacatcatccgctacctgttccaggatgccttcatcttcaagagtgatgtgggcttccagaccaagggcatcagcaccctgacagccctgagaattgagcggctgctgtatgccaagaggctcttctttgacagcaagcagagcctggtgcctgtggactag

SEQ ID NO: 183241 - DNA, 2133 bp, Artificial Sequence
  derived and/or modified sequence
atgctgaccaccctgaagcccttcggcagcgtgagcgtggagagcaaaatgaacaataaagccggtagtttcttctggaacctgcggcaattctcaactctcgtaagcaccagcaggactatgagactgtgttgcctgggtctgtgtaaaccgaagattgttcactccaattggaacatcttaaacaacttccataaccggatgcagtccaccgacatcattcgctacctgtttcaggatgcttttatctttaaatctgacgtggggttccagactaagggtatttctacgttgactgccctccggattgagaggctgctgtacgcaaaaagattatttttcgacagcaagcagagcctggtgcccgtagacaagagcgacgacgagctgaaaaaagttaatttgaatcatgaagtgtctaatgaagacgtcctgacaaaggaaacaaagccaaaccggatctcatcccggaagttatcagaagaatgtaacagccttagcgatgtcctggacgcattctctaaagcacctacattcccatcgtctaactactttactgctatgtggacgatagcaaagcgactttcggacgaccagaagaggttcgagaaacggttgatgttttctcacccggcctttaaccagttatgtgagcacatgatgcgggaggccaaaattatgcagtataaataccttctgttcagcctccacgctatagtaaaactggggattccccaaaatacaatactggtgcagactctcctgagggttactcaggagcgtataaatgagtgcgacgagatctgtctgagcgtcctgtccactgtgctggaggctatggagccatgcaaaaatgtgcacgtgctgcggacgggctttcgcatcctggtcgatcaacaggtatggaagatagaggatgtgtttactctgcaggttgtgatgaaatgtattggcaaggacgcgcctatcgcccttaaaaggaaactggaaatgaaggcgctgcgcgagctggatagatttagtgtactgaattctcagcacatgtttgaagtcctagcggcgatgaaccatcgttcacttattctgctggacgagtgtagcaaggtcgtgctcgataatatacatggatgccctctacggatcatgatcaatattctacaatcttgtaaggatctacagtaccataacttggacctctttaagggattagcggattatgtggcagcaacattcgacatctggaagtttcgaaaggtgctcttcattttaattttgttcgagaatctcggttttaggcccgtgggcctgatggacctgttcatgaagaggatcgtggaagaccccgagagcctcaacatgaaaaatatcctgagcatacttcacacctactctagtctcaatcacgtatataaatgtcagaataaagaacagttcgtagaggttatggccagtgcattaacgggctacctccacacaatttccagtgagaacctccttgatgcagtgtattccttttgcctcatgaactactttcccctcgctccattcaaccagttactgcagaaggatattatctccgagctgctgacctccgatgacatgaaaaacgcatataagttgcatacacttgacacctgtcttaagttggatgatacagtttacttgcgcgacattgccctttctctcccgcagctccctcgcgagctcccctcgagtcatacaaacgcgaaagtggccgaggtgctctcaagcttattgggtggggaaggacacttctcgaaggacgtgcatcttccccacaactaccacattgattttgagatacggatggacacaaatcgaaaccaggtcctgcccttatcagacgtggatacaacatccgccaccgatatccaaagagtggccgtgttgtgtgtctctcgttctgcgtattgcctcggcagttcccacccacggggcttccttgccatgaagatgagacatctgaacgctatgggatttcacgtgattctggttaataattgggagatggataagcttgagatggaggacgcggtgacattccttaaaactaagatttattccgtggaggctctgccagttgccgccgtcaatgttcaaagtacccagtag

SEQ ID NO: 183242 - DNA, 2133 bp, Artificial Sequence
  derived and/or modified sequence
atgctgaccaccctgaagcccttcggcagcgtgagcgtggagagcaagatgaataacaaagctggtagttttttctggaatctccggcagtttagtacactggtcagcacttctcgtacaatgcgcctctgctgtcttggcctatgcaagcctaaaatcgtgcactcaaactggaatatcctgaacaattttcacaacagaatgcagtccaccgacataatcagatacctgttccaagacgcctttatatttaagagcgacgtcgggttccagaccaaaggcatctctaccctcaccgccctgcggatcgaacgactactttacgcgaaacgtctgtttttcgacagtaagcagtccctagttccagtggataagtcagacgacgagttgaagaaagttaacctgaatcacgaagtctccaatgaagacgtgctcacaaaggaaactaagccgaaccgcatctcgtccagaaaattatccgaggaatgtaactctctgtcggatgtgctggacgcgttctcaaaagcgcctacatttccttcaagtaattactttacagccatgtggaccatagctaaacggttatcagatgaccaaaagcggtttgagaaacgcctaatgttctcccaccctgccttcaaccagctgtgcgaacacatgatgcgcgaagccaagatcatgcagtataagtatctgctgttcagcctgcacgccatcgtgaaactcggcatcccgcaaaacaccatccttgttcaaacactgttgcgagtgacacaagaaagaataaatgagtgtgacgaaatctgcctcagcgttttgtctacggtactcgaagccatggaaccgtgcaaaaatgttcacgtgctcagaactggatttcgaatcctggtagaccaacaagtttggaagatcgaagacgtctttacactccaggtggtcatgaaatgtatcggaaaggatgcacctatcgcgctgaaaagaaaactggaaatgaaggctcttcgcgagctcgacaggttttctgtgttgaattcacagcatatgttcgaagtacttgccgctatgaaccacaggagcctaatactactcgatgagtgttccaaggtggtcttagacaatattcacgggtgcccgctccgaatcatgataaatattctccagagttgtaaggaccttcagtatcataatctggatctctttaaggggctcgcagattacgtcgccgctacctttgacatttggaagttcaggaaggtcctctttatactcatcctttttgaaaaccttgggttcagaccagtcggccttatggacttgttcatgaagagaattgttgaagatcccgagagccttaacatgaagaatatcctctccatcctccacacttattcatctcttaaccacgtgtacaagtgtcaaaataaagagcagttcgtggaagttatggccagcgccttgaccgggtacctgcacaccatcagcagcgagaacctgctggatgctgtgtattccttttgtttgatgaactacttccccctggcaccatttaatcagcttctgcagaaagacattatctccgagctgttaaccagcgacgacatgaaaaatgcgtacaaattgcatactttggatacctgtttgaaattagacgacacagtgtacctcagggacattgccctgtctctcccccagctgcctcgggagcttccatctagtcacacgaacgccaaggttgccgaagtcttgtcctccctcctcggaggggagggccatttcagcaaagatgtgcatttaccacataactatcacatcgacttcgaaatccgcatggacaccaaccggaatcaggtgcttccgctgagtgacgtcgataccacatcagccacagacattcagagagtggctgtgctgtgtgtgagcaggtcagcttattgtctgggcagctcacaccccagaggcttccttgcgatgaagatgcgccatctcaacgctatggggttccatgttatccttgttaataactgggaaatggacaaactcgaaatggaggatgctgtcacgttcctaaagaccaaaatctactctgttgaggcgctgcctgtggccgctgtcaacgtccaatctacccaatag

SEQ ID NO: 183243 - DNA, 2133 bp, Artificial Sequence
  derived and/or modified sequence
atgctgaccaccctgaagcccttcggcagcgtgagcgtggagagcaagatgaacaacaaagctggctcttttttctggaatttgagacagttttcaacactggtcagtactagcaggaccatgaggctgtgttgcctcggcctttgtaaacccaagatcgtgcacagcaattggaatattctgaataatttccacaatcgtatgcagagcactgacattatccgctatctctttcaagacgcctttatctttaaatcagacgtggggtttcagacaaagggaatctccaccctaactgccttgaggatcgagagactgttgtatgctaaaagactgttttttgattctaagcaaagcctggtgcccgttgacaagagtgatgacgagctgaaaaaggttaacctgaatcacgaggtgagcaacgaagacgtacttacgaaagagacaaaacccaatcgcatctcttctagaaagctttctgaggagtgtaattctctctctgacgtgctggatgccttctccaaagcgcccacttttccctcatccaactactttacagcgatgtggacaatcgccaaacgcctgagcgacgatcagaaacgcttcgagaagcgattaatgttcagccatcccgcgttcaatcagctatgcgaacatatgatgcgcgaagcgaaaatcatgcagtataaatatctgctcttctccctgcacgctattgttaaactgggaattcctcagaacacaatcctcgtccaaacgctcctacgagttacacaagaacgcatcaatgagtgtgacgaaatctgcctgtcagtgctctccaccgtcctcgaggcgatggaaccatgtaagaacgtccacgtgcttcgtactggcttcaggatcctagtggatcagcaagtctggaagatcgaagacgttttcacactacaggtggtcatgaaatgtataggtaaagacgcccctattgcattaaagcgcaaactggaaatgaaagcactgagagaattggataggttttcagtgctgaatagccagcatatgtttgaggtactggcagccatgaatcacagatccctgatcctgctggatgagtgctccaaagtcgtcctggataatatccatgggtgtcccctcaggatcatgatcaatatattacagtcctgcaaagacttgcaataccacaatctagatctgttcaagggattggccgattacgttgctgctacatttgacatctggaagttccgaaaggtgttgttcatactaatcctgttcgagaacctggggttccgacctgttgggctaatggatctgttcatgaagcgtatcgttgaggacccagaatctctaaatatgaaaaatatactctctatcctacacacatatagcagcctgaatcatgtttacaagtgtcaaaataaagaacagtttgtggaagtgatggccagcgccctcactggctatttgcacaccatcagctccgagaacctgcttgacgccgtgtactcgttctgcctcatgaactactttcccctggcccctttcaatcagctactgcagaaagatattatttccgaactcctgacctcagacgacatgaaaaatgcctacaaactccatacattagacacttgtctcaaactagacgatacagtctacctccgggatattgccctttctctgccgcaattaccacgcgaactcccatccagccatacaaacgcgaaagttgccgaggttctaagctcactgttgggcggcgagggacacttttctaaagacgtgcacctgccacacaactatcacattgattttgagatccgtatggacacaaatcggaatcaggttctaccattgtcggacgttgacacaaccagtgccactgacatccagagggttgctgtactttgcgtgtcccggtctgcgtattgccttggttcttctcaccctcgaggttttcttgcaatgaaaatgaggcacctgaatgctatgggcttccatgtaatactggttaataactgggaaatggataaacttgaaatggaggacgctgtgacgttcctgaagaccaaaatttatagcgtcgaagctctccccgtcgccgccgtgaacgtccagagtacccagtag

SEQ ID NO: 183244 - DNA, 375 bp, Artificial Sequence
  derived and/or modified sequence
atgctgaccaccctgaagcccttcggcagcgtgagcgtggagagcaagatgaacaataaagcgggtagtttcttttggaatttgaggcagttttctaccctggtgtccaccagtcgaacgatgcggctatgttgtctgggactgtgtaagcctaagatcgtgcactccaattggaacatactgaataactttcataataggatgcaatcaaccgatataatccgctacctgtttcaggacgcattcatattcaaatctgatgtgggattccagacaaagggcatttcaactctgacagctctaagaatcgaacgccttctgtacgctaaaagactattttttgactccaagcagtccctcgtgcccgtcgactag

SEQ ID NO: 183245 - DNA, 2133 bp, Artificial Sequence
  derived and/or modified sequence
atgttaacaacgctgaaaccgtttggatccgtctctgtggagtccaagatgaacaacaaagccggtagtttcttctggaacttgagacaatttagcacactggtgtccacaagcagaaccatgaggctgtgctgtctggggctttgcaaaccgaaaatcgtgcactcaaattggaatatcctgaacaatttccataacaggatgcagtctacagacattataagatacctgttccaggacgcatttatttttaaatccgacgtcggctttcagaccaaagggatctctacccttaccgccctgagaatcgagaggttgctgtatgcaaagcgtctatttttcgactccaaacaatcactggttcctgtcgacaagagcgatgacgagctgaaaaaggtcaacctgaatcacgaggtgagcaacgaggatgttctcaccaaggagacgaaaccgaaccgaatctccagcagaaagctgagtgaggagtgcaattcactgtccgacgtgcttgatgcctttagcaaagccccaacattccctagctccaactacttcaccgcaatgtggactatcgcaaagagactatccgatgatcaaaagcgctttgagaagagactgatgttcagtcatcccgcttttaatcagctgtgtgagcacatgatgagggaggccaagatcatgcagtacaaatacctcctgtttagtctccacgcgatcgtcaagcttggcatcccccagaataccattcttgttcaaaccttactgagagtaacacaggagcgtatcaacgaatgtgacgagatctgcctatctgtcttgtcaaccgtgctggaagcaatggaaccttgtaagaatgtccatgtgctgagaaccggatttcgcatcctcgtggatcagcaggtttggaagattgaggatgtgttcaccctccaggtcgttatgaagtgcataggtaaagacgcacccattgcactgaagcggaagttggagatgaaggctttgcgtgagctcgacagatttagcgtgctgaacagccagcacatgtttgaagtgctcgcagccatgaatcatagaagcctaatcttactggatgaatgtagcaaggtagtacttgataatatccatgggtgtcccctgcggattatgattaatatcctacagagctgcaaggaccttcagtaccataaccttgaccttttcaaaggtcttgcagattatgtcgccgcaacttttgatatttggaagtttagaaaggtgctgttcatcctgattttgttcgagaacctcggctttcggcctgtgggattgatggacttatttatgaaaaggatcgtggaagatcccgagagcctaaacatgaaaaacattctctccatcctacatacatattcatccctgaatcacgtgtacaagtgccagaacaaggaacaatttgtggaggttatggcatctgcattaaccggctatttacataccatctcttctgaaaatctgcttgacgccgtgtattctttttgcctgatgaattattttcctctggcaccattcaaccagttacttcagaaggacatcatcagcgagctgctgacgagcgatgacatgaaaaacgcctacaaattgcatacgctggatacgtgtctgaagctggatgatactgtttacttaagggatattgccctgagtttaccacaattacctcgagagctcccatcaagccacacaaacgccaaggtggctgaagtgctgtccagcctactgggtggtgagggacacttctccaaggatgttcatctcccacacaattatcatattgacttcgagatcagaatggatactaataggaatcaggtgttacccctttctgacgtggatacaaccagtgctaccgatatccaaagggtggctgtgctttgtgtgtcccgctcagcatactgcttggggtcctcacacccgagaggtttcctggcgatgaaaatgcgccacctcaatgcgatgggatttcacgtgatattagtgaataattgggagatggacaagctggaaatggaagacgcggtcacttttctaaagacaaaaatctactctgttgaagcactgccagtcgcggcagtgaacgtccagtctacgcagtag

SEQ ID NO: 183246 - DNA, 2133 bp, Artificial Sequence
  derived and/or modified sequence
atgctgaccaccctgaaaccctttggctcggtgtcagtagaatccaaaatgaacaacaaggccggttcatttttctggaacctccgccaattcagtacactcgtctccacgagccgcacaatgcgcctgtgctgtctgggtctgtgtaagcctaaaatagtccactctaattggaacatattgaacaactttcataaccggatgcaatccacggacatcattcgatatctctttcaagatgccttcatcttcaaatccgatgtggggttccagactaagggaatttcaacactgaccgcgcttcggattgagcgacttctgtatgcaaagagactgttttttgactcaaagcagtctttggtccccgtcgacaaatcagacgacgagcttaaaaaagtcaatctaaatcacgaggtctctaacgaagatgtgcttactaaggagactaaaccgaaccgcattagttcacgtaagctgtccgaagaatgtaattcgctgtccgacgtgctggacgcctttagcaaggctccaacgtttcctagcagtaattattttacagcgatgtggaccatcgctaagcgactgtcagacgaccagaaaagatttgagaaaagattaatgttctcacacccagctttcaaccagctgtgcgagcacatgatgcgtgaggctaagattatgcaatacaagtatctgttgttcagtctgcacgcgatagtgaagttgggtataccccagaacaccatcctcgtgcagacccttttgagggttacacaggagcgcatcaacgaatgtgatgagatatgcctgtctgtgctgtccactgtgctcgaagcaatggaaccctgcaagaacgtgcatgttctcagaacgggattccgcatactggtagatcagcaagtctggaaaatagaggatgtgtttaccctgcaggttgtgatgaaatgtattgggaaggatgcgccaatcgccctgaaacggaagctggaaatgaaagcccttagagagctggaccggttttcggtgctcaattcccagcatatgttcgaagttctggccgctatgaatcaccggagtctgattttgctggatgagtgcagtaaagtggtgcttgataatattcacggctgtcctctacgtatcatgatcaacattctgcagagctgtaaggatttacagtatcacaacctcgatctgttcaaaggccttgctgactatgtggccgcaactttcgatatatggaaatttagaaaggtgttatttattcttattctcttcgagaacctaggatttagaccggttggtctgatggacctgtttatgaagcgcattgtggaagatccagagtcactcaatatgaaaaacatactgtctatcctgcatacctactcctccttaaatcatgtgtacaagtgtcagaacaaggagcaattcgtcgaagtcatggcctcagctctcacaggatatctgcacacgatctcctcggagaacctgcttgacgccgtctattctttctgtttgatgaactactttcccctcgctcccttcaatcagttgctccagaaggatatcatctcagagctcctaacatctgatgacatgaaaaatgcctataaacttcatacacttgacacatgtctgaagctggatgatacggtttacctgagggatatcgctctctccctgccacagctccctcgggaattgccttcttctcatactaacgccaaggtggcggaggtgctgtcttccctgcttgggggtgaagggcactttagcaaggacgtacacttaccccacaattaccacatcgacttcgagattcggatggacaccaataggaaccaagttctgccccttagcgatgtcgatactaccagcgcgaccgacatccagagggtcgctgtgctatgcgtcagccgctcagcttactgtttagggagttcacacccaaggggatttcttgccatgaagatgcgtcacctgaatgccatgggctttcatgtgatcctggtgaacaactgggagatggataaactggagatggaagacgctgtgaccttcctgaaaactaagatttactctgtggaagccctgccagtagcggctgttaacgtgcagtcaacccagtag

SEQ ID NO: 183247 - DNA, 2133 bp, Artificial Sequence
  derived and/or modified sequence
atgctcacaaccctgaaaccctttgggtcagtttccgtggagtccaaaatgaacaataaggccggttccttcttttggaacctgcggcagttctccacgctggtgtcaacctcccggacgatgcggctctgttgcttgggcttgtgcaagccaaagatcgtgcatagtaactggaatatccttaataacttccacaaccgcatgcagtcaaccgacatcatcagatacctgttccaggacgcgttcatttttaaaagtgatgtcggattccagactaagggcatatccacgcttacagctctgcggatagaacgcctgttatatgcaaaacgcctcttttttgactccaaacaatcccttgtgccagttgacaagtcagacgatgaattgaagaaagttaatctcaatcatgaagtttcaaatgaggatgtactcacgaaagagacaaaacccaatcgaatatcaagcagaaaacttagtgaggaatgcaattcgctgagcgatgtactcgatgccttttcaaaagcacccacatttccttcctctaactacttcaccgctatgtggacgatcgctaaacggctttcagacgatcagaaaaggttcgagaaacgccttatgttctcacacccagcatttaaccagctgtgcgagcatatgatgcgggaggctaagatcatgcagtataagtacctcttattttctctacacgcgatagtgaagctgggcatcccccaaaataccatcctggtccagactctgctgcgggttactcaggaaaggattaatgagtgtgatgagatatgcctaagcgtactgtccactgtactggaagcaatggagccctgcaagaacgttcacgtccttcggaccggcttccggattctggtagatcagcaggtgtggaaaattgaagacgtgttcactctccaggtggtgatgaaatgcatcggcaaggatgccccaatagccctcaaacgcaaactggagatgaaagcactacgggaactggaccgcttttcagtactgaactctcagcacatgttcgaggttctggctgcgatgaatcatcgatctctgatcctcctggacgaatgctccaaagtcgtcctggataacatacacgggtgcccacttaggataatgatcaacatcttgcagtcgtgcaaagacctgcaatatcataacctggacttattcaagggtctggctgactatgtcgctgctacttttgatatctggaagttccggaaagtgctatttattttgatcttgttcgagaatctcgggtttaggccagtaggccttatggacctcttcatgaagcgaatcgtcgaggaccctgagtctctgaacatgaagaacatcctgtctattcttcacacgtattcgtcactcaatcacgtgtacaagtgtcaaaacaaagagcagttcgtggaggtgatggcttccgctctgactgggtatttgcacactatttctagtgaaaacttattagatgctgtttacagcttctgcctgatgaattacttccccctcgcacctttcaaccagttgctgcaaaaggacatcatcagcgaactgctgacatccgacgatatgaagaacgcatacaagctgcataccttagatacgtgcctgaaactggacgacaccgtttatctgcgtgatatcgccctaagtctgccccagctgcccagagaactcccctcttctcacacgaacgcaaaagtggcggaggtgctcagttctttgttaggaggggaaggccatttttccaaggacgttcacttgccccataactatcacattgatttcgagatcaggatggacacgaaccggaaccaggtgctcccactgtcagacgttgatacgacaagtgctacagacatacagcgcgtcgcagtgctttgtgtaagccgcagcgcctactgcctgggcagctcccatcctcgaggtttcctcgctatgaagatgcgccatcttaacgccatgggcttccacgttattttggtcaataactgggagatggacaagctagaaatggaagacgcagttactttcctcaaaaccaaaatttattccgtggaggccctgccggtggcagccgtcaatgtgcagtcaactcagtag

SEQ ID NO: 183248 - DNA, 375 bp, Artificial Sequence
  derived and/or modified sequence
atgctcaccacactgaagccattcggaagcgtgtccgtggaatctaaaatgaataataaagcagggtctttcttctggaatctgcgtcagttctccacgttggtctccactagccggaccatgcggctgtgttgtctaggattgtgcaagcccaaaatcgttcattcgaactggaacatccttaataatttccacaaccgcatgcagtctacagacatcatccggtacctgttccaggatgcgtttatcttcaaatccgatgtcggatttcaaacaaaaggaatatcaactcttaccgccttgcggatcgagagattgctctacgcgaaacggttattcttcgattctaaacagagcttagtgccggtggactag

SEQ ID NO: 183249 - DNA, 2133 bp, Artificial Sequence
  derived and/or modified sequence
atgctgaccaccctgaagcccttcggcagcgtgagcgtggagagcaagatgaacaacaaggccggcagcttcttctggaacctgagacagttcagcaccctggtgagcaccagcagaaccatgagactgtgctgcctgggcctgtgcaagcccaagatcgtgcacagcaactggaacatcctgaacaacttccacaacagaatgcagagcaccgacatcatcagatacctgttccaggacgccttcatcttcaagagcgacgtgggcttccagaccaagggcatcagcaccctgaccgccctgagaatcgagagactgctgtacgccaagagactgttcttcgacagcaagcagagcctggtgcccgtggacaagagcgacgacgagctgaagaaggtgaacctgaaccacgaggtgagcaacgaggacgtgctgaccaaggagaccaagcccaacagaatcagcagcagaaagctgagcgaggagtgcaacagcctgagcgacgtgctggacgccttcagcaaggcccccaccttccccagcagcaactacttcaccgccatgtggaccatcgccaagagactgagcgacgaccagaagagattcgagaagagactgatgttcagccaccccgccttcaaccagctgtgcgagcacatgatgagagaggccaagatcatgcagtacaagtacctgctgttcagcctgcacgccatcgtgaagctgggcatcccccagaacaccatcctggtgcagaccctgctgagagtgacccaggagagaatcaacgagtgcgacgagatctgcctgagcgtgctgagcaccgtgctggaggccatggagccctgcaagaacgtgcacgtgctgagaaccggcttcagaatcctggtggaccagcaggtgtggaagatcgaggacgtgttcaccctgcaggtggtgatgaagtgcatcggcaaggacgcccccatcgccctgaagagaaagctggagatgaaggccctgagagagctggacagattcagcgtgctgaacagccagcacatgttcgaggtgctggccgccatgaaccacagaagcctgatcctgctggacgagtgcagcaaggtggtgctggacaacatccacggctgccccctgagaatcatgatcaacatcctgcagagctgcaaggacctgcagtaccacaacctggacctgttcaagggcctggccgactacgtggccgccaccttcgacatctggaagttcagaaaggtgctgttcatcctgatcctgttcgagaacctgggcttcagacccgtgggcctgatggacctgttcatgaagagaatcgtggaggaccccgagagcctgaacatgaagaacatcctgagcatcctgcacacctacagcagcctgaaccacgtgtacaagtgccagaacaaggagcagttcgtggaggtgatggccagcgccctgaccggctacctgcacaccatcagcagcgagaacctgctggacgccgtgtacagcttctgcctgatgaactacttccccctggcccccttcaaccagctgctgcagaaggacatcatcagcgagctgctgaccagcgacgacatgaagaacgcctacaagctgcacaccctggacacctgcctgaagctggacgacaccgtgtacctgagagacatcgccctgagcctgccccagctgcccagagagctgcccagcagccacaccaacgccaaggtggccgaggtgctgagcagcctgctgggcggcgagggccacttcagcaaggacgtgcacctgccccacaactaccacatcgacttcgagatcagaatggacaccaacagaaaccaggtgctgcccctgagcgacgtggacaccaccagcgccaccgacatccagagagtggccgtgctgtgcgtgagcagaagcgcctactgcctgggcagcagccaccccagaggcttcctggccatgaagatgagacacctgaacgccatgggcttccacgtgatcctggtgaacaactgggagatggacaagctggagatggaggacgccgtgaccttcctgaagaccaagatctacagcgtggaggccctgcccgtggccgccgtgaacgtgcagagcacccagtag

SEQ ID NO: 183250 - DNA, 375 bp, Artificial Sequence
  derived and/or modified sequence
atgctgaccaccctgaagcccttcggcagcgtgagcgtggagagcaagatgaacaacaaggccggcagcttcttctggaacctgagacagttcagcaccctggtgagcaccagcagaaccatgagactgtgctgcctgggcctgtgcaagcccaagatcgtgcacagcaactggaacatcctgaacaacttccacaacagaatgcagagcaccgacatcatcagatacctgttccaggacgccttcatcttcaagagcgacgtgggcttccagaccaagggcatcagcaccctgaccgccctgagaatcgagagactgctgtacgccaagagactgttcttcgacagcaagcagagcctggtgcccgtggactag

SEQ ID NO: 183251 - protein, 823 aa, Artificial Sequence
  derived and/or modified sequence
MALPRCTWPNYVWRAVMACLVHRGLGAPLTLCMLGCLLQAGHVLSQKLDDVDPLVATNFGKIRGIKKELNNEILGPVIQFLGVPYAAPPTGERRFQPPEPPSPWSDIRNATQFAPVCPQNIIDGRLPEVMLPVWFTNNLDVVSSYVQDQSEDCLYLNIYVPTEDDIRDSGGPKPVMVYIHGGSYMEGTGNLYDGSVLASYGNVIVITVNYRLGVLGFLSTGDQAAKGNYGLLDLIQALRWTSENIGFFGGDPLRITVFGSGAGGSCVNLLTLSHYSEGNRWSNSTKGLFQRAIAQSGTALSSWAVSFQPAKYARMLATKVGCNVSDTVELVECLQKKPYKELVDQDIQPARYHIAFGPVIDGDVIPDDPQILMEQGEFLNYDIMLGVNQGEGLKFVENIVDSDDGISASDFDFAVSNFVDNLYGYPEGKDVLRETIKFMYTDWADRHNPETRRKTLLALFTDHQWVAPAVATADLHSNFGSPTYFYAFYHHCQTDQVPAWADAAHGDEVPYVLGIPMIGPTELFPCNFSKNDVMLSAVVMTYWTNFAKTGDPNQPVPQDTKFIHTKPNRFEEVAWTRYSQKDQLYLHIGLKPRVKEHYRANKVNLWLELVPHLHNLNDISQYTSTTTKVPSTDITFRPTRKNSVPVTSAFPTAKQDDPKQQPSPFSVDQRDYSTELSVTIAVGASLLFLNILAFAALYYKKDKRRHDVHRRCSPQRTTTNDLTHAQEEEIMSLQMKHTDLDHECESIHPHEVVLRTACPPDYTLAMRRSPDDVPLMTPNTITMIPNTIPGIQPLHTFNTFTGGQNNTLPHPHPHPHSHSTTRV

SEQ ID NO: 183252 - DNA, 2472 bp, Artificial Sequence
  derived and/or modified sequence
atggcattgcctcgctgtacctggcctaattacgtctggcgtgcggtgatggcctgtctggtgcatagaggcttgggcgcgcctcttacactgtgcatgctcggatgtctgctccaggcaggccatgtcctgagtcagaagttggatgatgtggaccccctggtggccaccaatttcgggaaaataagaggtataaaaaaggaattaaacaatgagatcctagggcccgtaatacaattcctcggtgtcccctacgctgcaccccccacaggtgaaaggcgttttcaaccaccagagccaccatctccatggtccgatattaggaacgccacccagtttgccccagtctgtccacagaacatcatcgacggccggctgccggaggtcatgctccctgtgtggttcaccaataatttggacgtggtgagttcctatgtgcaggaccagagcgaagattgcttgtacttgaatatatacgttccaacggaggatgatatccgagattctggtgggccaaagccagtgatggtgtacatacatggcggatcttatatggaaggcaccggcaatctgtatgacgggagcgtgctcgcgtcatacggcaacgttattgtgataaccgttaattatcggctgggcgtccttggtttcttgtcaacaggggatcaggccgcgaaggggaattatggtttgctggacctgattcaagctctgcgctggaccagcgaaaacatagggtttttcgggggcgacccacttcgaatcactgtcttcggtagcggcgccggggggtcatgtgtgaatctactgacactgagccattacagcgaagggaaccgctggagcaacagtactaaaggtctttttcagcgagcaatcgctcagagcggcactgccctgtccagttgggccgtgtcttttcagccggccaaatacgcgcgaatgctcgcgacgaaggtaggatgcaatgtgtccgatactgtagaacttgtggagtgcctccagaaaaagccatataaggagctggttgaccaagacatccagcctgcaagataccatattgcattcggaccggtgatcgacggggatgttattcccgatgatccgcagatccttatggaacaaggtgaattcttgaactacgacatcatgttaggggtcaatcagggtgagggcctgaaattcgtcgagaacatagtggacagtgatgacggaatttctgccagcgattttgatttcgctgtcagcaatttcgtcgacaatttgtacggctaccccgagggtaaagatgtgctcagagaaacaattaagttcatgtacactgattgggcagatagacataatcctgaaacacggcgaaagaccctgctggccctgtttactgatcaccagtgggtggctcccgcagtggccaccgccgatctgcatagcaacttcggctcaccaacttatttttatgccttctatcatcactgccagacagatcaagtgcctgcatgggctgatgcggcacacggcgatgaagttccttatgttcttggaataccgatgatcggacctactgagctgtttccctgcaattttagcaagaacgatgtaatgctctcagctgtggtcatgacatactggacaaacttcgccaagaccggtgacccaaatcagccagtgccccaggatacaaaattcatccatacaaagcctaatcgctttgaagaagtggcctggactagatatagccagaaggaccagctgtacctgcacatcggtttgaagcccagggtaaaagaacattatcgtgccaacaaggtaaatttatggctggagttggtcccccacctgcacaatctgaatgacatctcccaatatacgtccactaccaccaaggtgccgtctacagacattacctttagacctacgaggaagaactcagtcccagtcacctccgccttcccaaccgcaaagcaggacgaccccaagcagcagccatctcccttttcagtggaccagagggattatagtactgagctcagtgtcacaattgccgtcggcgcctctcttctgttcttaaacatcctggcctttgctgcactctattataagaaagataagagaagacacgacgtgcatcggagatgcagcccacaaagaacaactacaaacgatttgacgcatgcccaagaagaggagatcatgagtctacaaatgaagcacaccgacctggaccatgaatgcgagtcaattcacccacatgaggtagtattgagaactgcttgcccccccgactataccttagcaatgagacgatcacccgacgatgtgccactgatgacacctaacacgatcactatgatcccgaacacaatacccgggatacagccactgcatacattcaacacctttacaggtggccagaataacaccttgccccatccacacccacatcctcattcacatagcacaacacgcgtgtag

SEQ ID NO: 183253 - DNA, 2472 bp, Artificial Sequence
  derived and/or modified sequence
atggccctgccccgctgtacctggccaaactatgtgtggagagccgtaatggcctgtctggtgcatagggggctcggtgcgcccctcaccctgtgcatgctgggctgtctcctgcaagctgggcacgtgctgtcgcagaagcttgacgacgtagacccccttgttgccacaaacttcggaaaaatcagaggtatcaaaaaggaactcaataacgagatactgggccccgttattcagtttctcggggtcccttacgccgcccctcccaccggcgagcgtagatttcagcctcccgaacctccttctccgtggtccgatatcaggaacgcaacccagtttgcgcctgtatgcccacaaaacatcatagatggcagactcccagaggttatgttgccggtctggtttaccaataacctggatgtagtgagctcatatgtgcaggaccaaagcgaggactgcctctacttaaacatttacgtaccaaccgaagatgatatcagggatagcggcggcccaaaacccgtcatggtctacatccacgggggttcttatatggagggcacgggcaatctgtatgacggcagtgtgctggccagctacggcaatgtgatcgtgatcactgtgaactaccgcctgggcgtgttagggttcctatccacgggggatcaggcagcaaagggaaattacgggctactggacctgatccaggcactgcgatggaccagcgagaacattggattcttcggcggagatccgctcagaattaccgtctttgggagtggggcggggggaagctgtgtgaacctgctgaccctgtcgcattacagcgaaggtaatagatggtctaatagtactaagggactgttccaacgggcgattgcccagagtggaaccgcccttagttcttgggctgtgtcttttcagcccgccaaatatgctcgcatgttagcaaccaaagtagggtgcaatgttagtgataccgtggaacttgttgagtgcctgcagaagaagccctataaggaactagtggaccaggacatccaacctgctaggtatcacattgcctttggccccgtaattgacggagatgtgattccggatgatccccagattctgatggaacagggcgagttcttgaactacgatattatgctgggagtgaaccagggcgaggggttgaagtttgtagagaacattgttgactcggatgatggaataagcgctagcgactttgactttgctgtcagcaattttgtcgataacctttatggatatccggaggggaaagatgtcctgagggagaccatcaagttcatgtacaccgactgggcggatagacacaaccccgagaccaggcggaagacccttctcgccctgtttactgatcaccagtgggtagcccccgcagtggcgacggccgatctgcactccaacttcgggtcccctacatatttttacgcattctaccatcattgccagaccgaccaagttccggcctgggcggatgctgcccatggcgacgaagtcccatatgttttgggcataccaatgattggccccacagagctcttcccttgcaatttctcaaagaatgatgtcatgctcagcgccgttgtgatgacctactggacgaattttgctaagaccggagacccaaaccaacccgtcccacaggataccaagttcatacataccaagcccaatcgtttcgaggaggtcgcatggacacgctacagtcaaaaggaccagctgtacctgcacatcgggctgaaaccccgagttaaggagcactacagggcaaacaaggtaaacctttggctggagttggtgcctcatctccacaacctcaacgacatttcacaatacacctctacaactactaaggtgccttcaactgatatcacttttcgtcctactaggaaaaattcagttcccgtgactagtgcatttcctaccgctaagcaggacgaccctaagcagcaaccctcgccatttagcgtggatcagagggattactctacggagctcagtgttaccatagcagtcggtgcctcactgcttttcttaaatattctcgcgtttgccgcattgtactacaagaaagacaagcgcaggcatgacgtgcatcggaggtgctccccccagcgtaccactaccaacgatctcacccatgcccaggaggaggaaatcatgtctttacagatgaaacacaccgacttggatcacgaatgcgagtctatccacccacacgaggtagtgctcaggaccgcttgtccgcccgattacactcttgcaatgagacggtcccccgatgatgtccccctgatgacgccgaacacaatcacaatgatccctaacaccataccgggtattcagccgctgcacacttttaacacttttacaggaggacaaaacaacacacttccacatccccaccctcacccccactctcacagtactactcgggtgtag

SEQ ID NO: 183254 - DNA, 2472 bp, Artificial Sequence
  derived and/or modified sequence
atggctctgcctcgctgcacctggcccaattatgtttggagggccgttatggcatgtctggtccacagaggtctaggcgcccctctaacgctgtgcatgcttggctgtcttctgcaggccggccatgtgctcagtcagaagctagacgacgttgatcctctagtcgctaccaacttcggcaagatccgcgggataaaaaaggagcttaataacgagatcctgggccctgtgatccaatttctcggggttccttatgcggcccctccaacgggcgagcgccgctttcagcccccagagcctccatcaccatggtctgacatccgcaacgccactcagttcgcacccgtgtgtccacaaaacattatcgatggacggctcccagaagttatgctgcccgtctggttcactaataatctcgacgttgtgtctagttatgtacaggatcaatccgaggactgtttatatctcaacatttacgtgcccacagaggatgacattcgagactcgggaggtccaaaacccgtgatggtttacatccatggaggctcctatatggaaggaacaggaaatttatatgatggaagcgtgctggcgagctacggaaatgtgatcgttattactgtaaattatcgactgggtgtcttggggttcctgtccaccggagatcaggcagcaaaggggaattacggcctgctggacctcatccaggcccttcgttggacttctgagaacatcggttttttcgggggcgatcccttaagaatcaccgtattcggctcgggagcaggggggagttgcgtgaacctgctgactctgtcacactactcggaggggaataggtggtccaacagtaccaaaggtttatttcagcgagcaatcgctcagtctggaaccgccctttcatcttgggctgtgagcttccagcccgcaaagtacgctaggatgttagcaacgaaagttggatgtaatgtgtctgataccgtggaattggtcgagtgcctgcagaagaagccatacaaagagttggtggatcaggacattcagcctgcacgctatcatattgcgttcggacctgtgattgacggagatgttatccccgacgatccacagatcctcatggaacagggggaatttctgaattacgacattatgctcggagtgaaccaaggcgagggcctcaagttcgttgaaaatattgttgattcagacgacggtattagcgcatcagacttcgattttgccgtgtccaattttgtcgacaacctgtacggctacccggagggcaaggatgtcctgcgcgaaacaatcaagtttatgtacaccgactgggccgatcggcataacccagagactcgaagaaagactctgctagccctcttcacagaccaccagtgggtcgctcctgcggtggcaaccgctgatctacatagcaatttcggtagccctacctacttctacgcgttttaccaccactgccagaccgaccaagttccagcctgggctgatgctgcccatggcgatgaggttccttatgtgcttggtatccccatgatcgggccaacggaactctttccatgcaacttctcaaaaaatgatgttatgctgtccgccgtggtcatgacgtactggacaaattttgccaaaactggggatcctaaccagccggtcccacaggacactaagtttattcatacaaagccgaacagattcgaagaagtcgcctggactcgctactcacagaaagaccagctgtaccttcacattggtctaaaaccccgtgtaaaagaacattacagggctaataaagtgaacctgtggctggagctggtgccccacttgcacaatctaaacgacatctcgcagtatacaagcaccacaaccaaagtacctagcactgacattacatttcggccaacgaggaagaacagcgtccccgttacatctgcattcccaactgcaaagcaagatgacccaaaacaacagccctcaccttttagcgtggaccagcgcgattatagcacagagctctctgtgaccatcgctgtgggtgcgtccctgcttttcctgaatatcttggccttcgccgccttgtactataagaaagataaacgccgccacgatgtccacagacgttgttctcctcaaaggaccaccacaaacgacctaacccatgctcaggaggaagagataatgtctctgcaaatgaaacatacagacctcgaccatgaatgcgaatctattcatccgcacgaagttgtgctgcggacagcctgccctcccgactacaccctggctatgagaagatcccctgatgacgtccctctgatgaccccgaacacaattacaatgattcccaataccatccctggcatccagcctctgcatacgtttaacaccttcacaggcggccagaataataccctgcctcacccacatccccaccctcacagtcactctactactagagtttag

SEQ ID NO: 183255 - DNA, 2472 bp, Artificial Sequence
  derived and/or modified sequence
atggccctgccccgctgcacctggcccaactacgtgtggagggctgtgatggcctgcctggtgcaccggggcctgggcgcccccctgaccctgtgcatgctgggctgcctgctgcaggccggccacgtgctgagccagaagctggatgatgtggaccccctggtggccaccaactttgggaagatccggggcatcaagaaggagctgaacaatgagatcctgggccctgtgatccagttcctgggcgtgccctatgctgccccacccaccggggagcggcgcttccagcccccagagccccccagcccctggagcgacatcagaaatgccacccagtttgcccctgtgtgcccccagaacatcattgatggccgcctgcctgaggtgatgctgcctgtgtggttcaccaacaacctggatgtggtgagcagctatgtgcaggaccagagcgaggactgcctgtacctgaacatctacgtgcccacagaagatgacatccgggacagcggcggccccaagcctgtgatggtgtacatccacggcggcagctacatggagggcaccggcaacctgtatgatggctctgtgctggccagctatggaaatgtcatcgtcatcaccgtgaactaccgcctgggcgtgctgggcttcctgagcactggagaccaggccgccaagggcaactacggcctgctggacctgatccaggccctgcgctggaccagtgaaaatattggcttcttcggcggggaccccctgcgcatcaccgtgtttggcagcggggccggcggcagctgtgtgaacctgctgaccctgagccactacagcgagggcaaccgctggagcaacagcaccaagggcctcttccagagggccatcgcccagagcggcacagccctgagctcctgggccgtgtccttccagcctgccaagtatgccaggatgctggccaccaaggtgggctgcaatgtgtctgacacagtggagctggtggagtgcctgcagaagaagccctacaaggagctggtggaccaggacatccagcctgcccgctaccacatcgccttcggccctgtgattgatggagatgtgatcccagatgacccccagatcctgatggagcagggcgagttcctgaactatgacatcatgctgggcgtgaaccagggcgagggcctgaagtttgtggagaacatcgtggacagtgatgatggcatcagcgccagtgactttgattttgctgtgagcaactttgtggacaacctgtatggctacccagagggcaaggatgtgctgcgggagaccatcaagttcatgtacacagactgggccgacagacacaaccctgagaccaggaggaagaccctgctggccctcttcacagaccaccagtgggtggccccagctgtggccacagctgacctgcacagcaactttggcagccccacctacttctacgccttctaccaccactgccagacagaccaggtgcctgcctgggcagatgctgcccatggagatgaggtgccctacgtgctgggcatccccatgattggccccacagagctgttcccctgcaacttcagcaagaatgatgtgatgctgtctgctgtggtgatgacctactggaccaactttgccaagacaggagaccccaaccagcctgtgccccaggacaccaagttcatccacaccaagcccaacagatttgaggaggtggcctggacccgctacagccagaaggaccagctgtacctgcacatcggcctgaagccccgggtgaaggagcactaccgggccaacaaggtgaacctgtggctggagctggtgccccacctgcacaacctgaatgacatcagccagtacaccagcaccaccaccaaggtgcccagcacagacatcaccttccggcccaccaggaagaacagcgtgcctgtgaccagcgccttccccacagccaagcaggatgaccccaagcagcagcccagccccttctctgtggaccagagggactacagcacagagctgtctgtgaccatcgctgtgggcgccagcctgctcttcctgaacatcctggcctttgctgccctgtactacaagaaggacaagagaagacatgatgtgcaccggcgctgcagcccccagaggaccaccaccaatgacctgacccacgcccaggaggaggagatcatgagcctgcagatgaagcacacagacctggaccatgaatgtgagagcatccacccccatgaggtggtgctgaggacagcctgccccccagactacaccctggccatgagaagaagcccagatgatgtgcccctgatgacccccaacaccatcaccatgatccccaacaccatccctggcatccagcccctgcacaccttcaacaccttcaccggcggccagaacaacaccctgccccacccccacccccacccccacagccacagcaccaccagggtgtag

SEQ ID NO: 183256 - DNA, 2472 bp, Artificial Sequence
  derived and/or modified sequence
atggccctgccccggtgcacctggcccaactacgtgtggcgggccgtcatggcatgcttggttcacagagggctcggtgcccccctgactctgtgtatgctgggatgtcttttgcaagcgggacacgtcttatcccagaagctggacgatgtcgatccactggttgctacaaattttggcaaaatccgaggcatcaaaaaggaactcaacaacgagattctggggccagtgattcagtttcttggagtcccctacgccgctccaccgactggagaaagaagattccagcctccagagcctccctccccttggagcgatatccgcaatgccacacagttcgcgccagtttgcccgcagaatatcatcgacgggcgcctccccgaggtcatgctgccggtgtggtttaccaacaacctcgatgtagtgagttcctatgttcaggaccaatcagaagattgtctgtacctgaatatctatgttcccactgaggatgatattagagactcaggaggacccaaaccagtgatggtgtacatccacggcgggtcatatatggagggaacggggaacctgtacgatggtagtgtcttggccagttacgggaatgttatcgtgatcaccgtcaactacagactgggtgtgttggggttcttgagcaccggggaccaggccgctaaaggtaattacgggctgttggaccttattcaggctctgcgttggacatccgaaaatatcggatttttcggtggtgacccccttcgaatcaccgtgttcgggtccggggcaggaggctcttgtgtcaacctccttacgttgtctcactattccgagggcaacaggtggtctaattcaaccaagggcctgttccaaagagcaatcgctcaatctggtacagcgctgtccagctgggctgtatcttttcagccagccaaatacgcgcgaatgctggcaacaaaggtcgggtgcaatgtgagcgatactgtcgagctcgtggagtgtttgcaaaaaaaaccttataaggagttagttgatcaggatattcaacctgctcggtaccatatcgcattcggaccagtgattgatggcgacgtcatccccgacgacccccagattcttatggaacagggtgaatttctgaactacgatattatgctcggcgtcaaccagggtgagggcttgaaattcgtcgagaatattgtggactccgacgatggaatttcagcgagcgattttgactttgccgtatccaattttgtcgataacctatacggctatcctgagggaaaagacgtgttgagggagactataaaattcatgtacaccgactgggcagatagacataatcctgaaacccgacgcaaaactctcctggcccttttcactgaccaccaatgggtagcccctgccgtggccaccgcagacttgcattctaattttgggtcaccaacgtacttctacgcattttatcaccattgccagacagatcaagtcccagcgtgggctgacgccgcacatggtgatgaggtgccttacgtgctgggaattcccatgatcggacccacagaattgttcccatgtaacttctccaagaacgacgtcatgctcagtgcagtggtgatgacatactggaccaactttgctaaaacgggtgacccaaatcagcccgttccccaggatacgaagttcattcacacaaagccaaatcggttcgaggaagttgcctggaccaggtattcccagaaagaccagctttacctgcacatcggtctcaagccacgcgtgaaagagcactacagggccaacaaagtgaatctctggctcgaactcgtcccgcatctgcacaatttaaacgacatcagtcaatataccagtacaaccaccaaggttccctctaccgatattacctttcggccaacgcgcaaaaatagcgtgccagtcactagcgcttttccaacggcaaagcaagatgaccctaaacagcaaccctcccctttttccgtggaccagcgggactatagcaccgaactttctgtcaccattgccgtgggcgctagtcttctcttcctcaatatccttgctttcgctgccttatattacaaaaaggacaaacgtagacacgacgtgcatagacggtgttcaccacaacggacgactaccaatgatctgacccatgcccaggaagaggagatcatgtcactgcagatgaaacacacagatctagatcatgagtgcgagtcaatccaccctcacgaggttgtccttagaacagcatgtcctcctgattatactttggcgatgaggaggtctcctgacgatgtacccctgatgactccgaacacaatcactatgatcccaaataccattcccggaatacagcctctgcatacctttaatacatttactggagggcagaacaacacattaccacacccacatcctcacccccactctcactccacgacaagagtgtag

SEQ ID NO: 183257 - DNA, 2472 bp, Artificial Sequence
  derived and/or modified sequence
atggccctgccccggtgcacctggcccaactacgtgtggcgggccgtgatggcgtgcctggtccatagaggtctgggggcaccattgaccctgtgtatgttgggatgtttacttcaggcgggccacgtgttatcacaaaaacttgatgacgtcgatcccctggtggcaacgaacttcgggaagattaggggtataaagaaagaattaaataacgaaattctcggtcctgtgatccagttcctgggggttccctacgccgctcctccaactggcgagcggcgatttcagccccccgaaccaccttccccctggtccgatatacgcaacgcaacgcagttcgcacccgtgtgcccacagaatattattgatggcagactgccagaggtgatgttacccgtgtggttcacgaacaacttggatgtggtgtcttcctacgtgcaggaccagagcgaggattgcctgtacctcaacatctatgtgcctacagaggacgatatcagggatagcggcggtccaaaacctgttatggtctatattcacggtggcagctacatggagggcaccggaaatctctatgacggaagtgtgcttgcctcctatggcaacgtgatagtaattaccgtgaattaccgccttggcgtcttaggattcctcagcacaggtgatcaagcggcaaagggtaactacgggctgttagatctaatccaagccctccgctggacaagtgaaaacattggattcttcggcggagacccactgagaataacagtctttggcagtggcgctggtggatcttgtgtgaacctactgacactgagccactacagtgagggaaacagatggagtaattccacgaaggggttgttccaaagggccatcgcccagagcgggaccgcactgtcttcttgggccgtgtcatttcaacccgctaagtacgctcgcatgcttgccaccaaagtcggttgcaacgtctccgataccgtggagctggttgagtgtctccagaaaaagccatacaaggagctcgtggatcaggacattcagccagctaggtaccacatagctttcggccccgttattgatggagatgtgattccagacgatccccagatcttaatggagcagggtgaattcctgaactatgatatcatgctaggcgtcaaccagggagaggggctcaagttcgttgagaacatagtggacagcgatgatggcatttctgcctcggattttgattttgcggtctcaaattttgtggataacttatatggttaccccgaaggcaaagacgtgttgcgcgagactatcaagttcatgtacaccgattgggcggacaggcataatccagagaccagacgcaagactctgctcgccttgtttactgatcaccaatgggttgcccccgcagtggccaccgccgatctgcatagcaacttcgggtcccccacctacttctacgctttctaccaccactgccagactgatcaagtgcccgcttgggcagacgccgcacatggagacgaggttccatacgtgttggggatccctatgattggtcctactgagctcttcccttgtaacttctcaaaaaacgatgtgatgttatccgccgtcgtcatgacttattggaccaatttcgcgaagacaggcgacccaaaccagccagtgccacaggacacaaagtttatacatactaagccgaaccgctttgaggaggtggcatggactaggtacagccagaaggatcagctgtatcttcatataggactgaagccacgagtgaaggagcactatcgcgctaacaaagtgaacctttggctggagctggtgccccacctgcacaatctgaatgacattagccagtacaccagcacaacgaccaaagtgccaagcacagacattacgtttaggccgaccagaaagaattctgttcccgtgaccagcgcatttccgacagccaagcaagatgaccccaaacagcagccaagccccttcagcgtggatcagcgggattacagcactgagctgagcgttacaatcgcagtcggggcgtccctgctgttcctgaacattttagcctttgccgcgctgtattacaagaaggataaacgaagacacgatgtgcacaggagatgcagtccacaaaggacaacgactaatgatctgacccatgcccaggaggaagaaatcatgagcctgcagatgaagcacacagatctcgaccacgaatgcgaaagcattcatccccacgaagtggtgcttcgaaccgcctgcccacccgattacaccttggcaatgcgcaggtctccggacgacgtcccactcatgacaccaaatacaattacaatgattcccaataccatccctggaattcagccattacacacttttaatacattcacagggggccagaacaatacgctaccccacccccacccgcacccgcacagtcatagtactacacgggtgtag

SEQ ID NO: 183258 - DNA, 2472 bp, Artificial Sequence
  derived and/or modified sequence
atggccctgccccggtgcacctggcccaactacgtgtggcgggccgtcatggcgtgcctggttcaccggggactgggtgctccactcactctttgcatgctgggctgtcttctccaagcaggacacgtgcttagccagaaactggacgatgtggacccactggtcgcaacgaatttcggaaaaataagaggaataaagaaagagttaaataacgagatactgggacctgtaattcaattcctgggtgtgccttacgccgcacctccaacaggggagcgccggttccagccaccggaacccccatctccttggagtgacatccggaatgctacacagttcgcccccgtgtgtccacaaaacattatcgacggacgcctgccagaggttatgttacctgtttggtttaccaacaacttagacgtggtttcctcctacgtgcaagaccagagtgaggattgtttgtacctcaacatttacgtgccaaccgaggatgacatcagagactctggggggccaaaaccagtgatggtgtacattcatggaggctcttatatggaagggaccgggaacctttatgacgggtccgtgttagccagttatgggaacgtgatagtcatcaccgtcaactaccggctcggtgtgctcggtttcctgtctactggtgatcaggccgcaaagggtaactatggtcttctcgaccttatacaggcactccggtggacatcggagaacattgggttcttcgggggcgaccctctgcgcataactgtgtttggttccggggcagggggatcctgtgtgaacttgctcacactgtcccattattcagagggcaatagatggtcaaattccacgaaaggattgttccaaagagccatcgcacagtctggaactgctctgtctagctgggctgtttcattccagccggccaaatacgctcgtatgctggcgactaaggttggatgcaatgttagcgatacagtggagctggtcgaatgcctgcagaagaaaccgtacaaagagctggtggaccaagatatacagccggctcgataccacatagccttcggccccgtgatcgacggagacgttatccctgacgacccccagatcctaatggaacagggggagtttttgaactatgatatcatgctaggagtcaatcagggcgagggcctgaaatttgtcgagaatattgtcgacagtgacgacggtatttctgcaagcgactttgattttgctgtgagtaactttgttgataatctctacggatacccggaagggaaggatgtactgcgagaaacgattaaatttatgtacacagactgggccgacagacataatccagaaacacggcgcaagacactgctggccctgtttaccgaccaccagtgggttgcaccagcagttgctacagccgatctccattcgaactttggctctccgacctacttttacgcattctaccatcactgtcagacagatcaagtgcccgcctgggctgacgccgcacacggagatgaggtgccttacgtcctcgggatcccaatgatagggcccaccgagttattcccatgtaatttctccaagaacgatgtcatgctgtctgcggtcgttatgacatattggaccaatttcgctaaaacaggcgatcccaaccagcctgtaccgcaggacaccaaattcatccacaccaagcccaaccggtttgaggaagtggcttggactcgttactcacaaaaggatcaactgtacttgcatatcggcttaaagcctcgggtaaaggaacattatcgggcaaacaaggtaaacctgtggttggagttggtcccacatctacacaacctaaacgatatatcccagtacacttccacgaccaccaaggtgccgagcaccgatataacattcaggccaaccagaaaaaatagcgttccagtgacttccgcatttccaaccgccaaacaggacgaccccaagcagcagccaagcccgttctccgtggatcagcgcgactactctacagaattgtccgtcacaatagcagtgggagcgtccctgctgttcctgaacatactggccttcgccgcactctattataagaaagacaaacgaaggcatgatgttcacagacggtgttctcctcagcgaaccactactaatgacctgacacacgcccaagaggaggagatcatgagcttgcagatgaagcacacagacctagatcacgagtgcgaatcgatccatccgcatgaagtggtgttgagaactgcgtgccctccagattatacactcgccatgcgacggagtcccgatgacgttcctctgatgacccctaatactattaccatgatccctaacactatccctggaatccagcctctgcatactttcaatacctttacaggaggccagaacaatacactgcctcacccacacccacaccctcactcacattcaacaacccgcgtttag

SEQ ID NO: 183259 - DNA, 5092 bp, Artificial Sequence
  derived and/or modified sequence
gaattcatttttgaggtcaatttccaatcgagataaatctattggattagtaggattatctgattgcagccgaaagaagtaacgttgtttgatcatttgtatttcttgcctgatggtcggatttacatggaggtggctttgggtccccaggattctggatcgtggttgcatctggagagaaaaaaggatcaatcgacacgttttagaagtgtccgtgggtgaataaaaaaggaggggggggtgcaaaactggggttgcggatgcttaaagcaaaaaaagagaaaaggaagcgtcttgaatcctggaacaagaattaccgggtgctcgagatttcaaaaaagcgtctagaaactggtaaatacttggaccatttcagcttgaatttgacggcgaagtgttgtagagaccgtctccttgaatcattgcaaagggaccggggaaagatgagggggctccctctgtggatttatcttgctgagggatatagacctgcagctaactggatttgatttataagagagaaatctgcagtcaatgcccactcttgccacactgctaatatggaaaacagaatgttcaataggatatggtctgataaatagtgatgattgaagatgctgctccaatacatgtgaaatcaatgggagatatctgctgtctgaagatctttcagagcttttctcgacaagctcccctgtaagaaatcggaggtatattctaccattatacagtctttctcaagtggatataaatacgtttgcctcactgtaaccagacaactagacaactaatgtgggaccatggcactgcccagatgcacgtggccaaattatgtttggagagcagtgatggcatgcttggtacaccggggattgggtgccccattgactctctgtatgttgggatgtttgcttcaggctggccatgtgctatcacaaaaattggatgatgtggacccactggtggctaccaactttggaaagataagagggattaagaaggaactcaataatgaaattttggggcctgttattcaatttcttggggttccatatgcagccccaccaacaggggaacgtcgttttcagcctccagaaccaccatctccctggtcagatatcagaaatgccactcaatttgctcctgtgtgtccccagaatatcattgatggcagattgccagaagtcatgcttcctgtgtggtttactaataacttggatgtggtttcatcatatgtgcaagaccagagcgaagactgcctatatttaaatatatatgtcccgactgaggatgatattcgggacagtgggggtcccaaaccagtgatggtgtatatccatggtggctcatatatggaaggtactggaaatttatatgatggaagtgtcttggcaagttatggcaatgtgatcgtcatcacagtcaactatcgacttggagtactcggtttcttgagtacaggcgatcaggctgcaaaggggaactatggactccttgatctcatacaagctttaagatggactagtgaaaacattggattctttggtggtgaccccttaagaatcactgtttttggatctggtgctgggggttcatgtgtcaacctgctgactttatcccattattctgaaggtaaccgttggagcaattcaaccaaaggactttttcaacgagcaatagctcaaagtggaacagccctttccagctgggctgttagttttcaacctgcaaaatatgctagaatgttggccacaaaagttggttgcaatgtttcagatacagtagagttagtggaatgcctacagaagaagccttacaaagaacttgttgaccaagatattcaaccagctcgataccacatagcctttggacctgtgattgatggtgatgtaataccagacgacccccagatattgatggagcaaggagagtttctcaactatgatataatgttaggagtgaaccaaggggaagggttaaaatttgttgaaaatatagtagatagcgatgatggtatatcagctagtgattttgactttgctgtttcaaattttgttgataatttatatggatatcctgaaggcaaagatgttttgagagaaaccattaagttcatgtatactgactgggctgaccgtcataaccctgaaaccagaagaaagacattactggctttgtttacggaccatcagtgggtggcaccagctgtagccacagcggatcttcactcaaactttggttcacctacgtacttctatgccttttaccatcattgccaaacagatcaggttccagcttgggctgatgcagcccacggagacgaggttccctatgtactgggaatccccatgattggccctacagagttatttccttgcaatttctccaaaaatgatgtgatgctgagtgcagttgtaatgacatactggacaaattttgctaaaactggtgacccaaatcaaccagtccctcaagacacgaaattcattcataccaaacccaaccgttttgaagaagtagcatggaccagatattcccagaaagaccaactttatctccatattggattaaaaccaagagttaaagaacattacagagccaataaggtgaacctctggttggagttggtacctcatctgcataatctcaatgacatttctcagtatacctctacaacaactaaagtgccatcaactgacatcactttcagacctacgagaaaaaattctgtacctgtcacgtcagcctttcccactgccaagcaggatgatcccaaacaacaaccaagtccattttcagtggatcaaagggactactcaacagagctgagtgtcactattgcagttggagcatcactgctgtttctgaacatcttggcctttgcagccctgtactacaaaaaggataagaggagacatgatgttcacaggagatgcagccctcagcgcactactaccaatgatctaacccatgcacaagaagaggaaatcatgtccctccaaatgaagcacactgatttggatcatgaatgtgagtccattcatccacatgaggtggttcttcggaccgcctgtcccccagattacacactagctatgaggaggtcacctgatgatgttcccttaatgacacccaacaccattacaatgattcccaacactataccagggattcagcccttacacacattcaatacatttactggaggacagaacaatactctgccccatccccatccccacccccattcacattcaacaaccagggtatagccagataagagaaacaaactattttttttgatggattgcagtaaacgatcactgaagattccttggctttcaacctacaagacttactatttaaataaggaggaatattatgtgaatatacatatcaagaactttgggggttttgaaaaaaatgaattgtatatatacaaatcaactttaaaaacaaatttcaattgcttgaagcaattgttctgaatgatactttttcattcacattcaagaattaattttttgaagatttaagttacataatggaattaggcatgtggaacaccaaacaggaaagaactatgtctgaaatataaaaaataaaaataaaaaaacaactatgaatatgcacaagggacacaccagtggaatgtcagataattttcaccagtttttatttggagccgttttattgtgtagaccatatttacatatttggataagtacacaaagcgtcaatgctgttaatggccttagcaaaggctcatgctgaaatttgccagtaaaacaaagaagtttaaagactggcaggtacaccattatcacataagtgctgtcagtataaagttgtggggataaaggaaactggatatttttagcacgatgtgcatgataatttatatgcttggtggctgtgctgctgattaagccgtaattaaaattcttctcatcccattggagtttttaatagaagcttcctccatcaattggcagaacctaaagaagattttaaggggcaaaagtaattacaataaaataattcacagtagtttcaatatagaaggaattagctattaaaggtatttgaagaaactataggtatagtggtgaatactcgctgatatgaatcccagaaaaaaatttcctgtttttaatgttcttttcaatcccatctagataatttatagaaatataaccctaattggacatgtggtacaggatctataagttgctgtgtttttttgttactctgtattttgttccttttggtaaggtgaagtgtgtccaaagagttacttgcaacagtctttcatgatatgaggatgcccccgtattaccactctgattatagttctgagttctttgatttactcatgctgcatgacaaaatgtttactaataacaattcattataaagttatatccctctttacatcacttatctttctcactgaggttcattcactggaatttactcacgcaatctcagtagagtacaacgtagatacagaacctaggagagtcaacatctggaggattttagtctttcttacacatatgtgtgattttaaacgaatattctcagaccacaggaaactcttcatccccctgttgtttaccagtaacagtatatcacagacctttccaaatgtttgtatatgtaatcagatgtacatttatattgaaaaacaaatgagatggacttaaagagcacatcctgataaatactttctctctcacctgtactatatttctattagactaaagttatgtgattttttttttacattttttcagatgactagcaattttgatagtttataagataatgcaaagaactttctctgacaaactaactgcagtaacagaaacctttcttttcagttactctttttcaagaatgaaagattattatacaaaaaattgtatactacttgatggaaccaactttgtacatcttggccatgtcactggtcattgtgtgaaataaagataatctggataatgactattagtccaatgctaagaaacatgatctttgctcattaaagagctaaaatgtttattgctgttttgtctttcttttttct

SEQ ID NO: 183260 - DNA, 8242 bp, Artificial Sequence
  derived and/or modified sequence
cgttctccaccgactcctgcccgcctcaacacaatgccttacctgtgaagcttgaggccactcaagttccaaatttgtgacaaatcccccagggctcactggagtggcagatatagacctgcagctaactggatttgatttataagagagaaatctgcagtcaatgcccactcttgccacactgctaatatggaaaacagaatgttcaataggatatggtctgataaatagtgatgattgaagatgctgctccaatacatgtgaaatcaatgggagatatctgctgtctgaagatctttcagagcttttctcgacaagctcccctgtaagaaatcggaggtatattctaccattatacagtctttctcaagtggatataaatacgtttgcctcactgtaaccagacaactagacaactaatgtgggaccatggcactgcccagatgcacgtggccaaattatgtttggagagcagtgatggcatgcttggtacaccggggattgggtgccccattgactctctgtatgttgggatgtttgcttcaggctggccatgtgctatcacaaaaattggatgatgtggacccactggtggctaccaactttggaaagataagagggattaagaaggaactcaataatgaaattttggggcctgttattcaatttcttggggttccatatgcagccccaccaacaggggaacgtcgttttcagcctccagaaccaccatctccctggtcagatatcagaaatgccactcaatttgctcctgtgtgtccccagaatatcattgatggcagattgccagaagtcatgcttcctgtgtggtttactaataacttggatgtggtttcatcatatgtgcaagaccagagcgaagactgcctatatttaaatatatatgtcccgactgaggatgatattcgggacagtgggggtcccaaaccagtgatggtgtatatccatggtggctcatatatggaaggtactggaaatttatatgatggaagtgtcttggcaagttatggcaatgtgatcgtcatcacagtcaactatcgacttggagtactcggtttcttgagtacaggcgatcaggctgcaaaggggaactatggactccttgatctcatacaagctttaagatggactagtgaaaacattggattctttggtggtgaccccttaagaatcactgtttttggatctggtgctgggggttcatgtgtcaacctgctgactttatcccattattctgaaggtaaccgttggagcaattcaaccaaaggactttttcaacgagcaatagctcaaagtggaacagccctttccagctgggctgttagttttcaacctgcaaaatatgctagaatgttggccacaaaagttggttgcaatgtttcagatacagtagagttagtggaatgcctacagaagaagccttacaaagaacttgttgaccaagatattcaaccagctcgataccacatagcctttggacctgtgattgatggtgatgtaataccagacgacccccagatattgatggagcaaggagagtttctcaactatgatataatgttaggagtgaaccaaggggaagggttaaaatttgttgaaaatatagtagatagcgatgatggtatatcagctagtgattttgactttgctgtttcaaattttgttgataatttatatggatatcctgaaggcaaagatgttttgagagaaaccattaagttcatgtatactgactgggctgaccgtcataaccctgaaaccagaagaaagacattactggctttgtttacggaccatcagtgggtggcaccagctgtagccacagcggatcttcactcaaactttggttcacctacgtacttctatgccttttaccatcattgccaaacagatcaggttccagcttgggctgatgcagcccacggagacgaggttccctatgtactgggaatccccatgattggccctacagagttatttccttgcaatttctccaaaaatgatgtgatgctgagtgcagttgtaatgacatactggacaaattttgctaaaactggtgacccaaatcaaccagtccctcaagacacgaaattcattcataccaaacccaaccgttttgaagaagtagcatggaccagatattcccagaaagaccaactttatctccatattggattaaaaccaagagttaaagaacattacagagccaataaggtgaacctctggttggagttggtacctcatctgcataatctcaatgacatttctcagtatacctctacaacaactaaagtgccatcaactgacatcactttcagacctacgagaaaaaattctgtacctgtcacgtcagcctttcccactgccaagcaggatgatcccaaacaacaaccaagtccattttcagtggatcaaagggactactcaacagagctgagtgtcactattgcagttggagcatcactgctgtttctgaacatcttggcctttgcagccctgtactacaaaaaggataagaggagacatgatgttcacaggagatgcagccctcagcgcactactaccaatgatctaacccatgcacaagaagaggaaatcatgtccctccaaatgaagcacactgatttggatcatgaatgtgagtccattcatccacatgaggtggttcttcggaccgcctgtcccccagattacacactagctatgaggaggtcacctgatgatgttcccttaatgacacccaacaccattacaatgattcccaacactataccagggattcagcccttacacacattcaatacatttactggaggacagaacaatactctgccccatccccatccccacccccattcacattcaacaaccagggtatagccagataagagaaacaaactattttttttgatggattgcagtaaacgatcactgaagattccttggctttcaacctacaagacttactatttaaataaggaggaatattatgtgaatatacatatcaagaactttgggggttttgaaaaaaatgaattgtatatatacaaatcaactttaaaaacaaatttcaattgcttgaagcaattgttctgaatgatactttttcattcacattcaagaattaattttttgaagatttaagttacataatggaattaggcatgtggaacaccaaacaggaaagaactatgtctgaaatataaaaaataaaaataaaaaaacaactatgaatatgcacaagggacacaccagtggaatgtcagataattttcaccagtttttatttggagccgttttattgtgtagaccatatttacatatttggataagtacacaaagcgtcaatgctgttaatggccttagcaaaggctcatgctgaaatttgccagtaaaacaaagaagtttaaagactggcaggtacaccattatcacataagtgctgtcagtataaagttgtggggataaaggaaactggatatttttagcacgatgtgcatgataatttatatgcttggtggctgtgctgctgattaagccgtaattaaaattcttctcatcccattggagtttttaatagaagcttcctccatcaattggcagaacctaaagaagattttaaggggcaaaagtaattacaataaaataattcacagtagtttcaatatagaaggaattagctattaaaggtatttgaagaaactataggtatagtggtgaatactcgctgatatgaatcccagaaaaaaatttcctgtttttaatgttcttttcaatcccatctagataatttatagaaatataaccctaattggacatgtggtacaggatctataagttgctgtgtttttttgttactctgtattttgttccttttggtaaggtgaagtgtgtccaaagagttacttgcaacagtctttcatgatatgaggatgcccccgtattaccactctgattatagttctgagttctttgatttactcatgctgcatgacaaaatgtttactaataacaattcattataaagttatatccctctttacatcacttatctttctcactgaggttcattcactggaatttactcacgcaatctcagtagagtacaacgtagatacagaacctaggagagtcaacatctggaggattttagtctttcttacacatatgtgtgattttaaacgaatattctcagaccacaggaaactcttcatccccctgttgtttaccagtaacagtatatcacagacctttccaaatgtttgtatatgtaatcagatgtacatttatattgaaaaacaaatgagatggacttaaagagcacatcctgataaatactttctctctcacctgtactatatttctattagactaaagttatgtgattttttttttacattttttcagatgactagcaattttgatagtttataagataatgcaaagaactttctctgacaaactaactgcagtaacagaaacctttcttttcagttactctttttcaagaatgaaagattattatacaaaaaattgtatactacttgatggaaccaactttgtacatcttggccatgtcactggtcattgtgtgaaataaagataatctggataatgactattagtccaatgctaagaaacatgatctttgctcattaaagagctaaaatgtttattgctgttttgtctttcttttttctaaaaaaagaaaaaaaagaaaaaaaggaaaagaagaacaaagaaacatgactgtctcaaagagtaatttttctagattagaccagtcaggtttttgaagacatataggtaacttccacagaaaacacaaacatgtatttaaaggcaagtctcatctaagatgaaactcataaaaattatttaatgtttgttatgaatttaaaagctccagaaatccatgaaaaaaagaaagattagctttgtgttgttaaatatctcttaggtacagatgttgtagaaataaagtgccaattgttttcagttagttagaaaaacaagttccaattctagtcatcaaggaaaaggtctattgaaaagaaatttgcaatatttcatggaatacaaataactaggttcataaaatgggggtgattaaactaccataaagtaatgaatagaaagttgccatgctaagagaatgtaaaagtgctgagcaagatattaaactgacactaaaagataaaaatctatttcaaggaatttatgtgattataatcccccctcccaattattatctatcaaagaaatgtaggtattcctccataattaaaaaaaagtctctgttagaagcaaaagtcttcaaaatccagagtgatctacatacagcttttgactgaggtggttatgcttttcaactgtgaactgccagtgtacacaaatacaaataattgtttagcatctgaagtattgttcaattggaacactgtattttactgtattaattaaacaaaacacaagaacagaatagaaatgacaacaaaataagatatgaatgaatactttcatatgcattgcttcatttggcaaaaccaaacattctattaaatagtatgttttaacgatggccatatttatatcatctacctaccaatctattgctctgcatttatcaatctgcctatatatagcataactgtcaccctctttatattaatttaggaaaatgattgaggaaaacaaagcatagccctattaattattttctctaaattagggtagaataactttatggaagataaagcagcctaggtttaattgttgttcaccagtcacgtgataaagtcattgtgaatgagtgttagttgctagttttataattgcagtctctagtttctgaatgaaaaaggatgccccacattatacagaacattaagaactgtttttaaagctgaaacataatctttatatgcaagaaaaataaatactgttactcaattttagcaaatatgtttaaaatgtatttatttagataattttctttgaaaaacaatgtaagtaacaaaattaaaataatatttttggcattatttgttaattcagattttcctgcctccgattaaaaattaggcaaagctgcttataatttatacaaagattacactaaaatgaactttatttcattgttttgctgttatataaaatttttaccaaatgtttaccaagagattaatgttttagagtatgaggatagaaaaataaaagtgacagatttcatagttttaaatctctactgaacatgttgactatgaacaaaatctaattggctaccacagatatataacaaagtttattactaactttatgcaaattggaaaataatttgctaaagcattaaaaatgtcagatttgtagacgtcttgctggcaactcaaagcagaaaatctgagtatatattattttattcctcatttcaaatataaaagttgaccaaagtgatgctttatttccgacttcctgatctgtatgtgaaaacagcaacatttttttaaaaattatcaagtatatataatattaaaaagaggaaaacagatggcactaattttcttacaggagtgaagtgctgaaactaaattgttacatctgtaacaacagttatttcacctcttgccacactcatcctgacatacgtattaatatcaaaaaatgatacaaagaatatgagaaatgtgttccagcattaaagacactactacatagaaattactgggattcttttctttggcgagtttcactgaaatagtttcacaggatgaaatgatgaattgaattcttaagaagctgtcaaatatggcagtcttttgatgttagtaattttgttttcttctgtgttattggttcaaagtactggccttttccttcatttccagtaattagttgttatagactatcactttttaatgtgagtggaaattagatgatttggttatacttgtgaaaacatgcttccaaataaattcaattaatgggcacttccctgctgagattttgttatcattcatttgattatcttgtcaagctttactgttacgacaaatgttttagctttctggtcaatagactaagggaatttctccagtagccttatacctctcctgcacttgatctgatagcaacatacacttcaaatttccatcagaagtctctaaagaaatttcctactgctatgaaacatttggtggccaacttgattctttttcataagcattctgatttgattttattctggcacgttgctgtatttggatgcaggccagaaatcaattccatttgataagggttgtggagaatacagactggaataaccgtgtgcagggcttaagtgccttttcctcctgagattttatttataaaacttagcttttttaaattttcagattcagataattcaatttaaagagtacaataggatgactatattataaattaccaataaagaaagtttatttggacatttttacatttaatttgatttttaaaataatatcagatgcatctaaatggcttccgggaaagactgaggtaaatttttgaaagtgacaattatataggcatctgacttgatggtacttaagaataaaaatttaaatctctagcaaactttaaaaattgtccaaatagtaagtttaatttgaaagaagtctgaagctattagagaaaatcatgtactagataggtatatatttttttctagtcagctattacgtacaccacataatatatataccctatatactatatggtttatataacatttataatggccctttcagacccatatacttacaaatgacattgtataactacctacatatgtattaatgtgacagaatttagtcctttatggaaagtcaaaccaaattgctagcagttttgagttgaaatgaatgataacaattaaagcttttaagaaattggtaaaggtaccgtaacaaaaactcagcagataaatttaaaagagagggaccatttttgaatgccattttcagagttgacatctaaactagatggtgtgtttaaaaggattttagtggttttgattcatcctttctctgcattcatatcatttagcaaattaatgggacatatgtcatggtttttgtaaaaaagaccattgggttgtcatgattcagtttgtgtttggacatctatggctttcattaaaaacgtgtttattatcatgaataaatattaccatgttttccaa

SEQ ID NO: 183261 - DNA, 2719 bp, Artificial Sequence
  derived and/or modified sequence
atggcactgcccagatgcacgtggccaaattatgtttggagagcagtgatggcatgcttggtacaccggggattgggtgccccattgactctctgtatgttgggatgtttgcttcaggctggccatgtgctatcacaaaaattggatgatgtggacccactggtggctaccaactttggaaagataagagggattaagaaggaactcaataatgaaattttggggcctgttattcaatttcttggggttccatatgcagccccaccaacaggggaacgtcgttttcagcctccagaaccaccatctccctggtcagatatcagaaatgccactcaatttgctcctgtgtgtccccagaatatcattgatggcagattgccagaagtcatgcttcctgtgtggtttactaataacttggatgtggtttcatcatatgtgcaagaccagagcgaagactgcctatatttaaatatatatgtcccgactgaggatgatattcgggacagtgggggtcccaaaccagtgatggtgtatatccatggtggctcatatatggaaggtactggaaatttatatgatggaagtgtcttggcaagttatggcaatgtgatcgtcatcacagtcaactatcgacttggagtactcggtttcttgagtacaggcgatcaggctgcaaaggggaactatggactccttgatctcatacaagctttaagatggactagtgaaaacattggattctttggtggtgaccccttaagaatcactgtttttggatctggtgctgggggttcatgtgtcaacctgctgactttatcccattattctgaaggtaaccgttggagcaattcaaccaaaggactttttcaacgagcaatagctcaaagtggaacagccctttccagctgggctgttagttttcaacctgcaaaatatgctagaatgttggccacaaaagttggttgcaatgtttcagatacagtagagttagtggaatgcctacagaagaagccttacaaagaacttgttgaccaagatattcaaccagctcgataccacatagcctttggacctgtgattgatggtgatgtaataccagacgacccccagatattgatggagcaaggagagtttctcaactatgatataatgttaggagtgaaccaaggggaagggttaaaatttgttgaaaatatagtagatagcgatgatggtatatcagctagtgattttgactttgctgtttcaaattttgttgataatttatatggatatcctgaaggcaaagatgttttgagagaaaccattaagttcatgtatactgactgggctgaccgtcataaccctgaaaccagaagaaagacattactggctttgtttacggaccatcagtgggtggcaccagctgtagccacagcggatcttcactcaaactttggttcacctacgtacttctatgccttttaccatcattgccaaacagatcaggttccagcttgggctgatgcagcccacggagacgaggttccctatgtactgggaatccccatgattggccctacagagttatttccttgcaatttctccaaaaatgatgtgatgctgagtgcagttgtaatgacatactggacaaattttgctaaaactggtgacccaaatcaaccagtccctcaagacacgaaattcattcataccaaacccaaccgttttgaagaagtagcatggaccagatattcccagaaagaccaactttatctccatattggattaaaaccaagagttaaagaacattacagagccaataaggtgaacctctggttggagttggtacctcatctgcataatctcaatgacatttctcagtatacctctacaacaactaaagtgccatcaactgacatcactttcagacctacgagaaaaaattctgtacctgtcacgtcagcctttcccactgccaagcaggatgatcccaaacaacaaccaagtccattttcagtggatcaaagggactactcaacagagctgagtgtcactattgcagttggagcatcactgctgtttctgaacatcttggcctttgcagccctgtactacaaaaaggataagaggagacatgatgttcacaggagatgcagccctcagcgcactactaccaatgatctaacccatgcacaagaagaggaaatcatgtccctccaaatgaagcacactgatttggatcatgaatgtgagtccattcatccacatgaggtggttcttcggaccgcctgtcccccagattacacactagctatgaggaggtcacctgatgatgttcccttaatgacacccaacaccattacaatgattcccaacactataccagggattcagcccttacacacattcaatacatttactggaggacagaacaatactctgccccatccccatccccacccccattcacattcaacaaccagggtatagccagataagagaaacaaactattttttttgatggattgcagtaaacgatcactgaagattccttggctttcaacctacaagacttactatttaaataagaccaactttgtacatcttggccatgtcactggtcattgtgtgaaataaagataatctggataatgactattagtccaatgctaagaaacatgatctttgctcattaaagagctaaaatgtttattgctgttttgtctttcttttttct

SEQ ID NO: 183262 - DNA, 2472 bp, Artificial Sequence
  derived and/or modified sequence
atggcactgccacgttgcacctggccaaactacgtttggcgagccgttatggcttgcctggtgcaccgagggctaggtgccccattaactttgtgcatgttgggctgcctgctccaagctgggcatgttctgtcgcaaaaactcgacgatgtagaccctctggtggctaccaactttgggaagattcgcggtataaagaaggaactgaacaacgaaatcctcggaccagttattcaattcctgggcgtgccatatgcagctccccctacaggagagagaagattccagccacctgaaccacccagtccctggagcgacattaggaatgccactcagttcgctcccgtctgtcctcagaacatcatagacggacggctccccgaagtgatgctgcccgtctggttcaccaacaatctggatgtcgtaagctcttatgtgcaggatcagtcagaggattgcctgtacctgaacatctacgtcccaactgaggacgacatcagggatagtgggggtccgaagccagtgatggtttacattcatggtggctcatacatggagggcacgggcaatctgtatgatgggtcagtgctcgcttcttacgggaacgtaattgtaattaccgtcaactaccggctaggtgtgctggggtttctcagtacgggtgaccaagcggcaaaaggaaactatggactgctggacctgattcaggccctgagatggaccagtgaaaatatcggattttttgggggagatcctttgagaattaccgttttcggaagcggagcagggggatcatgcgtaaatttattgacgctgtctcactactccgagggaaatagatggtctaatagcaccaaaggtctgtttcagcgggctattgcgcagtcgggtactgctctatcctcctgggctgtgtcattccagccagcaaagtacgccaggatgctcgctacaaaggttggatgtaacgtgagcgacacggttgaactggttgaatgcctccagaagaaaccttataaagagctcgttgaccaagacattcagccggctagataccacatagcttttgggccagtgattgacggagatgtgatccctgatgatccccaaatcctcatggagcagggggaattcctaaattacgatataatgcttggggtcaaccaaggcgaagggcttaagtttgttgagaacatcgtggattcagatgacgggatctccgcatccgactttgacttcgccgtaagcaattttgtggacaatttatacggttatcccgaaggaaaagatgtcctacgagaaaccattaagtttatgtacacagattgggccgatagacacaatcctgagactaggcgcaagacactgctggcactgtttactgaccaccagtgggtcgcacccgctgtggctaccgccgatctgcacagcaattttggctctccaacctacttctatgccttctatcatcactgtcagaccgatcaggtaccagcatgggccgacgctgcacacggtgacgaagtaccatatgtgctgggaatacccatgattgggccaaccgagttgtttccctgtaacttttctaagaacgatgtcatgctgtcagccgtggtgatgacatattggaccaactttgcaaaaactggggatcccaaccagccggttccccaggacactaagttcatccacacaaagccaaacaggtttgaggaggtggcttggacaagatattcccaaaaggaccagctgtacctgcacattggcttaaaaccacgcgtaaaagagcattacagagcaaacaaggtcaatctttggctcgagttggtcccccacctgcataacctgaacgatatctctcagtatacttcaactacaactaaggttccgtccaccgatatcaccttcagacccactcgaaaaaacagtgttccagtgacaagtgctttcccaactgcgaaacaagatgacccaaaacagcaaccaagccctttttccgtggatcagagagattacagcacagagcttagcgtcaccatagctgtcggcgcatcactgctgtttctaaatatactcgcattcgccgctttatattacaagaaggacaagaggcgccatgacgtccatcgaaggtgctccccccaacggactacaaccaacgatctgacccacgcacaagaggaggagataatgagtctccagatgaagcataccgatttggaccacgaatgtgagtcaattcatcctcatgaggtggtcctgcgcaccgcatgcccccctgattataccctcgccatgcgcaggagcccagacgacgtgccattgatgacccctaataccatcacaatgattcctaacaccatcccaggaatccagccattgcacacctttaacacttttacagggggacaaaacaacacactgccccatccacatcctcacccgcactcccactctaccacccgggtgtag

SEQ ID NO: 183263 - DNA, 2472 bp, Artificial Sequence
  derived and/or modified sequence
atggcactccctcgttgcacgtggcccaactacgtgtggcgggctgtgatggcgtgcctggtgcataggggccttggcgctccgctaactttgtgcatgctcggatgcctcctgcaggcgggtcacgtccttagccagaagctagatgacgtggatcctcttgtagctacaaatttcggtaaaatcaggggcattaagaaggagcttaacaacgagattctggggccagttatccagtttctgggagtgccatatgcagctccccctacaggtgagcgtagatttcaacccccagaacctcccagcccatggtctgatattcggaacgccacccagtttgcgccagtctgtccccaaaatatcatcgatggcaggctccctgaggtcatgctaccagtgtggttcaccaacaatctggatgtcgtgagtagttatgtgcaggaccagtctgaggactgcctttacctcaacatctatgtgcccaccgaggatgacatccgcgatagtggtgggccaaaacccgtgatggtgtatatccatgggggttcctacatggaaggaacagggaatctttatgatggcagtgtgctggcatcttacggaaacgttattgtgattacagttaattaccggctgggcgttctcggcttcctcagtacaggcgaccaagccgcaaaaggtaattacggccttcttgacctcatacaagcactccgatggactagcgagaatatcggcttttttggcggagatccactccggatcaccgtgtttggatcaggcgctggaggatcctgcgtgaacctgctcacactgtctcattatagcgaaggaaacagatggtcaaacagtacaaaaggattgtttcagcgcgctatagcacagtctggcacagctttgtcttcctgggccgtgtccttccaacctgccaaatacgctcggatgttagcaactaaggtgggctgtaatgtcagcgatacagtggagctggttgagtgtttgcagaagaaaccctataaggagctcgttgatcaggacatccagcctgcaaggtatcatatagcctttggccctgtaatcgacggggacgtcatccccgacgaccctcagatactcatggagcaaggagaattccttaattacgatattatgttaggcgtcaaccagggcgagggacttaaatttgtggagaacattgtggactccgatgacgggatcagtgctagcgattttgacttcgctgtgtcaaactttgtcgataacctctatggatatcccgaaggcaaggatgttctgcgggagactatcaaattcatgtacaccgattgggccgatcggcataatccggaaacccggaggaaaactcttctggccctttttacagaccaccagtgggtcgctcctgcggtagcaaccgctgatctccactctaattttggtagccccacctatttttacgccttctatcatcactgtcagactgaccaggtgcccgcttgggcggatgccgctcatggagatgaagtgccatacgtcttgggaattcccatgatagggccaaccgagctattcccatgtaacttctctaagaatgacgtaatgctatcagccgttgtgatgacatattggacaaatttcgcaaaaacgggggatccaaatcagcctgtgcctcaggatactaagttcatccacacaaagcccaaccgatttgaagaagtggcttggacccgctactcccagaaggatcagttgtatctgcatatcgggttgaaaccacgggtgaaggagcactaccgggctaataaggtcaatttgtggctcgagcttgtgcctcatctgcacaaccttaacgatatcagtcagtacacctcaaccaccaccaaggtgcccagtacggacattacattccgccctaccagaaagaactccgtccccgtcacttccgcctttcctacagcaaagcaggatgacccaaagcagcagccctcacccttctctgttgaccagagagattattctaccgaactgagtgtgaccatcgccgtgggagcgtcgcttctgtttctcaatatcctcgcctttgccgctctgtactataagaaggataaacggagacatgatgtccatcggaggtgttctcctcaaagaactacaactaacgacttaacacatgcccaggaggaagagattatgagtttgcagatgaagcacactgatctggatcacgagtgcgagtctattcacccccacgaagtggtcctacgaaccgcatgcccaccggactatacactggcaatgcggagaagtccggacgacgtcccgcttatgacccccaacaccatcacgatgatacctaacacaatccctgggattcagccactccacaccttcaacacgttcacaggagggcaaaacaataccctgccccatccgcacccccaccctcactcccattcgactacaagggtgtag

SEQ ID NO: 183264 - DNA, 2472 bp, Artificial Sequence
  derived and/or modified sequence
atggccctgcccaggtgtacctggcccaactacgtctggcgggcagttatggcttgcctagtgcatagaggtctgggtgcccctctcactttgtgcatgctggggtgcctgctccaagccggacacgtactgtctcagaagctcgatgatgttgatcccctcgtagccaccaacttcggcaagatccgcggtatcaaaaaggagctgaacaatgagattctgggacctgttattcagttcctgggcgtcccctacgctgctcccccaacgggagagagaagattccagccaccagagcccccaagcccctggtcagatatccgtaacgccacccagttcgcgcctgtctgtccccagaacatcattgacggccgactccccgaggttatgttgcctgtctggttcaccaataacctggacgtggtcagcagctatgtgcaggatcaaagtgaggattgtctgtatcttaacatctatgtgcctaccgaggacgacatccgagactcaggagggcctaaaccggtcatggtgtacattcatggtggatcatacatggaaggtactggcaacctttacgacggttctgttctcgcatcttatggtaatgtcatagttatcaccgtgaactatcgcctgggggtgctgggattcctgtcaacaggggatcaggctgccaagggcaactacgggctactcgacctcattcaagcattgcgatggacatccgaaaacattggattcttcgggggagatcctcttcgtataaccgtgtttggctcgggggctggagggtcatgcgttaatctactgactttgtctcactattctgaaggcaaccggtggagcaatagcactaaaggactttttcagcgagccattgcccagagcggaacagctctgtcctcatgggctgttagctttcaaccagccaagtacgccaggatgctggcgacaaaggttgggtgtaatgtgtccgacaccgtcgaactagttgagtgtctgcagaagaaaccctataaggaattggtggatcaggacattcagcccgcaagatatcatatcgcttttggccctgtgattgacggggatgttatccctgacgatcctcaaatcctgatggaacagggggagtttcttaactatgacatcatgctgggagtcaatcagggcgagggcctcaagtttgtagaaaatatcgttgactccgacgatggaatcagtgcctctgactttgatttcgcagtcagtaatttcgtggacaacctatacggctaccccgaaggcaaggatgtgctgagggagactatcaaatttatgtacacggattgggcagacagacacaatcctgagacgcgtcgcaagaccttattggctctttttacagaccatcaatgggtggccccagccgtcgcgacagccgacctccactctaatttcggatcccccacctacttctatgctttttatcaccattgccagacagatcaagtgcccgcttgggctgatgccgctcatggtgatgaagttccatacgtactgggcatacctatgatcgggccaacagagcttttcccgtgcaacttcagtaaaaatgacgtgatgctgtctgcggtggtcatgacctactggaccaattttgccaagaccggcgaccccaatcagcctgtacctcaggacactaaatttatccatactaaacctaatcgtttcgaagaggtcgcatggaccaggtactctcagaaggaccagctgtacctgcacatcggattaaaaccgagggtgaaagagcactatcgcgctaacaaagttaatctctggctcgagctggtacctcatctccacaatctcaatgatatatcccagtacacatcaactaccactaaagtcccatctaccgatatcacctttagaccaactcgaaaaaactccgttcctgtgacaagtgcatttccaacggctaagcaagatgatcctaagcagcagccttctccattcagcgtggaccaaagagactattccacagagctaagcgttaccatcgccgtgggcgcatctctgctctttctgaacatcctggcctttgccgctctctactacaaaaaagacaaacggagacatgatgtccaccggagatgcagtccacagcgcaccactactaacgacctgacacatgcgcaggaagaagagataatgagtctccagatgaaacacacggacctggaccatgaatgtgaaagcattcacccacacgaagtggttctgaggactgcctgccccccagattacactctggccatgagacgttctcctgacgacgtgcctctaatgacaccaaatacgattaccatgatccctaataccattccaggaattcaaccactacatactttcaacacctttactgggggtcaaaacaacaccctgccacaccctcatccccatccccacagccactctacaacccgagtgtag

SEQ ID NO: 183265 - DNA, 2472 bp, Artificial Sequence
  derived and/or modified sequence
atggccctgcccagatgcacctggcccaactacgtgtggagagccgtgatggcctgcctggtgcacagaggcctgggcgcccccctgaccctgtgcatgctgggctgcctgctgcaggccggccacgtgctgagccagaagctggacgacgtggaccccctggtggccaccaacttcggcaagatcagaggcatcaagaaggagctgaacaacgagatcctgggccccgtgatccagttcctgggcgtgccctacgccgccccccccaccggcgagagaagattccagccccccgagccccccagcccctggagcgacatcagaaacgccacccagttcgcccccgtgtgcccccagaacatcatcgacggcagactgcccgaggtgatgctgcccgtgtggttcaccaacaacctggacgtggtgagcagctacgtgcaggaccagagcgaggactgcctgtacctgaacatctacgtgcccaccgaggacgacatcagagacagcggcggccccaagcccgtgatggtgtacatccacggcggcagctacatggagggcaccggcaacctgtacgacggcagcgtgctggccagctacggcaacgtgatcgtgatcaccgtgaactacagactgggcgtgctgggcttcctgagcaccggcgaccaggccgccaagggcaactacggcctgctggacctgatccaggccctgagatggaccagcgagaacatcggcttcttcggcggcgaccccctgagaatcaccgtgttcggcagcggcgccggcggcagctgcgtgaacctgctgaccctgagccactacagcgagggcaacagatggagcaacagcaccaagggcctgttccagagagccatcgcccagagcggcaccgccctgagcagctgggccgtgagcttccagcccgccaagtacgccagaatgctggccaccaaggtgggctgcaacgtgagcgacaccgtggagctggtggagtgcctgcagaagaagccctacaaggagctggtggaccaggacatccagcccgccagataccacatcgccttcggccccgtgatcgacggcgacgtgatccccgacgacccccagatcctgatggagcagggcgagttcctgaactacgacatcatgctgggcgtgaaccagggcgagggcctgaagttcgtggagaacatcgtggacagcgacgacggcatcagcgccagcgacttcgacttcgccgtgagcaacttcgtggacaacctgtacggctaccccgagggcaaggacgtgctgagagagaccatcaagttcatgtacaccgactgggccgacagacacaaccccgagaccagaagaaagaccctgctggccctgttcaccgaccaccagtgggtggcccccgccgtggccaccgccgacctgcacagcaacttcggcagccccacctacttctacgccttctaccaccactgccagaccgaccaggtgcccgcctgggccgacgccgcccacggcgacgaggtgccctacgtgctgggcatccccatgatcggccccaccgagctgttcccctgcaacttcagcaagaacgacgtgatgctgagcgccgtggtgatgacctactggaccaacttcgccaagaccggcgaccccaaccagcccgtgccccaggacaccaagttcatccacaccaagcccaacagattcgaggaggtggcctggaccagatacagccagaaggaccagctgtacctgcacatcggcctgaagcccagagtgaaggagcactacagagccaacaaggtgaacctgtggctggagctggtgccccacctgcacaacctgaacgacatcagccagtacaccagcaccaccaccaaggtgcccagcaccgacatcaccttcagacccaccagaaagaacagcgtgcccgtgaccagcgccttccccaccgccaagcaggacgaccccaagcagcagcccagccccttcagcgtggaccagagagactacagcaccgagctgagcgtgaccatcgccgtgggcgccagcctgctgttcctgaacatcctggccttcgccgccctgtactacaagaaggacaagagaagacacgacgtgcacagaagatgcagcccccagagaaccaccaccaacgacctgacccacgcccaggaggaggagatcatgagcctgcagatgaagcacaccgacctggaccacgagtgcgagagcatccacccccacgaggtggtgctgagaaccgcctgcccccccgactacaccctggccatgagaagaagccccgacgacgtgcccctgatgacccccaacaccatcaccatgatccccaacaccatccccggcatccagcccctgcacaccttcaacaccttcaccggcggccagaacaacaccctgccccacccccacccccacccccacagccacagcaccaccagagtgtag

SEQ ID NO: 183266 - protein, 848 aa, Artificial Sequence
  derived and/or modified sequence
MQAEAADWFSSMPFQKHVYYPLASGPEGPDVAVAAAAAGAASMACAPPSAASGPLPFFQFRPRLESVDWRRLSAIDVDKVAGAVDVLTLQENIMNITFCKLEDEKCPHCQSGVDPVLLKLIRLAQFTIEYLLHSQEFLTSQLHTLEERLRLSHCDGEQSKKLLTKQAGEIKTLKEECKRRKKMISTQQLMIEAKANYYQCHFCDKAFMNQAFLQSHIQRRHTEENSHFEYQKNAQIEKLRSEIVVLKEELQLTRSELEAAHHASAVRFSKEYEMQKTKEEDFLKLFDRWKEEEKEKLVDEMEKVKEMFMKEFKELTSKNSALEYQLSEIQKSNMQIKSNIGTLKDAHEFKEDRSPYPQDFHNVMQLLDSQESKWTARVQAIHQEHKKEKGRLLSHIEKLRTSMIDDLNASNVFYKKRIEELGQRLQEQNELIITQRQQIKDFTCNPLNSISEPKVNAPALHTLETKSSLPMVHEQAFSSHILEPIEELSEEEKGRENEQKLNNNKMHLRKALKSNSSLTKGLRTMVEQNLMEKLETLGINADIRGISSDQLHRVLKSVESERHKQEREIPNFHQIREFLEHQVSCKIEEKALLSSDQCSVSQMDTLSTGEVPKMIQLPSKNRQLIRQKAVSTDRTSVPKIKKNVMEDPFPRKSSTITTPPFSSEEEQEDDDLIRAYASPGPLPVPPPQNKGSFGKNTVKSDADGTEGSEIEDTDDSPKPAGVAVKTPTEKVEKMFPHRKNVNKPVGGTNVPEMFIKKEELQELKCADVEDEDWDISSLEEEISLGKKSGKEQKEPPPAKNEPHFAHVLNAWGAFNPKGPKGEGLQENESSTLKSSLVTVTDWSDTSDV

SEQ ID NO: 183267 - DNA, 2547 bp, Artificial Sequence
  derived and/or modified sequence
atgcaggccgaggccgccgactggttcagcagcatgcccttccagaagcacgtgtactaccccctggccagcggccccgagggccccgacgtggccgtggccgccgccgccgccggcgccgccagcatggcctgcgccccccccagcgccgccagcggccccctgcccttcttccagttcagacccagactggagagcgtggactggagaagactgagcgccatcgacgtggacaaggtggccggcgccgtggacgtgctgaccctgcaggagaacatcatgaacatcaccttctgcaagctggaggacgagaagtgcccccactgccagagcggcgtggaccccgtgctgctgaagctgatcagactggcccagttcaccatcgagtacctgctgcacagccaggagttcctgaccagccagctgcacaccctggaggagagactgagactgagccactgcgacggcgagcagagcaagaagctgctgaccaagcaggccggcgagatcaagaccctgaaggaggagtgcaagagaagaaagaagatgatcagcacccagcagctgatgatcgaggccaaggccaactactaccagtgccacttctgcgacaaggccttcatgaaccaggccttcctgcagagccacatccagagaagacacaccgaggagaacagccacttcgagtaccagaagaacgcccagatcgagaagctgagaagcgagatcgtggtgctgaaggaggagctgcagctgaccagaagcgagctggaggccgcccaccacgccagcgccgtgagattcagcaaggagtacgagatgcagaagaccaaggaggaggacttcctgaagctgttcgacagatggaaggaggaggagaaggagaagctggtggacgagatggagaaggtgaaggagatgttcatgaaggagttcaaggagctgaccagcaagaacagcgccctggagtaccagctgagcgagatccagaagagcaacatgcagatcaagagcaacatcggcaccctgaaggacgcccacgagttcaaggaggacagaagcccctacccccaggacttccacaacgtgatgcagctgctggacagccaggagagcaagtggaccgccagagtgcaggccatccaccaggagcacaagaaggagaagggcagactgctgagccacatcgagaagctgagaaccagcatgatcgacgacctgaacgccagcaacgtgttctacaagaagagaatcgaggagctgggccagagactgcaggagcagaacgagctgatcatcacccagagacagcagatcaaggacttcacctgcaaccccctgaacagcatcagcgagcccaaggtgaacgcccccgccctgcacaccctggagaccaagagcagcctgcccatggtgcacgagcaggccttcagcagccacatcctggagcccatcgaggagctgagcgaggaggagaagggcagagagaacgagcagaagctgaacaacaacaagatgcacctgagaaaggccctgaagagcaacagcagcctgaccaagggcctgagaaccatggtggagcagaacctgatggagaagctggagaccctgggcatcaacgccgacatcagaggcatcagcagcgaccagctgcacagagtgctgaagagcgtggagagcgagagacacaagcaggagagagagatccccaacttccaccagatcagagagttcctggagcaccaggtgagctgcaagatcgaggagaaggccctgctgagcagcgaccagtgcagcgtgagccagatggacaccctgagcaccggcgaggtgcccaagatgatccagctgcccagcaagaacagacagctgatcagacagaaggccgtgagcaccgacagaaccagcgtgcccaagatcaagaagaacgtgatggaggaccccttccccagaaagagcagcaccatcaccaccccccccttcagcagcgaggaggagcaggaggacgacgacctgatcagagcctacgccagccccggccccctgcccgtgccccccccccagaacaagggcagcttcggcaagaacaccgtgaagagcgacgccgacggcaccgagggcagcgagatcgaggacaccgacgacagccccaagcccgccggcgtggccgtgaagacccccaccgagaaggtggagaagatgttcccccacagaaagaacgtgaacaagcccgtgggcggcaccaacgtgcccgagatgttcatcaagaaggaggagctgcaggagctgaagtgcgccgacgtggaggacgaggactgggacatcagcagcctggaggaggagatcagcctgggcaagaagagcggcaaggagcagaaggagcccccccccgccaagaacgagccccacttcgcccacgtgctgaacgcctggggcgccttcaaccccaagggccccaagggcgagggcctgcaggagaacgagagcagcaccctgaagagcagcctggtgaccgtgaccgactggagcgacaccagcgacgtgtag

SEQ ID NO: 183268 - DNA, 2547 bp, Artificial Sequence
  derived and/or modified sequence
atgcaggctgaagccgccgactggttcagcagcatgcctttccagaagcatgtatattatcccctggcaagtggccccgaaggtcccgatgtggccgtcgccgctgctgcggccggcgccgcatctatggcttgcgctccaccgtctgcagccagtgggcctctacctttttttcaatttaggcctagacttgaatccgtggactggcgccggttatccgccatagatgtcgacaaagtggcaggagccgtggacgtcctgacgctgcaggagaacattatgaatattaccttctgtaagctcgaagacgagaagtgtccacactgccagagcggggtcgatcccgtactgctgaaacttataaggctggcccagtttacaattgaatacctgctgcattctcaagaatttctgacgagccaactacacaccctggaggagaggctgaggttgtcccactgcgacggagagcagagtaagaaactgctgactaagcaggcaggagagatcaagacgttaaaggaagagtgtaagaggcgcaagaaaatgatttccacgcagcagctaatgatcgaggccaaggcgaattattatcagtgccatttttgtgataaggcctttatgaaccaagccttcctccaatcccacattcagcggcgccacactgaggaaaatagccactttgaatatcaaaagaacgcccagattgaaaaacttcggtctgagatcgtggtgctgaaggaagagctgcagctcacacgctctgaattggaagctgcgcaccatgcaagcgccgtgcggtttagcaaggagtacgaaatgcagaagaccaaagaagaggacttccttaaactgtttgacagatggaaggaagaggagaaagaaaagctggttgacgagatggagaaggtcaaagagatgttcatgaaagaattcaaggaacttacttctaagaattccgcgctggaataccaactgtccgagatacaaaaatccaacatgcaaattaagtcaaatatcggcactctgaaagacgcgcacgaattcaaggaggacagatctccataccctcaggattttcataatgtgatgcaattactggattcccaagaatctaagtggactgcccgagtgcaggccatacaccaggaacacaaaaaagaaaaaggccgcctgctgagtcacatcgaaaagcttaggacatcaatgatcgacgacttgaatgccagtaatgttttctacaaaaagaggattgaagaactgggccagcgtctccaggagcagaatgaattaattattacacaacggcagcaaattaaagattttacgtgcaacccccttaattcaatttctgaacctaaagtaaacgcacccgctcttcatacgctggagacgaaaagcagtctgccaatggtgcacgaacaggctttctcctcccacatccttgagcccattgaagagttatctgaggaggagaaaggaagggaaaacgagcagaagctgaacaacaacaaaatgcacctgcgaaaagctctcaaaagtaattctagtttgacgaaggggctgaggacaatggtcgaacagaaccttatggagaagctcgaaacgctcgggatcaacgctgatattagaggcatcagtagcgatcaattgcacagagtgcttaagtcagtggaatctgagcgacacaagcaggagagggaaatcccaaatttccaccagatcagagagttcctggagcaccaggtttcatgtaaaatcgaggagaaggccttattaagcagcgaccagtgcagcgtgagtcagatggacacactgagtacaggagaggtcccgaagatgatccagctgccctctaaaaatcggcagcttatacgtcaaaaggccgtgagcacggataggactagcgttcccaagataaagaaaaatgttatggaggaccccttcccacggaagagcagtacgattactacaccccctttctcttccgaggaggagcaagaggatgacgacctgataagagcatatgccagccctggacccctccccgtcccgcctcctcagaacaagggctcttttgggaagaatactgtgaagtcagatgcggacgggactgaaggatccgagatcgaggataccgatgactcaccaaagcccgccggcgtcgcggttaagacacctaccgaaaaagtggagaagatgttcccccaccgcaagaatgtgaacaagccagtcggcgggacaaacgtccctgagatgtttatcaaaaaggaggaattgcaggaactgaagtgcgcagatgttgaagatgaagattgggacattagcagtctcgaagaggagattagtttggggaaaaaatcaggcaaggaacagaaggaacccccgccagctaaaaacgaaccccatttcgcccacgtgctgaatgcctggggggcctttaaccctaaaggccccaagggggaagggttgcaggagaatgaatcatctacattaaaatcatctctggttactgtgaccgattggtcagatacaagcgatgtctag

SEQ ID NO: 183269 - DNA, 2547 bp, Artificial Sequence
  derived and/or modified sequence
atgcaggctgaggctgcagactggttcagctccatgccattccagaaacacgtctattacccgctggccagtggccccgaagggcccgatgttgccgtagccgccgcagccgccggagccgccagcatggcctgtgcccctccctccgccgcaagcggcccgctgcctttctttcagtttcggcctagactggaatcggttgattggagacggctctctgctatagatgtcgacaaagtggccggcgccgtggatgttctcactcttcaggaaaacatcatgaatatcacattttgcaaactggaggacgagaaatgtccacactgtcagtccggggtggacccagtgctcctgaagttaattcgattggctcagtttacaatcgaatatcttctgcactcacaggagtttctgacgtcacagttgcacacactggaggaaaggttaagactttcccactgtgatggcgagcagtcgaagaagttattgacgaagcaggctggagaaatcaagaccctgaaggaagaatgtaaaaggcggaaaaagatgatatcaacccagcagctgatgatagaagccaaggctaactactatcaatgccatttttgcgataaggcctttatgaatcaggcttttctacagtctcatattcagagaaggcatacggaggagaactcacactttgaataccagaagaatgcccaaatcgagaagctgagatctgaaatcgtggttcttaaggaagagttgcagctgacccggagcgaactcgaggccgctcaccacgcaagcgctgtgcgattcagtaaagagtacgagatgcagaagactaaagaagaagatttcctgaaattattcgacagatggaaggaagaggaaaaggagaagcttgtggacgaaatggaaaaggtgaaagagatgtttatgaaagaattcaaggagctgactagtaaaaactctgccctggaataccagctcagcgagatccaaaagtcaaacatgcagattaaaagcaatatcggcactttgaaggacgctcacgagttcaaggaggacagatctccatacccccaggacttccacaatgttatgcagcttctcgactctcaggaaagtaaatggactgcccgtgtgcaggctatccaccaggagcacaaaaaagagaaagggaggcttttgagccatatcgaaaagctgcgaacgtccatgatagacgacttaaacgcctccaacgttttttataagaaacgcatagaagaactaggtcaaagattgcaggaacaaaacgagctaattatcacacagcgccagcagatcaaggacttcacatgtaatcctctgaattctatcagcgagcctaaggtgaatgcacccgcccttcacacgctcgagactaaatcctcgttgcccatggtccatgagcaagctttttcaagccacattcttgaaccgattgaagaactctccgaggaagagaagggccgggagaacgagcaaaagctcaacaataacaagatgcatctccgtaaagctcttaagtctaactcctctctcacgaaaggactccgcaccatggtggaacaaaatcttatggagaagctcgagaccctaggaataaatgctgatataagaggcatcagctctgaccaactccaccgggtgttaaaatcagtggaatcagagcgacataagcaggaaagggagataccaaacttccaccagatcagggaattcttggagcatcaggtatcctgcaagattgaggagaaggccctcctgagctcagatcagtgctccgtatcacagatggacacactgtcaactggggaagtgcctaagatgatccagttgccttctaagaaccgccagctgattcgccagaaagctgtgagcactgacagaacctcggtccccaagatcaagaaaaacgtaatggaagacccctttccgcgaaaaagctctacaattacaaccccccctttttcttctgaggaggaacaggaagacgatgacctcatacgcgcctatgcatcaccaggaccattgccggtcccacccccccagaacaaaggctcatttggaaaaaatacagtgaaatcagatgcggatggaactgagggttcagaaatcgaggataccgacgatagccctaagccagccggggttgccgttaaaacccccaccgaaaaagtggagaaaatgttcccgcaccgaaaaaacgttaataagcccgttggcggaacaaacgtccctgagatgttcattaagaaagaagaactgcaggaactgaagtgcgctgatgtagaagatgaggattgggacatctcctctctggaagaggaaatctctctgggaaagaaaagtggtaaggagcagaaggagccaccgcccgccaagaacgagccccactttgcacatgttttgaatgcatggggcgcatttaatcctaaaggtccaaagggcgaggggttacaggagaacgagtcttctacgctcaaaagttccctggttaccgtgaccgactggagtgacacaagtgatgtgtag

SEQ ID NO: 183270 - DNA, 7011 bp, Artificial Sequence
  derived and/or modified sequence
tgttaggaaagaaaaaaaaattcctgatgtctggtccaagcaggaattccccggtggattggggaatgtctggcttttcctcagcttattgatctctgtggtaaccactggaggcccccagaagacccatagaaatgagaggcctgaggtctacaagtcgctgctagaaatattttagcctctccaaagcccagaatgcagccccgacccaagtttgtaagggttctgggtgcacgctgaccctgcgcgggcagacgcgccctttgctccaggtccggacctgggcgctgctatagcaacgtcctggacgcccagaccttaggccgccgccgccgcggaagcgaggaacccggccttctcccgctcctgagggctgtggcggcggcggcccgggaggcggcccaggctgggtaaagaccgcccggctcctcctatgcaagctgaggcagcggattggttttcaagcatgcccttccagaagcatgtctactacccgctcgccagcggcccagaggggcccgacgtcgctgtggccgccgccgccgcgggtgcggcctccatggcctgtgcgccccccagcgcggcttcggggcccctgcccttcttccagttcaggccgcggctggagagtgtggactggcggcggctgagcgccatcgacgtggacaaggtggcgggggctgtggacgtgctgacgctgcaggagaacatcatgaacatcaccttctgcaagctggaagacgagaagtgcccacactgccagtcgggggtggacccggtgctgctgaagctcatccgtctggcgcagttcaccatcgagtacttgctgcactcacaagagttcctcacctcgcagctgcacaccctggaggagcggctgcgcctgagccactgcgacggcgagcagagcaagaagctgctcaccaagcaggcgggggagatcaagacgctcaaggaagagtgcaaacgccggaagaagatgatctccacccagcagctgatgatcgaggccaaagccaactattaccagtgccatttttgtgacaaggcctttatgaaccaagcttttctacaaagtcacattcaacgccgccacactgaagaaaattctcattttgagtatcagaaaaatgcacagattgagaagctccggagtgagatcgtcgtattgaaggaagagctgcagctcaccaggtctgagctagaggctgcacaccatgccagtgcagtcagattctccaaggaatatgaaatgcagaaaacaaaagaggaagactttttgaagttatttgacaggtggaaagaagaagaaaaggagaaactagttgatgaaatggaaaaagtcaaggagatgtttatgaaggaatttaaagaattaacttcgaagaattcagcattagaatatcaactgtcagaaatccagaagtccaatatgcagatcaagtccaacataggcacattaaaagatgcacacgagtttaaagaagaccgttctccatatccccaggatttccataatgtcatgcagcttcttgatagtcaggaaagcaaatggacagctcgagttcaagctattcatcaagaacacaagaaagagaagggtcggctcctgtcacatatagagaaacttcgaacctcaatgatagatgatctaaatgcaagcaatgttttctataagaaaaggatagaagagctagggcagagactccaggagcagaatgagctgattataactcagagacagcagattaaagactttacctgtaatccattaaacagtatcagtgaacccaaagtgaatgccccagccctgcacactttggaaactaaatcaagtctgccaatggtgcatgaacaggcattctcgtcgcacatactggaaccaatagaagaactttcagaggaagaaaaaggaagggaaaatgaacagaaattaaataacaacaaaatgcatttaaggaaagctttgaagagtaactcctccctcactaagggactaagaacaatggtggagcagaacttgatggagaaactggaaaccttggggattaatgcagatatacgtggcatttcaagtgatcagttgcatagagtactaaaaagtgtggaatcagaaagacataagcaagaaagagaaatacctaactttcatcaaattcgagaattccttgaacatcaagtcagctgtaaaattgaggagaaagcactactctcttcagatcagtgcagtgtttctcaaatggataccctttcaactggagaagtacccaaaatgatacaacttccttccaaaaacagacaactgattagacaaaaagctgtttctactgataggacatctgttccaaaaattaagaaaaatgtcatggaagatccttttcccagaaagtcttcaactattacgacccctccttttagttcagaggaggagcaggaggacgacgacctcatccgggcatacgcatccccaggcccacttcctgtgccgccaccacaaaacaagggcagcttcgggaagaacacagtgaaaagtgacgcggacgggaccgagggaagcgaaatcgaggacactgatgattctcccaagcccgcaggagtcgccgttaaaacacctactgaaaaagttgaaaagatgtttccacatcgcaaaaatgtgaacaaaccagtcggtggaactaatgtccctgagatgtttatcaaaaaagaagaattacaagaactaaagtgtgcggatgtggaggatgaagactgggacatatcatccctagaggaagagatatctttgggaaaaaaatctgggaaagaacagaaggaacctccacctgcgaaaaatgaaccacattttgctcatgtgctaaatgcctggggcgcatttaatcctaaggggccaaagggagaaggacttcaagaaaatgaatcaagcacattaaaaagcagcttagtaactgtgactgattggagcgacacttcagatgtctaattccacatgtcagaagattattccagaagccagcagtatttcagtatcacagtgtttcagtaatttgcctccatgattctagtgcttctgccttaccgtgtttcccacagcaacacagagactgattcaaagaacaatggtctctttaatggcacccaatacagtattgaaaatcagatcatcaacagtatttcgaagcatgtaaaggtgtttaagacttccgctgctgcttaaaaataacatgtcattgaagtcataaaaagttttttcttcagaaaggtactctagtgttaagtgtatttttttcaactaattttttagtgaattttttttaaacttacagcatgttttggtttgaattactaaaactttaaaaaatatttttcttatgtatgctgtcgtatcgtaggcgtttatattataaaattctgttagtagtcttaaaattgaattggtggaaccactaatccttaaaagttagtctggttatttttcatatagaagtaagtttaatccgagtgtggtggtgttcacctttaatcccagctacttgggaggctgaggtgggaggataacttgagcacaggagttcaagaccagcgtgggcaatatagcaagactccacccctccacaccccaaaaaagtaagtttaggattagaatatagctaggtccaatgttaaatacattttcctggagtacatttgtcacattcagctttgagccactgtaagcatgttactattaaatggttggttattttatatagcatattctttatcttggatattttatgaataaagtatagttattttaagtgccaattaatttatcagactaaatagaaaatatttgagccattactgaattcacatatgtatgtttttttttactatttaaaatacccaacatgtattatgaaatacctcaaaagtaatttagttacattcttaaacaatgacattgtcgaaagaaagttcttataagctgttttttgcatttttataacttggttatactatattctgtttccaagtaaccttttaactaaaagatttgttgggttttagatctcttttcatttgtcaaccttttcagtaaagccctctgttacatcactgtgactgtggctgtgttattagagatgaattctgagttaaatttgtacttattaggggtcttacagagggagaatctggccttgattgctatgccatatgacattctgtcctaatggttagaacaaatctttatctgtttccacccaccctgggatcctttttacttgtagcccattcctgccctctaaaagaatccttccaacttcctataggggccatttcatgcagatatactcactttatatgtatgtttctaaaagctttagtgaaggctgaatccaagtttcatgtagtaggacagagaacagaaggccgaatccaagtttcatgtggtaggacagagaacggcaatctacaaaactacaccaagcctaagatggcccatgtgccactttgttcattcatttatttattcagcagatatttattgaaccacttggtctggtttggttttgaacacgcactaattcatttaattacaacaactttgcgatgtagttattgttataatcctcatcctaaaggtgtgagaaacagagttattaagtaagttgccagaagccatacaagtacaaagtgtcaaggggagactttaagccaggtctctattccatgttttgtgtctgccatgttttcattcctgagcagaagagcttggggaaatgaacttttgctaagtaaacccagtatttaaattaagtcactatatctgtgtcttttaagagcccctcctttagcttacatggttagttgtatctttttttttttttttttttgagacagagtctcactatgttgcccaggcttgagcgcagtggcaccatctcggctcactacaacctccgcctcccagattcaagcgattttcctgcctcagcctcccaagtagctgggattacaggtgcccaccaccatgcctggcttaattttttgtatttttagtagagatgaggtttcaccatgttggccagactggtctcgaactcctgacctcaaatgatccgctgtcttgtcctcccaaagtgctgggattataggcgtgagccatcgcgccctgctgcatttcatttttttgtataaaatttggtttgttcgtttttgaggggaaccattcctttatgttgccccttactgatgcccaactaatgtgtttctggttactaacagaccttcatcccccaccctccctaaattcttcggtgtaatctaagcgttatctgcaccacttctgaataataaatgtgtttgaaatgcacacctacacaaccctgtcccacactggcctgtaggacctaatctaccttcatgtctttcagttgatttgtatttctgcaaaagatatttcaaggattatcaaggtatggaattttttttattttttatcttttaacaaacttgttcatttccttttctttccattgagcacctctgaacaatgtgattcttttttttaagtctttcacacttcaggaaaatactacattcacccacgttgtgattcatatcggacagtttcttactcaaagataacacaaataccaattcttattcatactttgaaactatattttaccctagactgccttggttcaaaggcctagtttcgacattactgtggcaaattatttaagctctctgttttcatttctttttctgtaaatgcaggatgaaaacaatatgtatctcctaggatggctgtgaggagtgagtgagacaggacatgaaaggtgtgtatgaactgtgataactgttgcccttgtgggcatgttatatagggctggctctaggaagaagcctgtgtcttttttcagaaatccctggagcaacttaaatgtctttagaaatgacaagtctctcagttatccagttagccgtaaacaggttctggaagacacacctagatagaactcggcccgtcagttctgagtgaggcacgtaccacttgggcttgggatgtccttaacccatttatgcctgaggttgcaattttttgaatttttccaatcacaccttggcgatgaccttgagcagtaggatataaataactcccacatgcttagtgttccaataatggaacactaggcataaacaggttttaattggctcctcagtcaaccatgaccaatatctctatctcagcttctgctgatgccctagctcagggctctgcattccgtgccagggacgcctcagccccttaacatggatgtgccacatgacaggcaataatatattggccccattagcccttcctggagcagtcataatgaattacagtcatgacaggcacatgtaagaaaccaaaatttgctaaatatgtacatgagtcttcatcacagcatcgtttatgaaaacaactaaatattcactaatggtgccagtggaataaatcagagaacatcccctgctacgtaactctctgcatacatcaaagagaatggtgtggctttgctttttcaacaatctactgagtggccatgggcatgtggatatggccatgaatgagcaagatcctctctgatcctgtagaagttaagttctaccagataacttgctgcttcaacaaaaagatttacctttttaaataaatgttgtagaatacttaaaaaaaacaaactagaatttgcctgtgtgcagccagtaacatgtctatttaacctggacaccttttgaggaatattctcagattgcccccatgctgtttataagacattgttccttatacacctgtttatgaatgaaaagaaacataaggagtgggtacaaagacttctatctatgaatgattaaaaaggctagagtacgaatacttcttgaacctttggtactaaatgcttttcatgttctatataaatgtagaaaacattttacaaatcctgtaaataaactgtttattttttatagaaagcc

SEQ ID NO: 183271 - DNA, 4503 bp, Artificial Sequence
  derived and/or modified sequence
cgagggaagaggccggagggagatcgcggaggggagggggcgggaggggggtggggtatcctgagtcgtccgtggtccggagtctggaaggccctagagcggcgccagtcgacccgcctcgccacaacttgcccagaccagacacgtttcatcctgcgccctgcaagaaggagccggcctgcctctctccgctttgctgctcctcggcctccgcgggcccggcccgcgtcagcagcgaccctggggtctgggtcccctgtgtcgcccccgcccgcctgcagcgcccggcacccgcccaggagcgcgcagctggggttctagggacgtatacttgagcaagagagaccacagctcttgttcccgctgatcctgcagcccagtggatggagtccagaatctacagacctgccaggaaagaaaaaaaaattcctgatgtctggtccaagcaggaattccccggtggattggggaatgtctggcttttcctcagcttattgatctctgtggtaaccactggaggcccccagaagacccatagaaatgagaggcctgaggtctacaagtcgctgctagaaatattttagcctctccaaagcccagaatgcagccccgacccaagtttgtaagggttctgggtgcacgctgaccctgcgcgggcagacgcgccctttgctccaggtccggacctgggcgctgctatagcaacgtcctggacgcccagaccttaggccgccgccgccgcggaagcgaggaacccggccttctcccgctcctgagggctgtggcggcggcggcccgggaggcggcccaggctgggtaaagaccgcccggctcctcctatgcaagctgaggcagcggattggttttcaagcatgcccttccagaagcatgtctactacccgctcgccagcggcccagaggggcccgacgtcgctgtggccgccgccgccgcgggtgcggcctccatggcctgtgcgccccccagcgcggcttcggggcccctgcccttcttccagttcaggccgcggctggagagtgtggactggcggcggctgagcgccatcgacgtggacaaggtggcgggggctgtggacgtgctgacgctgcaggagaacatcatgaacatcaccttctgcaagctggaagacgagaagtgcccacactgccagtcgggggtggacccggtgctgctgaagctcatccgtctggcgcagttcaccatcgagtacttgctgcactcacaagagttcctcacctcgcagctgcacaccctggaggagcggctgcgcctgagccactgcgacggcgagcagagcaagaagctgctcaccaagcaggcgggggagatcaagacgctcaaggaagagtgcaaacgccggaagaagatgatctccacccagcagctgatgatcgaggccaaagccaactattaccagtgccatttttgtgacaaggcctttatgaaccaagcttttctacaaagtcacattcaacgccgccacactgaagaaaattctcattttgagtatcagaaaaatgcacagattgagaagctccggagtgagatcgtcgtattgaaggaagagctgcagctcaccaggtctgagctagaggctgcacaccatgccagtgcagtcagattctccaaggaatatgaaatgcagaaaacaaaagaggaagactttttgaagttatttgacaggtggaaagaagaagaaaaggagaaactagttgatgaaatggaaaaagtcaaggagatgtttatgaaggaatttaaagaattaacttcgaagaattcagcattagaatatcaactgtcagaaatccagaagtccaatatgcagatcaagtccaacataggcacattaaaagatgcacacgagtttaaagaagaccgttctccatatccccaggatttccataatgtcatgcagcttcttgatagtcaggaaagcaaatggacagctcgagttcaagctattcatcaagaacacaagaaagagaagggtcggctcctgtcacatatagagaaacttcgaacctcaatgatagatgatctaaatgcaagcaatgttttctataagaaaaggatagaagagctagggcagagactccaggagcagaatgagctgattataactcagagacagcagattaaagactttacctgtaatccattaaacagtatcagtgaacccaaagtgaatgccccagccctgcacactttggaaactaaatcaagtctgccaatggtgcatgaacaggcattctcgtcgcacatactggaaccaatagaagaactttcagaggaagaaaaaggaagggaaaatgaacagaaattaaataacaacaaaatgcatttaaggaaagctttgaagagtaactcctccctcactaagggactaagaacaatggtggagcagaacttgatggagaaactggaaaccttggggattaatgcagatatacgtggcatttcaagtgatcagttgcatagagtactaaaaagtgtggaatcagaaagacataagcaagaaagagaaatacctaactttcatcaaattcgagaattccttgaacatcaagtcagctgtaaaattgaggagaaagcactactctcttcagatcagtgcagtgtttctcaaatggataccctttcaactggagaagtacccaaaatgatacaacttccttccaaaaacagacaactgattagacaaaaagctgtttctactgataggacatctgttccaaaaattaagaaaaatgtcatggaagatccttttcccagaaagtcttcaactattacgacccctccttttagttcagaggaggagcaggaggacgacgacctcatccgggcatacgcatccccaggcccacttcctgtgccgccaccacaaaacaagggcagcttcgggaagaacacagtgaaaagtgacgcggacgggaccgagggaagcgaaatcgaggacactgatgattctcccaagcccgcaggagtcgccgttaaaacacctactgaaaaagttgaaaagatgtttccacatcgcaaaaatgtgaacaaaccagtcggtggaactaatgtccctgagatgtttatcaaaaaagaagaattacaagaactaaagtgtgcggatgtggaggatgaagactgggacatatcatccctagaggaagagatatctttgggaaaaaaatctgggaaagaacagaaggaacctccacctgcgaaaaatgaaccacattttgctcatgtgctaaatgcctggggcgcatttaatcctaaggggccaaagggagaaggacttcaagaaaatgaatcaagcacattaaaaagcagcttagtaactgtgactgattggagcgacacttcagatgtctaattccacatgtcagaagattattccagaagccagcagtatttcagtatcacagtgtttcagtaatttgcctccatgattctagtgcttctgccttaccgtgtttcccacagcaacacagagactgattcaaagaacaatggtctctttaatggcacccaatacagtattgaaaatcagatcatcaacagtatttcgaagcatgtaaaggtgtttaagacttccgctgctgcttaaaaataacatgtcattgaagtcataaaaagttttttcttcagaaaggtactctagtgttaagtgtatttttttcaactaattttttagtgaattttttttaaacttacagcatgttttggtttgaattactaaaactttaaaaaatatttttcttatgtatgctgtcgtatcgtaggcgtttatattataaaattctgttagtagtcttaaaattgaattggtggaaccactaatccttaaaagttagtctggttatttttcatatagaagtaagtttaatccgagtgtggtggtgttcacctttaatcccagctacttgggaggctgaggtgggaggataacttgagcacaggagttcaagaccagcgtgggcaatatagcaagactccacccctccacaccccaaaaaagtaagtttaggattagaatatagctaggtccaatgttaaatacattttcctggagtacatttgtcacattcagctttgagccactgtaagcatgttactattaaatggttggttattttatatagcatattctttatcttggatattttatgaataaagtatagttattttaagtgccaattaatttatcagactaaatagaaaatatttgagccattactgaattcacatatgtatgtttttttttactatttaaaatacccaacatgtattatgaaatacctcaaaagtaatttagttacattcttaaacaatgacattgtcgaaagaaagttcttataagctgttttttgcatttttataacttggttatactatattctgtttccaagtaaccttttaactaaaagatttgttgggttttagatctcttttcatttgtcaaccttttcagtaaagccctctgttacatc

SEQ ID NO: 183272 - DNA, 2547 bp, Artificial Sequence
  derived and/or modified sequence
atgcaggccgaggccgctgactggttcagctccatgcccttccagaagcacgtgtactaccccctggccagcggccctgagggcccagatgtggccgtggccgctgctgctgctggggccgcctccatggcctgtgcccctccttctgctgccagcggccccctgcccttcttccagttccggccccggctggagagcgtggactggaggcggctgagcgccattgatgtggacaaggtggccggggctgtggatgtgctgaccctgcaggagaacatcatgaacatcaccttctgcaagctggaggatgagaagtgcccccactgccagagcggcgtggaccctgtgctgctgaagctgatccggctggcccagttcaccatcgagtacctgctgcacagccaggagttcctgaccagccagctgcacaccctggaggagcggctgcggctgagccactgtgatggagagcagagcaagaagctgctgaccaagcaggccggggagatcaagaccctgaaggaggagtgcaagaggaggaagaagatgatcagcacccagcagctgatgattgaggccaaggccaactactaccagtgccacttctgtgacaaggccttcatgaaccaggccttcctgcagagccacatccagaggaggcacacagaggagaacagccactttgagtaccagaagaatgcccagatcgagaagctgcggagtgaaattgtggtgctgaaggaggagctgcagctgaccaggtctgagctggaggccgcccaccacgccagcgctgtgcgcttcagcaaggagtatgagatgcagaagaccaaggaggaggacttcctgaagctgtttgaccgctggaaggaggaggagaaggagaagctggtggatgagatggagaaggtgaaggagatgttcatgaaggagttcaaggagctgaccagcaagaacagcgccctggagtaccagctgtctgagatccagaagagcaacatgcagatcaagagcaacatcggcaccctgaaggatgcccacgagttcaaggaggacaggagcccctacccccaggacttccacaacgtgatgcagctgctggacagccaggagagcaagtggacagcccgggtgcaggccatccaccaggagcacaagaaggagaagggccgcctgctgagccacatcgagaagctgcggacctccatgattgatgacctgaatgccagcaatgtgttctacaagaagagaattgaggagctgggccagaggctgcaggagcagaatgaactcatcatcacccagaggcagcagatcaaggacttcacctgcaaccccctgaacagcatcagcgagcccaaggtgaatgccccagccctgcacaccctggagaccaagagcagcctgcccatggtgcatgagcaggccttcagcagccacatcctggagcccatcgaggagctgtctgaggaggagaagggccgggagaatgagcagaagctgaacaacaacaagatgcacctgaggaaggccctgaagagcaacagcagcctgaccaagggcctgcggaccatggtggagcagaacctgatggagaagctggagaccctgggcatcaatgctgacatccggggcatcagcagtgaccagctgcaccgggtgctgaagtctgtggagagcgagcggcacaagcaggagcgggagatccccaacttccaccagatccgggagttcctggagcaccaggtgtcctgcaagattgaggagaaggccctgctgagcagtgaccagtgcagcgtgtcccagatggacaccctgagcactggagaggtgcccaagatgatccagctgcccagcaagaaccggcagctgatccggcagaaggctgtgtccacagacaggacctctgtgcccaagatcaagaagaatgtgatggaggaccccttccccaggaagagcagcaccatcaccaccccacccttcagcagcgaggaggagcaggaggatgatgacctgatccgggcctatgccagccctggccccctgcctgtgcccccaccccagaacaagggcagctttgggaagaacacagtgaagagtgatgctgatggaacagagggcagcgagattgaggacacagatgacagccccaagccagctggggtggccgtgaagacccccacagagaaggtggagaagatgttcccccacaggaagaatgtgaacaagcctgtgggcggcaccaacgtgcctgagatgttcatcaagaaggaggagctgcaggagctgaagtgtgctgatgtggaggatgaggactgggacatcagcagcctggaggaggagatcagcctgggcaagaagagcggcaaggagcagaaggagcccccaccagccaagaatgagccccactttgcccacgtgctgaatgcctggggcgccttcaaccccaagggccccaagggggagggcctgcaggagaatgaaagcagcaccctgaagagcagcctggtgacagtgacagactggagcgacaccagtgatgtgtag

SEQ ID NO: 183273 - DNA, 2547 bp, Artificial Sequence
  derived and/or modified sequence
atgcaggccgaggccgccgactggttcagcagcatgcccttccagaagcacgtgtactaccctctggctagcgggcccgaaggaccagacgtcgcagtagcagccgcggccgcgggtgcggcctccatggcttgcgccccaccgagcgctgcaagcggccccttgcctttctttcagttccgaccaagactcgaatccgtggactggcgccgactcagtgctattgacgtggataaagttgctggggcagtggacgtgcttactttacaggaaaatatcatgaacatcaccttctgtaaactggaggacgaaaaatgcccacattgtcaaagtggtgtagacccggtgctgctgaaacttatccgactcgcccagttcacaatcgagtacctactacattcacaggaatttcttacatcgcagttgcacactttggaggagagactgaggcttagtcactgtgatggcgagcagtccaaaaagctgctcactaaacaggctggagaaatcaagactctgaaggaggaatgcaaacggcggaagaaaatgatttctacgcagcagttgatgatagaagccaaagccaactattatcagtgccatttttgcgataaggccttcatgaaccaggcttttttgcagtctcatattcagagacgacacacagaggaaaactcacactttgaatatcagaaaaatgcacagatagaaaagctgaggagtgaaatcgtcgtgctgaaggaagagctccagctcacgcggtctgaattagaggcggctcaccatgcatccgccgtgcgcttcagtaaagagtacgagatgcaaaagacaaaggaggaggattttctcaaactatttgatcgctggaaagaggaagagaaggagaaacttgtggatgagatggagaaggttaaggaaatgtttatgaaagagttcaaggagctaacatcaaagaacagcgcgctcgagtatcagctaagcgagatacagaagtctaatatgcaaattaagagtaatattgggacattaaaggacgcacacgagtttaaagaggaccgcagtccatacccacaagatttccacaatgtaatgcaattgctggactctcaagagtccaaatggactgcccgcgtacaggccatccatcaagagcataagaaagaaaaaggtaggctcctgagtcatattgagaaactcagaacaagtatgatcgatgacctgaatgcctccaatgtgttttataaaaagcgcattgaggagctgggccagcggctgcaggaacagaacgaactcattatcacccagaggcagcagattaaagatttcacatgtaatccactgaacagcatttcagaacccaaagtaaacgcccccgcactgcatacgttggagacaaagtcttccctgcccatggttcacgaacaggctttttccagccatatcctggagcccatcgaggaactgtcagaagaggaaaaaggccgtgagaatgagcagaaactcaataataacaagatgcacctccggaaagctctgaaatccaactcttcactgacaaagggtctgcgaactatggtggagcagaatttgatggagaagctggagactctgggaatcaatgccgatattaggggaatatctagcgaccagcttcaccgcgtgctgaagagtgtggagtctgagcgccataagcaagagcgggagatcccgaattttcaccagatcagagaatttttggaacatcaggtttcctgtaagattgaagagaaggcactcctgtcaagcgatcagtgtagcgtatctcaaatggataccttgtccactggtgaagtgcccaagatgatccaacttccctcaaagaatcgtcagctcatccgccagaaagctgtgtcaaccgaccgaacctccgtcccaaaaatcaaaaagaacgtgatggaagatccgtttccccgcaagtcctccaccatcactacacctcctttcagctccgaagaagaacaggaggacgacgacctgataagggcgtatgcttctccaggccctttacccgtaccacccccccagaataaagggtctttcgggaaaaacactgtgaaatctgatgctgacggcactgaggggtctgagattgaggacaccgatgacagcccaaagcctgccggggtggcggtgaaaacacctacggaaaaagtggagaagatgtttccacaccgaaaaaatgtgaacaagccggtggggggcacaaacgtccctgaaatgtttattaaaaaggaggaattacaggagctcaagtgcgcggacgtcgaggacgaagattgggatatcagcagtcttgaggaggagattagcttggggaagaaatctggtaaagagcagaaagaacccccacctgccaaaaatgaaccacatttcgcccatgtactcaacgcatggggagcctttaatcccaaaggacccaagggcgaagggttacaagaaaatgaaagcagcacccttaaatcaagccttgtgaccgtcactgactggtccgacaccagtgatgtttag

SEQ ID NO: 183274 - DNA, 2547 bp, Artificial Sequence
  derived and/or modified sequence
atgcaggccgaggccgccgactggttcagcagcatgcccttccagaagcacgtgtattaccccttggcaagcggccccgagggacccgatgttgccgtggccgccgccgctgctggagcggcttccatggcctgcgcgcctcccagtgctgcttcaggccctctacctttcttccagttccgtcctagacttgaatcagttgattggaggaggctctcggcaatcgacgtggataaagtggctggagcggtcgatgtcctcactctgcaggaaaacataatgaacattacgttttgtaagttggaagatgagaagtgtccgcattgccaatccggggtagatcctgtgctccttaagctcatcaggctggcccagttcactatcgagtacttgctccactctcaagagtttctcactagtcaactacatactttggaggagcggctgaggctctctcactgcgacggcgagcaatccaaaaaacttctgaccaagcaggccggggagataaagacactcaaggaggaatgtaagaggaggaaaaaaatgatcagcacgcagcaactgatgatcgaagcaaaggcaaattattaccagtgtcatttctgtgacaaagcatttatgaaccaggcgttcctgcagtcccacatacagcggcggcataccgaggaaaatagtcactttgagtatcagaagaacgcgcaaatcgaaaagctgaggtctgaaatcgtggtccttaaagaagagctgcagctgacgcggtctgaattggaagccgcacaccacgcttccgctgtgcgttttagcaaggagtacgagatgcagaagacaaaagaagaggactttctcaaattatttgatcgctggaaggaagaggagaaagagaagctggtggacgagatggaaaaagtgaaagagatgtttatgaaggagtttaaggagctgacaagcaagaattcggccctggagtatcagctatccgaaatacagaaaagtaacatgcagatcaagtctaacattggcacccttaaggatgcccacgagttcaaggaggaccggtcaccctacccccaggatttccacaacgtaatgcaactgctggattcccaggagtccaagtggactgcacgagtccaagcgattcatcaagaacataagaaggagaaaggaagactattatctcatatcgagaaactacgcactagcatgattgatgatttaaatgccagcaatgttttctataaaaagagaattgaagaactagggcagaggttacaagagcagaacgaactgatcattacccagcgtcagcaaattaaggatttcacctgcaaccctctcaattccatctctgagccaaaggtgaatgcacccgccttacatacactcgaaaccaaaagctctctacccatggttcacgagcaggcattctcctcgcacatcctggaaccaatcgaggagttatctgaagaggagaagggcagggagaacgagcaaaaactgaacaataacaaaatgcatctgcggaaagctttaaaatctaattcatcactgacgaaaggactgcgcaccatggtcgagcagaatttgatggagaagctcgaaaccctgggaattaacgccgatataagaggaatttcgagcgatcagctacacagagtacttaaaagtgtcgaatccgagagacacaagcaggaaagagagattccaaacttccaccagattcgcgagtttcttgagcaccaggtgagttgcaaaatcgaagagaaggctttgttatcaagtgatcagtgcagcgtttctcaaatggatactctgtctaccggcgaagtgcctaagatgatccagctgccaagtaagaatcgccagcttattagacagaaggcggttagtacagaccggaccagcgttcccaaaataaagaagaatgtgatggaagatccatttccccgaaagagctcaacgatcactacacctccatttagttcggaggaggaacaagaggatgacgatctgattagagcttatgcctctccgggacccttgcctgtgccccccccccagaacaagggtagcttcggcaaaaacacggtgaaatccgatgccgacggcaccgaggggtctgagatagaggatacagacgattccccaaaacccgctggagttgctgttaaaacccccacagagaaggtggagaagatgtttcctcataggaaaaacgttaataaacccgttgggggaaccaacgttcccgaaatgtttatcaaaaaggaggagcttcaggagttgaaatgcgccgacgtcgaggatgaggattgggatatatcgagcctcgaggaggaaatttccctaggaaaaaaaagcgggaaagagcaaaaggagcctccgcccgcgaagaatgaaccccatttcgctcacgtcctgaatgcttggggggcattcaatcccaaaggccctaagggagagggtctgcaagagaacgaaagtagtactctgaaaagcagccttgtaactgttactgactggagcgacacctctgatgtttag

SEQ ID NO: 183275 - DNA, 2547 bp, Artificial Sequence
  derived and/or modified sequence
atgcaggctgaggcagcggattggtttagctctatgccgttccagaaacatgtgtactatcctttggccagtggaccggaaggaccagacgtcgcagttgcagccgctgccgctggtgccgctagtatggcctgcgctccaccaagcgccgctagtggccctctgccatttttccaattccgtcctcgcctcgaatcggtggactggcgcagattgagtgccatagacgtggacaaagtcgccggtgcagtggacgtactcactctccaagaaaacataatgaacatcaccttttgtaagctggaagatgaaaaatgtcctcattgccagtccggggtcgaccccgtcttactcaagcttatccggcttgcacaatttactatcgagtaccttcttcattcacaagaattcctgacgtcccagctccataccctggaggagcgcctgcggcttagccactgtgatggtgagcagtcaaagaaactccttactaagcaggccggtgagattaaaacgcttaaagaggagtgtaaacgacggaaaaagatgatctctacccagcagctgatgattgaggccaaagcaaattactaccaatgccacttctgtgacaaggcgttcatgaatcaggcctttctgcagagccacatccagagacgccatactgaggagaattcccatttcgagtaccagaagaatgctcagatcgagaaactgaggtctgagatcgtcgttctgaaggaagagctgcaactcacccggtccgaactcgaggcggctcaccacgcttccgccgttcgcttctccaaggagtatgagatgcagaaaaccaaggaagaggactttctcaaactctttgaccggtggaaggaggaagaaaaggagaaactggtggatgagatggagaaagttaaagagatgtttatgaaggaatttaaagagttaacatcaaaaaatagcgccctcgagtatcagctgtcagaaattcagaagtctaatatgcagatcaaaagtaacatcggcaccctcaaggatgcacacgaatttaaagaggataggtctccttaccctcaagatttccataatgttatgcagctgctggattcacaagagagcaaatggacagcccgagtccaggcaattcatcaagaacacaaaaaggaaaaagggagattgctgtcccatatcgaaaaactgcgcacatctatgatcgatgatctgaacgcctctaatgtgttctacaaaaagcgtatcgaggaactgggacagagactgcaggagcagaatgagctgatcatcacacaaagacaacagattaaagactttacatgcaaccctctgaattctataagtgaaccgaaggtcaacgcacccgctttgcacactctggaaactaagtcttcactgccaatggtgcatgagcaggcattctcatcacatatactggagcccattgaagagttgagcgaagaagagaaggggagagagaatgagcagaaattaaataacaataaaatgcatctccgaaaagcactgaagtccaattcctctcttactaaggggctccggaccatggttgagcagaaccttatggagaagctcgaaacattggggatcaacgctgatatccgaggtatttcctccgaccagctgcacagggtgctgaagtctgttgaatcggaaagacataagcaagagagagaaatccctaactttcatcagatccgggagttcctcgagcatcaggtatcttgtaagatcgaagagaaggcactgctctcgagcgatcaatgctccgtgtctcaaatggataccctttcaactggggaagtgccgaagatgatccagctcccctcgaaaaaccgacagttgatcaggcagaaggctgtgtcaaccgataggacgtccgtgcctaagattaaaaaaaatgtgatggaggacccctttcccaggaaatcttccactataacaactccaccctttagtagtgaggaggaacaggaagacgatgacctgatccgagcctacgcctcccccggtcccttgcctgtgcctcctccgcaaaacaaaggctcctttggtaagaacaccgtgaagtccgacgctgacggtacagagggctctgaaattgaagataccgacgatagtcctaaaccagcaggcgtcgcagtcaagacccccacggagaaagtcgagaaaatgtttcctcatcgcaagaatgtgaataagcctgtgggaggcaccaatgtacctgagatgttcatcaaaaaagaggagctgcaggaattgaagtgtgctgacgttgaagatgaggattgggacatttctagcctagaggaagagatctccctcgggaagaagtcaggtaaagagcagaaagagccgcctccggcaaagaacgaaccacatttcgcacatgtattgaatgcctggggagcattcaaccccaagggacccaaaggagaaggtctccaggaaaatgagtcatcaaccttgaagtcatctttggtgactgtgacagactggagcgatacgtctgacgtttag

SEQ ID NO: 183276 - DNA, 2547 bp, Artificial Sequence
  derived and/or modified sequence
atgcaagccgaagctgcagattggtttagctccatgccttttcaaaaacatgtttactaccctttggcctccggaccagagggaccagacgtggctgtggcagcagctgcggcaggagctgcttccatggcatgtgcaccacctagtgctgcttctggtcctcttccattctttcagttccgacccagactggagtcagtggactggcgtcgcttgagtgctattgatgttgataaagtggccggagccgtcgatgtcctgactctacaggaaaatattatgaatataacattctgcaaacttgaggatgagaaatgcccacactgtcagtccggagtcgacccagtcctgcttaaactgattcgtctcgcccaattcactatagagtacctcctgcacagtcaggagttcctgacatctcaactgcacactctggaagaaaggctccggttaagccattgcgacggtgagcaatcgaaaaaacttctcaccaagcaagccggtgaaatcaagacccttaaagaagagtgcaaacgtcgtaaaaaaatgatatcgacccagcaactgatgattgaggctaaagcaaactattaccagtgtcacttttgcgataaagcgttcatgaatcaggccttcctacagagtcacattcagcggaggcacactgaggagaacagtcatttcgagtaccagaagaacgcacagattgaaaaactgagatcggaaatcgtcgtgctcaaggaagagttgcaactcacgaggtccgagctggaggccgctcatcatgcaagcgccgtgcgcttttcaaaggagtatgaaatgcaaaagacaaaggaggaagattttctgaagctgttcgatagatggaaagaggaggagaaagagaaactagttgacgagatggaaaaagttaaagagatgtttatgaaagagttcaaagaactgactagtaaaaactcagcactggaatatcagctcagcgaaatccaaaagagcaacatgcagatcaagtctaacatcgggacactcaaggacgctcatgagtttaaggaagaccgcagcccctacccacaggactttcataatgtgatgcagctactggacagtcaggagtccaaatggaccgctcgtgtacaggctatccaccaggagcataaaaaagaaaaagggagacttttgtcacacatcgagaagcttaggacctctatgatcgatgacttgaacgcctctaatgtgttttataagaagagaattgaagagcttgggcagcgcttgcaagagcagaacgaacttataattacacagcggcagcagattaaagattttacttgcaacccattaaattccatctcggagccaaaggtgaatgcgcctgcgcttcacactctggaaactaaaagcagtctccccatggttcatgaacaggcattcagtagccatatactcgagccgatcgaagagctgtctgaggaagagaaagggagagagaatgaacagaaactgaacaacaataagatgcatctgaggaaggccctgaagtcaaacagtagtcttaccaagggattgcgcacaatggtcgaacagaacttgatggaaaagttggagaccctaggcatcaacgcagacattcgaggtattagtagtgatcagctccacagagtcctgaaaagcgtggaaagcgagcgccataagcaggagagagagatccctaactttcaccagatccgggaattcttggagcaccaggtgtcgtgtaagattgaggagaaagctttactgtcttctgatcagtgcagcgtgtcacagatggacacattaagcacaggtgaggtcccaaagatgatccagctgcctagcaagaatagacagctcatacggcagaaggcagtttctactgaccgcacgagcgtccctaagatcaaaaaaaatgtcatggaggatccttttccaaggaaatcttctacaatcactacccctccctttagctcggaagaggagcaggaggatgacgatctgattcgcgcttatgcttcccctggccctttacctgtgccacccccacagaacaaggggtcctttgggaagaatacagtaaagagcgacgccgatggaactgagggcagcgagatcgaggataccgatgactcccctaaacctgctggggtggctgtcaagactccaactgagaaagttgaaaaaatgttccctcaccgtaaaaatgttaataaacccgtcgggggtacaaacgttcccgaaatgttcatcaaaaaggaggagttgcaggaactgaagtgtgccgacgtcgaggatgaggattgggatatatcaagtctggaggaagaaataagtcttggcaaaaaaagtggaaaagaacagaaagagccgcctccagccaaaaacgagccacatttcgcccacgtcctgaacgcctggggagccttcaatccaaaggggcctaagggtgaagggctccaggaaaacgaaagcagcacactcaagagcagccttgtgaccgttacagactggagtgatacgagcgacgtgtag

SEQ ID NO: 183277 - protein, 1048 aa, Artificial Sequence
  derived and/or modified sequence
MSNKTGGKRPATTNSDIPNHNMVSEVPPERPSVRATRTARKAVAFGKRSHSMKRNPNAPVTKAGWLFKQASSGVKQWNKRWFVLVDRCLFYYKDEKEESILGSIPLLSFRVAAVQPSDNISRKHTFKAEHAGVRTYFFSAESPEEQEAWIQAMGEAARVQIPPAQKSVPQAVRHSHEKPDSENVPPSKHHQQPPHNSLPKPEPEAKTRGEGDGRGCEKAERRPERPEVKKEPPVKANGLPAGPEPASEPGSPYPEGPRVPGGGEQPAQPNGWQYHSPSRPGSTAFPSQDGETGGHRRSFPPRTNPDKIAQRKSSMNQLQQWVNLRRGVPPPEDLRSPSRFYPVSRRVPEYYGPYSSQYPDDYQYYPPGVRPESICSMPAYDRISPPWALEDKRHAFRNGGGPAYQLREWKEPASYGRQDATVWIPSPSRQPVYYDELDAASSSLRRLSLQPRSHSVPRSPSQGSYSRARIYSPVRSPSARFERLPPRSEDIYADPAAYVMRRSISSPKVPPYPEVFRDSLHTYKLNEQDTDKLLGKLCEQNKVVREQDRLVQQLRAEKESLESALMGTHQELEMFGSQPAYPEKLRHKKDSLQNQLINIRVELSQATTALTNSTIEYEHLESEVSALHDDLWEQLNLDTQNEVLNRQIQKEIWRIQDVMEGLRKNNPSRGTDTAKHRGGLGPSATYSSNSPASPLSSASLTSPLSPFSLVSGSQGSPTKPGSNEPKANYEQSKKDPHQTLPLDTPRDISLVPTRQEVEAEKQAALNKVGVVPPRTKSPTDDEVTPSAVVRRNASGLTNGLSSQERPKSAVFPGEGKVKMSVEEQIDRMRRHQSGSMREKRRSLQLPASPAPDPSPRPAYKVVRRHRSIHEVDISNLEAALRAEEPGGHAYETPREEIARLRKMELEPQHYDVDINKELSTPDKVLIPERYIDLEPDTPLSPEELKEKQKKVERIKTLIAKSSMQNVVPIGEGDSVDVPQDSESQLQEQEKRIEISCALATEASRRGRMLSVQCATPSPPTSPASPAPPANPLSSESPRGADSSYTMRV

SEQ ID NO: 183278 - DNA, 3147 bp, Artificial Sequence
  derived and/or modified sequence
atgagcaacaagaccggcggcaagagacccgccaccaccaacagcgacatccccaaccacaacatggtgagcgaggtgccccccgagagacccagcgtgagagccaccagaaccgccagaaaggccgtggccttcggcaagagaagccacagcatgaagagaaaccccaacgcccccgtgaccaaggccggctggctgttcaagcaggccagcagcggcgtgaagcagtggaacaagagatggttcgtgctggtggacagatgcctgttctactacaaggacgagaaggaggagagcatcctgggcagcatccccctgctgagcttcagagtggccgccgtgcagcccagcgacaacatcagcagaaagcacaccttcaaggccgagcacgccggcgtgagaacctacttcttcagcgccgagagccccgaggagcaggaggcctggatccaggccatgggcgaggccgccagagtgcagatcccccccgcccagaagagcgtgccccaggccgtgagacacagccacgagaagcccgacagcgagaacgtgccccccagcaagcaccaccagcagcccccccacaacagcctgcccaagcccgagcccgaggccaagaccagaggcgagggcgacggcagaggctgcgagaaggccgagagaagacccgagagacccgaggtgaagaaggagccccccgtgaaggccaacggcctgcccgccggccccgagcccgccagcgagcccggcagcccctaccccgagggccccagagtgcccggcggcggcgagcagcccgcccagcccaacggctggcagtaccacagccccagcagacccggcagcaccgccttccccagccaggacggcgagaccggcggccacagaagaagcttcccccccagaaccaaccccgacaagatcgcccagagaaagagcagcatgaaccagctgcagcagtgggtgaacctgagaagaggcgtgcccccccccgaggacctgagaagccccagcagattctaccccgtgagcagaagagtgcccgagtactacggcccctacagcagccagtaccccgacgactaccagtactacccccccggcgtgagacccgagagcatctgcagcatgcccgcctacgacagaatcagccccccctgggccctggaggacaagagacacgccttcagaaacggcggcggccccgcctaccagctgagagagtggaaggagcccgccagctacggcagacaggacgccaccgtgtggatccccagccccagcagacagcccgtgtactacgacgagctggacgccgccagcagcagcctgagaagactgagcctgcagcccagaagccacagcgtgcccagaagccccagccagggcagctacagcagagccagaatctacagccccgtgagaagccccagcgccagattcgagagactgccccccagaagcgaggacatctacgccgaccccgccgcctacgtgatgagaagaagcatcagcagccccaaggtgcccccctaccccgaggtgttcagagacagcctgcacacctacaagctgaacgagcaggacaccgacaagctgctgggcaagctgtgcgagcagaacaaggtggtgagagagcaggacagactggtgcagcagctgagagccgagaaggagagcctggagagcgccctgatgggcacccaccaggagctggagatgttcggcagccagcccgcctaccccgagaagctgagacacaagaaggacagcctgcagaaccagctgatcaacatcagagtggagctgagccaggccaccaccgccctgaccaacagcaccatcgagtacgagcacctggagagcgaggtgagcgccctgcacgacgacctgtgggagcagctgaacctggacacccagaacgaggtgctgaacagacagatccagaaggagatctggagaatccaggacgtgatggagggcctgagaaagaacaaccccagcagaggcaccgacaccgccaagcacagaggcggcctgggccccagcgccacctacagcagcaacagccccgccagccccctgagcagcgccagcctgaccagccccctgagccccttcagcctggtgagcggcagccagggcagccccaccaagcccggcagcaacgagcccaaggccaactacgagcagagcaagaaggacccccaccagaccctgcccctggacacccccagagacatcagcctggtgcccaccagacaggaggtggaggccgagaagcaggccgccctgaacaaggtgggcgtggtgccccccagaaccaagagccccaccgacgacgaggtgacccccagcgccgtggtgagaagaaacgccagcggcctgaccaacggcctgagcagccaggagagacccaagagcgccgtgttccccggcgagggcaaggtgaagatgagcgtggaggagcagatcgacagaatgagaagacaccagagcggcagcatgagagagaagagaagaagcctgcagctgcccgccagccccgcccccgaccccagccccagacccgcctacaaggtggtgagaagacacagaagcatccacgaggtggacatcagcaacctggaggccgccctgagagccgaggagcccggcggccacgcctacgagacccccagagaggagatcgccagactgagaaagatggagctggagccccagcactacgacgtggacatcaacaaggagctgagcacccccgacaaggtgctgatccccgagagatacatcgacctggagcccgacacccccctgagccccgaggagctgaaggagaagcagaagaaggtggagagaatcaagaccctgatcgccaagagcagcatgcagaacgtggtgcccatcggcgagggcgacagcgtggacgtgccccaggacagcgagagccagctgcaggagcaggagaagagaatcgagatcagctgcgccctggccaccgaggccagcagaagaggcagaatgctgagcgtgcagtgcgccacccccagcccccccaccagccccgccagccccgccccccccgccaaccccctgagcagcgagagccccagaggcgccgacagcagctacaccatgagagtgtag

SEQ ID NO: 183279 - DNA, 3147 bp, Artificial Sequence
  derived and/or modified sequence
atgtcgaataagactggtggcaaacggccggctaccaccaactcagatattcccaaccacaatatggtaagtgaagtgcctcccgagaggccgtctgtgcgggcaacacgtaccgctagaaaggcggtggcctttggcaagaggtctcattctatgaagcgcaatccgaatgcacctgtaacaaaggcgggctggctttttaaacaggctagttctggggtgaagcagtggaacaaacgctggttcgtcctggtggaccggtgcttattctactataaagatgaaaaggaggaatccatcctggggagtatcccactgctctcatttagggtcgcggctgtgcagccctccgacaacattagccggaagcatactttcaaggccgaacacgccggggttagaacctatttcttctccgccgagtctcccgaagagcaagaagcctggatacaggctatgggagaggccgccagggttcagattccacctgctcagaaatccgtgccccaggcagtcaggcatagtcatgagaaaccggactcagagaatgtcccgccttccaaacaccatcagcaaccacctcataattcactgcctaaacccgagccagaggcgaagactcgaggagagggagacgggaggggctgtgaaaaggccgaacggaggcccgaacgccccgaggtgaagaaggaaccacctgtaaaagctaatggactgccagcgggcccagagcccgctagcgagcctgggagtccatacccagaagggcctagagtcccagggggcggcgaacagccagcacagcctaacggctggcaatatcactcaccgagtaggccaggctctactgctttccccagccaagacggcgagactggcggtcatcgccggagcttcccgcctaggacgaatccagataaaattgctcagcggaaatcgtctatgaaccaactgcaacaatgggtcaacctgcggcgaggggtgcccccaccagaggacctgaggagtccctcgagattttaccctgtgtcccgcagagtacccgaatattatggtccatactcttcgcagtaccctgatgattaccaatattaccccccaggtgtaaggcccgaaagtatctgcagtatgcctgcttatgacagaatttccccgccctgggcgctggaggataagaggcatgcttttcgaaacggaggaggccccgcttaccagttacgagagtggaaggaaccagcaagctacggcaggcaggacgctaccgtgtggattccctctccctcacgtcagcccgtgtactacgacgaattagacgctgcttcctccagtctccgccggctttcgttgcagcctaggtcacattcggtgcctaggtcacccagccaaggttcatatagcagagccaggatctattcgcctgtacggtcgccttcagcgaggttcgagcgccttccgccaagatccgaggatatttatgccgaccccgcagcttacgtcatgcggagaagcatttcctcccccaaagttccgccgtatccagaggtttttagggattccctgcacacgtataagttgaatgaacaggacactgacaaactgttgggcaagctgtgcgaacagaataaggtggttagagagcaggacagactagtgcagcaactacgggccgaaaaggagtcacttgagagcgcattaatgggcacacaccaggagctggaaatgtttggatcgcagcccgcttacccagaaaagctccggcataagaaggactccctccagaaccaactgatcaatattcgcgttgaactgtctcaggcaactaccgcgcttactaattccaccatagagtacgagcatcttgagtccgaagtgtccgcactgcatgacgacttgtgggagcagttgaatctagacacgcagaatgaagtactgaataggcagatccagaaagaaatctggcgaattcaggatgtcatggagggcctaaggaagaacaacccctcccgggggaccgacaccgctaagcaccgaggcgggttgggcccctccgcaacatacagctccaactccccggctagccccttaagcagcgccagcctgaccagccctctgtccccattcagcctggtatccggctcccaggggagccccactaagcccgggagcaacgagcctaaagcaaactacgaacaatcaaaaaaggacccgcaccaaactctgcctctcgacacgcctagggacattagcctagttcccacccgacaggaggtggaggctgagaaacaggcggctctgaataaggttggagtcgtgcctccacgcaccaagtctcccaccgacgacgaagtaacgcccagcgctgtggtgcggaggaatgctagcggactcacaaatggtttatcttctcaggagcgccccaagagcgccgttttccccggagagggtaaggtgaagatgagcgttgaggagcaaattgatagaatgcgcagacatcagagcggatccatgagggaaaaacgcagatctctgcagctacccgcctcgcctgcccctgaccccagtcctaggcctgcatacaaagttgtgcgaaggcataggagtatccatgaagtagacataagcaatctggaggctgccctgagggccgaggaacctggagggcacgcatatgaaaccccgagagaggagattgccaggctccgcaaaatggagctcgagccgcagcattacgacgtggacatcaataaggaactgtctacccccgacaaggttctgatccccgaaagatacatcgatcttgaaccggacactcctcttagtcctgaagagctgaaggagaagcagaagaaggtggaaaggatcaagacattgatcgctaaatcaagcatgcaaaacgtggttcctataggggaaggggactctgtagacgtgcctcaggattcagagtcacagctgcaggagcaagagaagaggatagaaatctcctgcgcgctggctacagaagctagcagacgagggcgaatgctttctgtgcaatgcgcaacccctagccctcctaccagtcctgcctcacccgctcctccagcaaacccacttagttctgagtcaccaagaggcgcagacagcagctacacaatgcgcgtctag

SEQ ID NO: 183280 - DNA, 3147 bp, Artificial Sequence
  derived and/or modified sequence
atgagcaacaagacaggaggcaagaggcctgccaccaccaacagcgacatccccaaccacaacatggtgtctgaggtgcccccagagcggcccagcgtgcgggccaccaggacagccaggaaggctgtggccttcggcaagaggagccacagcatgaagaggaaccccaatgcccctgtgaccaaggccggctggctgttcaagcaggccagcagcggcgtgaagcagtggaacaagcgctggtttgtgctggtggaccgctgcctcttctactacaaggatgagaaggaggagagcatcctgggcagcatccccctgctgtccttccgggtggccgctgtgcagcccagcgacaacatcagcaggaagcacaccttcaaggccgagcacgccggcgtgaggacctacttcttctctgctgagagccctgaggagcaggaggcctggatccaggccatgggagaggccgcccgggtgcagatccccccagcccagaagtctgtgccccaggccgtgcgccacagccatgagaagccagattctgaaaatgtgccccccagcaagcaccaccagcagcccccccacaacagcctgcccaagccagagcctgaggccaagaccagaggagaaggagatggccggggctgtgagaaggccgagaggaggcctgagaggcctgaggtgaagaaggagccccctgtgaaggccaacggcctgcctgctggccctgagcccgccagcgagcccggcagcccctacccagagggcccccgggtgcctgggggcggggagcagcctgcccagcccaacggctggcagtaccacagccccagccggcccggcagcacagccttccccagccaggatggagagaccggcggccaccggcgctccttcccccccaggaccaacccagacaagatcgcccagaggaagagctccatgaaccagctgcagcagtgggtgaacctgcggcggggcgtgcccccacctgaggacctgcggagccccagccgcttctaccctgtgtccagaagagtgcctgagtactacggcccctacagcagccagtacccagatgactaccagtactacccacctggggtgcggcctgagagcatctgcagcatgcctgcctatgaccgcatcagccccccctgggccctggaggacaagagacatgccttcagaaatggaggcggccctgcctaccagctgcgggagtggaaggagcccgccagctatggccggcaggatgccaccgtgtggatccccagccccagccggcagcctgtgtactatgatgagctggatgctgccagcagcagcctgcggcggctgagcctgcagcccaggagccacagcgtgcccaggagccccagccagggcagctacagccgggcccgcatctacagccctgtgcgcagccccagcgccaggtttgagcggctgcccccaagaagtgaggacatctatgctgaccctgctgcctacgtgatgagaagaagcatcagcagccccaaggtgcccccctacccagaggtgttccgggacagcctgcacacctacaagctgaatgagcaggacacagacaagctgctgggcaagctgtgtgagcagaacaaggtggtgcgggagcaggaccggctggtgcagcagctgcgggcagagaaggagagcctggagagcgccctgatgggcacccaccaggagctggagatgtttggcagccagcctgcctacccagagaagctgcggcacaagaaggacagcctgcagaaccagctgatcaacatccgggtggagctgagccaggccaccacagccctgaccaacagcaccattgaatatgagcacctggagagcgaggtgtctgccctgcatgatgacctgtgggagcagctgaacctggacacccagaatgaggtgctgaaccggcagatccagaaggagatctggaggatccaggatgtgatggagggcctgaggaagaacaaccccagccggggcacagacacagccaagcaccggggcggcctgggccccagcgccacctacagcagcaacagccctgccagccccctgagcagcgccagcctgaccagccccctgagccccttcagcctggtgtctggcagccagggcagccccaccaagccaggcagcaatgagcccaaggccaactatgagcagagcaagaaggacccccaccagaccctgcccctggacaccccccgggacatcagcctggtgcccacccggcaggaggtggaggccgagaagcaggccgccctgaacaaggtgggcgtggtgccccccaggaccaagagccccacagatgatgaggtgacccccagcgctgtggtgagaagaaatgccagcggcctgaccaacggcctgagcagccaggagcggcccaagtctgctgtgtttcctggagagggcaaggtgaagatgtctgtggaggagcagattgacaggatgagaagacaccagagcggctccatgagggagaagaggaggagcctgcagctgcctgccagccctgccccagaccccagccccaggcctgcctacaaggtggtgagaagacacaggagcatccacgaggtggacatcagcaacctggaggccgccctgcgggcagaggagcccggcggccacgcctatgagaccccccgggaggagatcgcccggctgaggaagatggagctggagccccagcactatgatgtggacatcaacaaggagctgagcaccccagacaaggtgctgatccctgagcgctacatcgacctggagccagacacccccctgagccctgaggagctgaaggagaagcagaagaaggtggagcgcatcaagaccctcatcgccaagagctccatgcagaatgtggtgcccatcggggagggggacagcgtggatgtgccccaggacagcgagagccagctgcaggagcaggagaagagaattgagatcagctgtgccctggccacagaggccagccggcggggccgcatgctgtctgtgcagtgtgccacccccagcccccccaccagccctgccagccctgcccccccagccaaccccctgagcagcgagagccccagaggagctgacagcagctacaccatgagggtgtag

SEQ ID NO: 183281 - DNA, 3147 bp, Artificial Sequence
  derived and/or modified sequence
atgagcaacaagaccggcggcaagcggcccgccaccaccaacagcgacattcccaaccacaatatggtaagcgaggtgccccctgaacgtccctccgtgagagccacccggacagcccgcaaggccgtagccttcggaaaacgctctcattcaatgaagcgaaaccctaacgctccagtcacaaaagcaggatggttattcaagcaggcctccagcggggttaagcagtggaataagcggtggttcgtcctcgtggaccgctgtctgttctactacaaagacgaaaaggaggagtccatactaggaagcatccctctcctgtcctttcgtgttgccgccgtgcagcctagtgataacatctctcggaagcacaccttcaaggcagaacatgctggagtaaggacctattttttctccgctgagagtccagaagagcaggaggcttggatccaggccatgggcgaagctgcccgcgtccagatacctccagcccagaagagcgtgccgcaggctgttcgtcactcccacgagaaacccgatagcgagaatgtcccaccatcaaagcaccatcagcagccacctcataattcactcccaaaacccgagcccgaggccaagacaagaggggagggtgacggtcggggctgcgagaaggcggaaagacggcccgaaaggcctgaggtgaagaaagagccacctgttaaggctaatggcctgccagccgggcccgagcccgcttccgaaccggggtctccttatcctgaaggccctagggtgcctggtggaggcgaacagccagcacagccaaacggatggcagtaccactctccatctcgcccgggcagtacggcttttcctagccaagatggggagacgggtgggcatcggagaagttttccccctcgaaccaatcccgacaagatcgcccagaggaaaagtagtatgaatcagctgcagcagtgggttaatctacgtcgcggggtgccgcccccagaggacttgcgcagtccttctcgtttctatcctgtgtcccgccgagtgcccgaatattacggaccttattcaagtcagtacccagacgactaccagtattaccctcccggggtccgtcccgagagcatttgcagcatgcccgcttacgataggatttctcccccttgggctctggaagacaagcgccacgccttcaggaatggcggggggcctgcctaccaactgagagagtggaaagagccagcatcctacggaagacaggatgcaaccgtgtggatccccagtccgtcacgacagccggtctactatgacgagttagacgctgcttcgagcagcttacggcggctctcacttcagccccggtcccattccgtgccaagaagcccatctcagggtagctattcgcgagcgcgaatttactccccggtcagatcacctagtgccagattcgaacgcctgcctccacgcagtgaggacatttacgcagatccggccgcttacgtcatgcgcaggtcgattagtagccccaaggttcctccataccccgaggttttcagagactcgctgcacacttataagttaaatgagcaagatacagacaaactgctgggaaagttgtgcgaacaaaacaaagtagtgcgggagcaggacagattggtccagcaactccgagccgaaaaggaatcgctcgaaagcgcactcatgggaacacatcaagagctcgagatgtttgggagccaacccgcttacccggagaagctacggcacaaaaaagattccctgcagaaccagctgattaacattcgcgtggaactttcacaggctaccaccgctctcactaactctacaattgaatacgagcatctagagtcggaggtgtctgccctgcacgacgatctgtgggaacagctgaatttagacacccagaacgaggttttgaacagacaaatccaaaaggaaatctggaggattcaggatgtgatggagggccttagaaagaataacccctcgagggggacggatacggccaaacatcgcggcggcctaggcccatcagccacctacagcagtaacagcccagcctcacccttgtcctccgcctctcttacttcccccttatctcctttctctctggtgagcggaagccagggatcacccaccaagcctgggtctaatgagcccaaagctaattatgaacagagtaaaaaagatccccaccagaccctgcctcttgacactccgcgggacatctcactggtgcccacgcgacaagaagtcgaggctgagaagcaggctgcactgaataaggtgggagtcgtcccccccaggacaaaatcaccgaccgacgacgaggtgacaccatctgccgttgtgcgacgcaacgctagtggcttaacgaacggccttagctcccaagagaggccgaaatcagctgtgtttcctggggaagggaaagttaagatgtccgtggaggaacagattgatagaatgaggcgccatcagtctggctcaatgcgcgagaagcgccggagtctccaacttcccgccagccctgccccagacccatctccacgccctgcatataaagtggtgcgccgccacagaagcattcacgaagttgacatcagtaatctggaagccgctctgagggccgaagaacccggcggccacgcctacgaaacaccgcgcgaggaaatcgccaggttgcgtaaaatggagttggaacctcagcattacgatgtggacataaataaggaattatcaaccccagacaaagtactgatccctgagcgatacattgacctggagccggatactcccctctcgcccgaagaacttaaggagaagcaaaaaaaagtggagaggatcaagacactgatcgcaaagtcttctatgcaaaacgtagttccaatcggcgaaggggatagcgttgatgtcccacaggactcagaaagccagctgcaagaacaggagaagcgtatcgagataagctgtgcactggcaactgaggcaagtcgcagggggcgcatgttatcagtgcagtgcgccaccccatcaccccccaccagcccagcgagcccagctccaccagcaaacccccttagctctgagtctcctagaggcgccgactcttcttacactatgcgcgtttag

SEQ ID NO: 183282 - DNA, 5031 bp, Artificial Sequence
  derived and/or modified sequence
gctggatcctgcagtaaccacaacagcatcctctccctgcgccagggacctgccagccggagagatgactgattagatcagattagatccggagccccgctctgcagaagggggccccaggggcgggggaggaggaccccagctggcctgagctggggggaggggtgccttggggctcgcagagttagagctttccagcgcggggatcacacctcagaagccgccacaatgaaagacggaacacatttctacacccagtgactggccaggtcccagaggaaaacaaaaaatttgacttgaaaatatcgaccttggacatgtccaataaaacaggtgggaaacgcccggctaccaccaacagtgacatacccaaccacaacatggtgtccgaggtccctccagagcggcccagcgtccgggcaactcgcacagcccgcaaagccgtcgcctttggcaagcgctcacactccatgaagcggaaccccaatgcacctgtcaccaaggcgggctggctcttcaaacaggccagctccggggttaagcagtggaacaagcgctggttcgtcctggtggatcgctgcctcttctactataaagatgagaaggaagagagtatcctgggcagcatccccctcctgagcttccgggtagccgcagtgcagccctcagacaacatcagccggaaacacacgtttaaggctgagcatgccggggtccgcacctacttcttcagtgccgagagccccgaggagcaagaggcctggatccaggccatgggggaggctgctcgagtacagatccctccagcccagaagtcagtgccccaagctgtgcggcacagccatgagaagccagactcggagaacgtcccacccagcaagcaccaccagcagccaccccacaacagcctccctaagcctgagccagaggccaagactcgaggggagggtgatggccgaggctgtgagaaggcagagagaaggcctgagaggccagaagtcaagaaagagcctccggtgaaagccaatggcctcccagctggaccggagccagcctcagagccgggcagcccttaccccgagggcccaagagtgccagggggtggggaacagcctgcccagcccaatggctggcagtaccactccccaagccggccagggagcacagctttcccgtctcaggatggagagactgggggacaccggcggagtttcccaccacgcaccaaccctgacaaaattgcccagcgcaagagctccatgaaccagcttcagcagtgggtgaatctgcgccggggggtacccccgcctgaagaccttcggagtccctctaggttctatcctgtgtctcgcagggtccctgagtactatggcccctactcctcccagtaccccgatgattatcagtactacccgccaggagtgcggccggagagcatctgttccatgccggcctatgatcggatcagcccgccctgggccctggaggacaagcgccatgccttccgcaatgggggtggccctgcctaccagctgcgagagtggaaggagcccgccagctacgggcggcaggatgccaccgtctggatcccaagcccctcccggcagccagtctattatgatgagctggatgccgcctctagctccctgcgccgcctgtccctgcagccccgctcccactctgtgccccgctcacccagccagggctcctacagccgtgcccgcatttactcccctgtccgctcacccagtgcccgttttgagcggctgccacctcgcagtgaggacatctatgctgaccctgctgcctatgtgatgaggcgatccatcagctcccccaaggtccctccatacccagaagtgttccgggacagcctccacacctacaagttaaacgagcaagacacagataagctgctgggaaaattgtgtgagcagaacaaggtggtgagggagcaggaccggctggtgcagcagctccgagctgagaaggagagcctggaaagtgccttgatggggacccaccaggagctggagatgtttggaagccagcccgcctacccagaaaagctgcgacacaaaaaggattcactgcagaaccagctcatcaacatccgcgtggagctgtctcaggcgaccacggccctgacaaacagcaccatagagtatgagcacctcgagtctgaggtctctgccctgcacgatgacctctgggagcagctcaatttggacacccagaatgaggtgctgaaccggcaaatccaaaaggagatctggaggatccaggacgtgatggaggggctgaggaagaacaacccctcccggggcacggacaccgccaagcacagaggaggacttggcccctcagccacctacagctccaacagcccggccagccccctcagctctgccagcctcaccagccccctgagccccttttcactggtgtcgggctctcaggggtcccccaccaagcctggctccaacgagcccaaggcaaactatgaacaaagcaagaaagacccccaccagacattgcccctggacacccccagagacatcagccttgtgcccaccaggcaagaggtagaggcagagaagcaggcagctctcaacaaagttggcgttgtgccccctcggacaaaatcgcccactgatgatgaggtgaccccatcagcagtggtaagaaggaatgccagtgggctcaccaatggactctcctcccaggaacgccccaagagtgctgtgtttcctggcgaggggaaggtcaagatgagcgtggaggagcagattgaccgaatgcggcggcaccagagtggctccatgagggagaagcggaggagcctgcagctcccggccagcccggcccccgaccccagtccccggccagcctacaaagtggtgcgccgccaccgcagcatccatgaggtagacatctccaacctggaggcagccctgcgggcagaggagcctggcgggcatgcctacgagacaccccgggaggaaattgcccggcttcgcaaaatggagctagagccccagcattatgacgtggacatcaataaggagctctccactccagacaaagtcctcatccctgaacggtacattgacctggagcctgacactcccctgagccctgaggagttgaaggagaagcagaagaaggtggagaggatcaagacactcattgccaaatccagtatgcagaacgtggtgcccatcggcgagggggactctgtggacgtgccccaggactcagagagccagctgcaggagcaggagaagcggattgaaatctcctgcgccctggcgaccgaggcctcccgcaggggccgcatgctgtctgtgcaatgtgccaccccaagccctcccacctcccctgcttccccggctcctccagcaaaccccctgtcgtctgaatccccacggggcgccgacagcagctataccatgcgggtctgagctctgactgcaagccctggctgaggccaatgctgtgaagctccacagagccacattctgaagccgtcctctgcccacctgaggtcctggctccccaccctggccccctgcccctgcactcccatgggaatgccgcagggagccaggctggggccatgggctgctgccagaggaccgtggatacctcagtgtccacacacccaccatgcccagccctggagccatcactactcacaccgtggtcctgggccagggcctgagatgacagtggggagcaccatcctcattaatgtccaagtcacagggagcctcagccttgccctggctggggttgtggtgactccagtggaacattccctgatgggggacatgccgtggtggagaacacacctgtggctatcttatgtgaggactagaggtgaagaggagatggacactgcctctggagccagcctgacaccaaggacagcacttgtcatcatccctatcctcgtcagccccaccctactgcctcagctggacccagggctttgacacaaacccagtgctttgcttatgggtgctcgctggggtccggtggagactgaccaccctgcttgagccaaagacaaggtgatgagagatggggagaggccattggctcccagagggaacagtgctggctgtggctagagaacagcaggtctgtgcagtgtctgagggcaggttgggaagggtagcagagagagagagacagaaagagagagagagagagagagagagagagatcctcagagtggaaggagggggaagcagcaggacacattggcaagtcaagcaggaaggagggagatggaaaggggatatcagattggtttcccccggtggagccttaggttagtgcccagtgcagtgccagactgtctcctctgctcctcccacctcatccctaggaggacccaccagtggagcacatgcagcctcagtggagatgcttggtgtggggatctgggtgaagggggttgagtagcgactgcctgggagatggctgttagtaggtctgtgcctggtgtctgcctcgccatcctggggtaaggggcagagagaaggacttgtcttatgtagggtgtggtcagccttggggccttacctacccagttccatgatatttcttgccctgttccccctggaatgtgcagtgggccagctgagagtacgccttgaggaggggggatgaggccttaatctgggaggcctatccccctatcccaggcatcccagacgaggactggctgaggctaggcgctctcatgatccacctgccccgggagggcagcggggaagacagagaaaagcaaacgcattcctcctcagctccacccacctggagacgaatgtagccagagaggaggaaggagggaaactgaagacaccgtggcccctcggccttctctctgctagagttgccgctcagaggcttcagcctgacttccagcggtcccaagaacacctactaattcctctgcactccttcatggctgggacagttactggttcatatgcaagtaaagatgacaatttactcaac

SEQ ID NO: 183283 - DNA, 3147 bp, Artificial Sequence
  derived and/or modified sequence
atgtccaataaaaccgggggaaaaagacctgcaacaaccaactctgatatccccaaccataacatggtgagcgaggttcctcccgagcggccttctgtccgcgctaccagaacggctcgcaaagccgtggccttcggaaaacgctctcatagcatgaaaagaaatccgaacgctcccgtgactaaagcaggctggctgttcaagcaggcatcttcaggcgtgaagcagtggaacaagcggtggttcgtcctcgtggaccgttgcttattttattataaggatgagaaagaggagtctattctgggctcaatccccctgctgtcttttcgcgtggcggctgttcagccgagcgacaacatctctaggaaacacactttcaaagctgagcatgcgggtgtacgaacttatttctttagtgcggagtcacccgaggaacaagaggcatggatccaggctatgggcgaggccgctagagtccaaatacctccagcccagaagtcagtaccccaggcagtgcgacactcgcacgagaagcccgattccgaaaacgtgcctccttcgaagcatcaccagcaaccccctcataactctctccccaaacccgaacctgaagctaagacacgtggggaaggagatggcagagggtgcgagaaagcagagcgccgtcccgagagacccgaagttaagaaagagcctccagtaaaagctaacggcctgcccgctggccctgagcccgctagtgaacccggaagtccttaccccgaggggcctcgagtgcctggcggaggcgaacagccggcacaacctaatggatggcagtatcatagcccttcgcggcctggaagtacagccttccccagccaagatggtgagacggggggacatcgccgaagcttcccacccagaactaatccggataaaatcgcccaacggaagtctagcatgaaccagctgcagcagtgggtgaatctacggcgaggagtacccccacctgaggacctcaggtcccccagccgattttacccagtgtccaggagggttccggagtactacggcccatatagctcgcaatacccagatgactatcaatactatcctccaggtgttcgccctgagagtatctgcagcatgccagcttacgacagaatcagcccgccatgggccctggaagataaaagacacgcctttagaaacggcggtggacccgcataccagcttcgggagtggaaggagccggcaagttatggcaggcaggatgccactgtgtggatcccgtcccctagccgtcaacctgtatattacgatgaactggatgccgcttccagtagtttgcgcaggctttcgcttcaacctcggtcacatagtgtgccgaggagcccaagccagggcagctacagccgggctcgaatttacagcccagtgcggagcccctccgcgaggttcgaaaggttgccgccacggagcgaggacatatatgcagaccctgctgcttatgttatgaggcggtccatctcgagtccgaaagtgcctccctatcctgaggtttttcgggactctctgcacacctataagttgaacgaacaagacacggacaagctgcttggaaagctttgcgaacagaataaagtcgtgcgcgaacaggaccggttagtacaacaactgagggccgagaaagagagcctcgagtccgccttgatgggcactcaccaggagctcgaaatgttcggaagtcagccagcttaccccgagaaactccggcataagaaggattcattgcagaaccagcttatcaacatcagggtggagctgtcacaggcaaccaccgcactcactaattctacaattgaatatgagcacctcgagagcgaggtatctgcattacatgatgacctctgggagcagctcaacttggatacacagaacgaagtgttgaacagacagattcagaaggaaatatggcgcattcaggacgtgatggaaggactgcgcaaaaataacccctcccgtggcacggataccgcgaaacatagaggtggtctcggaccctccgcgacctattctagcaatagtcccgctagccctctaagctcggcatctctgaccagccccctcagcccattttccctggttagtggatctcagggctctcccacgaaacctgggagtaatgagcctaaagctaattatgagcagagcaaaaaggatccgcaccaaacgttaccactggacacccccagagatatctcattagtgcccacaaggcaggaggtggaagccgaaaagcaggccgctctgaataaggtgggcgtggtacccccacgaacgaagagccccacggatgatgaagtcactccctccgcggtggtgcgacgaaacgccagtggtttaactaatggactctcaagccaggagaggcctaagtccgcagtatttcccggtgagggaaaagtcaagatgtcggtcgaagaacaaattgacagaatgagaaggcatcagtctgggtctatgcgggagaagcggcgtagtctgcaactaccagcgtccccagcgcctgacccctcgcctcggcctgcatataaggtggttagacgacacaggtccattcacgaggtagacatttccaacctcgaggcagcccttagagccgaggaacctggtggtcacgcatatgaaacacccagagaagaaattgctagactgcgtaagatggagctagaaccccagcactacgacgtggatatcaacaaggagcttagcactcccgataaagtcctgatcccagaacggtatatcgatctggaacctgacaccccactttctcccgaggagctcaaagagaagcaaaagaaagtggagaggatcaaaacactgatcgccaagtccagtatgcagaacgtggtacctatcggtgagggcgatagtgtggatgtaccccaagattccgaaagccagttgcaggaacaggagaaacgtattgagatttcctgtgccctcgccaccgaggcttcccgtcggggtaggatgctcagtgtgcagtgcgcaaccccttcgcccccaacctcgcctgcatcacctgcccctcccgctaatccactgagctcagagagtccccgaggagcagattccagctacacaatgcgcgtatag

SEQ ID NO: 183284 - protein, 1132 aa, Artificial Sequence
  derived and/or modified sequence
MELFQAKDHYILQQGERALWCSRRDGGLQLRPATDLLLAWNPICLGLVEGVIGKIQLHSDLPWWLILIRQKALVGKLPGDHEVCKVTKIAVLSLSEMEPQDLELELCKKHHFGINKPEKIIPSPDDSKFLLKTFTHIKSNVSAPNKKKVKESKEKEKLERRLLEELLKMFMDSESFYYSLTYDLTNSVQRQSTGERDGRPLWQKVDDRFFWNKYMIQDLTEIGTPDVDFWIIPMIQGFVQIEELVVNYTESSDDEKSSPETPPQESTCVDDIHPRFLVALISRRSRHRAGMRYKRRGVDKNGNVANYVETEQLIHVHNHTLSFVQTRGSVPVFWSQVGYRYNPRPRLDRSEKETVAYFCAHFEEQLNIYKKQVIINLVDQAGREKIIGDAYLKQVLLFNNSHLTYVSFDFHEHCRGMKFENVQTLTDAIYDIILDMKWCWVDEAGVICKQEGIFRVNCMDCLDRTNVVQAAIARVVMEQQLKKLGVMPPEQPLPVKCNRIYQIMWANNGDSISRQYAGTAALKGDFTRTGERKLAGVMKDGVNSANRYYLNRFKDAYRQAVIDLMQGIPVTEDLYSIFTKEKEHEALHKENQRSHQELISQLLQSYMKLLLPDDEKFHGGWALIDCDPSLIDATHRDVDVLLLLSNSAYYVAYYDDEVDKVNQYQRLSLENLEKIEIGPEPTLFGKPKFSCMRLHYRYKEASGYFHTLRAVMRNPEEDGKDTLQCIAEMLQITKQAMGSDLPIIEKKLERKSSKPHEDIIGIRSQNQGSLAQGKNFLMSKFSSLNQKVKQTKSNVNIGNLRKLGNFTKPEMKVNFLKPNLKVNLWKSDSSLETMENTGVMDKVQAESDGDMSSDNDSYHSDEFLTNSKSDEDRQLANSLESVGPIDYVLPSCGIIASAPRLGSRSQSLSSTDSSVHAPSEITVAHGSGLGKGQESPLKKSPSAGDVHILTGFAKPMDIYCHRFVQDAQNKVTHLSETRSVSQQASQERNQMTNQVSNETQSESTEQTPSRPSQLDVSLSATGPQFLSVEPAHSVASQKTPTSASSMLELETGLHVTPSPSESSSSRAVSPFAKIRSSMVQVASITQAGLTHGINFAVSKVQKSPPEPEIINQVQQNELKKMFIQCQTRIIQI

SEQ ID NO: 183285 - protein, 375 aa, Artificial Sequence
  derived and/or modified sequence
MELFQAKDHYILQQGERALWCSRRDGGLQLRPATDLLLAWNPICLGLVEGVIGKIQLHSDLPWWLILIRQKALVGKLPGDHEVCKVTKIAVLSLSEMEPQDLELELCKKHHFGINKPEKIIPSPDDSKFLLKTFTHIKSNVSAPNKKKVKESKEKEKLERRLLEELLKMFMDSESFYYSLTYDLTNSVQRQSTGERDGRPLWQKVDDRFFWNKYMIQDLTEIGTPDVDFWIIPMIQGFVQIEELVVNYTESSDDEKSSPETPPQESTCVDDIHPRFLVALISRRSRHRAGMRYKRRGVDKNGNVANYVETEQLIHVHNHTLSFVQTRGSVPVFWSQVGYRYNPRPRLDRSEKETVAYFCAHFEEQLNIYKKQQQK

SEQ ID NO: 183286 - DNA, 3399 bp, Artificial Sequence
  derived and/or modified sequence
atggagctgttccaggccaaggaccactacatcctgcagcagggcgagagagccctgtggtgcagcagaagagacggcggcctgcagctgagacccgccaccgacctgctgctggcctggaaccccatctgcctgggcctggtggagggcgtgatcggcaagatccagctgcacagcgacctgccctggtggctgatcctgatcagacagaaggccctggtgggcaagctgcccggcgaccacgaggtgtgcaaggtgaccaagatcgccgtgctgagcctgagcgagatggagccccaggacctggagctggagctgtgcaagaagcaccacttcggcatcaacaagcccgagaagatcatccccagccccgacgacagcaagttcctgctgaagaccttcacccacatcaagagcaacgtgagcgcccccaacaagaagaaggtgaaggagagcaaggagaaggagaagctggagagaagactgctggaggagctgctgaagatgttcatggacagcgagagcttctactacagcctgacctacgacctgaccaacagcgtgcagagacagagcaccggcgagagagacggcagacccctgtggcagaaggtggacgacagattcttctggaacaagtacatgatccaggacctgaccgagatcggcacccccgacgtggacttctggatcatccccatgatccagggcttcgtgcagatcgaggagctggtggtgaactacaccgagagcagcgacgacgagaagagcagccccgagacccccccccaggagagcacctgcgtggacgacatccaccccagattcctggtggccctgatcagcagaagaagcagacacagagccggcatgagatacaagagaagaggcgtggacaagaacggcaacgtggccaactacgtggagaccgagcagctgatccacgtgcacaaccacaccctgagcttcgtgcagaccagaggcagcgtgcccgtgttctggagccaggtgggctacagatacaaccccagacccagactggacagaagcgagaaggagaccgtggcctacttctgcgcccacttcgaggagcagctgaacatctacaagaagcaggtgatcatcaacctggtggaccaggccggcagagagaagatcatcggcgacgcctacctgaagcaggtgctgctgttcaacaacagccacctgacctacgtgagcttcgacttccacgagcactgcagaggcatgaagttcgagaacgtgcagaccctgaccgacgccatctacgacatcatcctggacatgaagtggtgctgggtggacgaggccggcgtgatctgcaagcaggagggcatcttcagagtgaactgcatggactgcctggacagaaccaacgtggtgcaggccgccatcgccagagtggtgatggagcagcagctgaagaagctgggcgtgatgccccccgagcagcccctgcccgtgaagtgcaacagaatctaccagatcatgtgggccaacaacggcgacagcatcagcagacagtacgccggcaccgccgccctgaagggcgacttcaccagaaccggcgagagaaagctggccggcgtgatgaaggacggcgtgaacagcgccaacagatactacctgaacagattcaaggacgcctacagacaggccgtgatcgacctgatgcagggcatccccgtgaccgaggacctgtacagcatcttcaccaaggagaaggagcacgaggccctgcacaaggagaaccagagaagccaccaggagctgatcagccagctgctgcagagctacatgaagctgctgctgcccgacgacgagaagttccacggcggctgggccctgatcgactgcgaccccagcctgatcgacgccacccacagagacgtggacgtgctgctgctgctgagcaacagcgcctactacgtggcctactacgacgacgaggtggacaaggtgaaccagtaccagagactgagcctggagaacctggagaagatcgagatcggccccgagcccaccctgttcggcaagcccaagttcagctgcatgagactgcactacagatacaaggaggccagcggctacttccacaccctgagagccgtgatgagaaaccccgaggaggacggcaaggacaccctgcagtgcatcgccgagatgctgcagatcaccaagcaggccatgggcagcgacctgcccatcatcgagaagaagctggagagaaagagcagcaagccccacgaggacatcatcggcatcagaagccagaaccagggcagcctggcccagggcaagaacttcctgatgagcaagttcagcagcctgaaccagaaggtgaagcagaccaagagcaacgtgaacatcggcaacctgagaaagctgggcaacttcaccaagcccgagatgaaggtgaacttcctgaagcccaacctgaaggtgaacctgtggaagagcgacagcagcctggagaccatggagaacaccggcgtgatggacaaggtgcaggccgagagcgacggcgacatgagcagcgacaacgacagctaccacagcgacgagttcctgaccaacagcaagagcgacgaggacagacagctggccaacagcctggagagcgtgggccccatcgactacgtgctgcccagctgcggcatcatcgccagcgcccccagactgggcagcagaagccagagcctgagcagcaccgacagcagcgtgcacgcccccagcgagatcaccgtggcccacggcagcggcctgggcaagggccaggagagccccctgaagaagagccccagcgccggcgacgtgcacatcctgaccggcttcgccaagcccatggacatctactgccacagattcgtgcaggacgcccagaacaaggtgacccacctgagcgagaccagaagcgtgagccagcaggccagccaggagagaaaccagatgaccaaccaggtgagcaacgagacccagagcgagagcaccgagcagacccccagcagacccagccagctggacgtgagcctgagcgccaccggcccccagttcctgagcgtggagcccgcccacagcgtggccagccagaagacccccaccagcgccagcagcatgctggagctggagaccggcctgcacgtgacccccagccccagcgagagcagcagcagcagagccgtgagccccttcgccaagatcagaagcagcatggtgcaggtggccagcatcacccaggccggcctgacccacggcatcaacttcgccgtgagcaaggtgcagaagagcccccccgagcccgagatcatcaaccaggtgcagcagaacgagctgaagaagatgttcatccagtgccagaccagaatcatccagatctag

SEQ ID NO: 183287 - DNA, 3399 bp, Artificial Sequence
  derived and/or modified sequence
atggagctgttccaggcaaaagatcattatattctgcagcaaggcgaacgcgccctgtggtgtagccgacgcgatggagggttacagctcagacctgctaccgatctcttactggcctggaaccctatttgccttggcttagtggagggagttatcgggaagattcagctccattccgatcttccatggtggctgattctgattaggcagaaagctttggtcggcaagctacctggagaccatgaggtctgcaaagttaccaaaattgctgtgctgtcgctttctgagatggaaccgcaggacctcgagctagagctgtgtaagaaacatcacttcggtatcaacaagccggaaaaaataattcccagccccgacgattccaagttcctcctcaagaccttcactcacatcaagagcaacgtcagcgcaccaaataagaaaaaggtgaaggaatccaaggagaaggagaagctcgaacggagactgctagaggaactgctgaaaatgttcatggactccgagtcgttttactacagcttgacttacgatctgactaactctgtccagaggcagagcacaggggaacgagatggccggcccctgtggcaaaaggtggatgaccgttttttttggaacaagtatatgatccaggacctgaccgaaatcggcaccccggatgttgatttctggatcatcccaatgatccaaggatttgtccaaattgaggagttggttgtaaactacactgagtcatccgacgatgagaagagttcccccgaaactccccctcaggagtccacatgtgtggatgacatccacccgagatttcttgtagcattaatttcgcggcggagccgccaccgcgccgggatgagatacaagaggcgcggagttgataagaatggcaatgtggcaaactatgtggagaccgaacagctcatccacgtgcataaccacactctgagcttcgttcagacaagggggagcgtaccagtattttggtcacaggtcggctatcggtataacccccgtcctagactggaccgatccgagaaagaaacagtggcttatttctgcgcacatttcgaagagcagttgaatatatacaaaaagcaagtcattattaacttggttgaccaggcaggccgagagaaaatcatcggcgatgcctatcttaaacaggtgctgctgttcaataatagtcatcttacttacgtttccttcgacttccatgagcactgccgcgggatgaaattcgagaacgtccagactcttactgacgccatttacgatatcattctagacatgaagtggtgttgggtggacgaggcaggcgtgatctgtaagcaggaagggatcttccgcgtcaattgcatggactgtctcgatagaacaaacgtcgtacaggccgctatcgctagggtcgtcatggagcagcaactgaagaagctgggtgttatgcctcccgagcagcctttaccagtaaagtgcaacaggatctaccagattatgtgggccaataatggagattccattagtaggcagtacgctgggacagccgctctcaagggcgacttcacccgaacaggcgaacgcaagttagctggagtcatgaaagacggagtgaactctgcaaatcggtattatctcaatcggttcaaagacgcgtatcgacaggccgttatcgatttgatgcaaggcatacctgtcaccgaagatctctacagcatctttaccaaagaaaaggaacacgaggcacttcataaagaaaaccagcgcagtcatcaagagctcatcagccagctgctccaatcttacatgaaattgctgctgccagacgatgaaaagttccatggaggctgggcccttatcgattgtgaccccagccttattgacgctacccaccgcgacgtggatgtcttgcttctcctgtccaacagcgcctactacgtggcctattacgatgacgaggtagacaaggtaaaccagtaccagagactgtccctggagaatctggagaagatagaaattggacctgagccaaccctctttgggaaaccgaaatttagctgcatgcggctgcactatcggtacaaggaagcctccggatattttcatactctccgggcggtgatgaggaacccggaggaagatgggaaagacacactgcagtgcattgccgaaatgctccaaattaccaagcaggcaatgggttccgatctccctatcattgaaaagaagttagagaggaagtcaagcaagccacatgaagacattattgggatcagatcccagaaccagggctcattggcgcagggcaagaattttctcatgagtaagttcagttctcttaaccagaaagtgaaacaaacaaagtctaatgtaaatatcggcaatctacgaaagttaggcaattttacaaaaccagagatgaaggtgaatttcctgaaaccaaacttgaaggtcaatctctggaaatctgactcatcccttgaaacaatggagaatacaggagttatggataaggtccaagcagaaagcgatggcgacatgtccagcgacaatgacagctatcattctgacgagtttctgacaaacagcaagtcagatgaagataggcagcttgccaactccctggaaagtgtcggccctattgattacgttctgccaagctgtggcattatcgcctctgcccccaggctgggttcaagatcacaaagccttagctcaactgatagtagcgtgcacgcaccatccgagatcactgtggctcatgggtccggcctggggaaaggtcaggaatcgcccctgaagaagtcgccaagtgccggagatgttcacattctgactgggtttgccaagcccatggacatatattgccatcgattcgttcaggacgcccagaacaaagtcacacatctctccgagacaagaagcgtcagtcaacaggcttctcaggagaggaatcagatgaccaaccaggtttcaaacgagacccagagcgaatctaccgagcaaaccccatcaagaccaagccagctcgacgtgagcctgagcgcaacaggaccacagtttctctccgttgagcccgcgcattcagtggctagccagaaaacaccaacaagtgccagtagtatgctggagttagaaaccggacttcacgtgacacctagcccctccgagtccagcagctcccgagccgtgagtcccttcgccaaaatccggagctccatggtgcaagtggcctctatcacccaggctggactgacccacggcatcaacttcgctgtgagtaaggtgcagaagtcgcccccagagcctgagatcatcaaccaagtgcagcagaacgagctgaagaaaatgttcatccagtgtcagacacggatcattcagatctag

SEQ ID NO: 183288 - DNA, 3399 bp, Artificial Sequence
  derived and/or modified sequence
atggagctgttccaggccaaggaccactacatcctgcagcagggcgagcgggccctgtggtgcagcagaagagatggcggcctgcagctgcggcctgccacagacctgctgctggcctggaaccccatctgcctgggcctggtggagggcgtcatcggcaagatccagctgcacagcgacctgccctggtggctgatcctgatccggcagaaggccctggtgggcaagctgcccggggaccacgaggtgtgcaaggtgaccaagattgctgtgctgagcctgtctgagatggagccccaggacctggagctggagctgtgcaagaagcaccacttcggcatcaacaagccagagaagatcatccccagcccagatgacagcaagttcctgctgaagaccttcacccacatcaagagcaatgtgtctgcccccaacaagaagaaggtgaaggagagcaaggagaaggagaagctggagcggcggctgctggaggagctgctgaagatgttcatggattctgagagcttctactacagcctgacctatgacctgaccaacagcgtgcagaggcagagcactggagagagagatggccggcccctgtggcagaaggtggatgaccgcttcttctggaacaagtacatgatccaggacctgacagagatcggcaccccagatgtggacttctggatcatccccatgatccagggctttgtgcagatcgaggagctggtggtgaactacacagagagcagtgatgatgagaagagcagccctgagaccccaccccaggagagcacctgtgtggatgacatccacccccgcttcctggtggccctgatcagcagaagaagccgccacagagctggcatgagatacaagagaagaggagtggacaagaatggaaatgtggccaactacgtggagacagagcagctgattcatgtgcacaaccacaccctgagctttgtgcagacccggggctctgtgcctgtgttctggagccaggtgggctaccgctacaacccccggccccggctggacagaagtgagaaggagaccgtggcctacttctgtgcccactttgaggagcagctgaacatctacaagaagcaggtgatcatcaacctggtggaccaggccggccgggagaagatcattggagatgcctacctgaagcaggtgctgctcttcaacaacagccacctgacctacgtgtcctttgacttccacgagcactgccggggcatgaagtttgaaaatgtgcagaccctgacagatgccatctatgacatcatcctggacatgaagtggtgctgggtggatgaggccggggtcatctgcaagcaggagggcatcttccgggtgaactgcatggactgcctggacaggaccaacgtggtgcaggccgccatcgcccgggtggtgatggagcagcagctgaagaagctgggcgtgatgcctcctgagcagcccctgcctgtgaagtgcaaccgcatctaccagatcatgtgggccaacaacggggacagcatcagccggcagtatgccggcacagctgccctgaagggggacttcaccaggactggagagaggaagctggccggcgtgatgaaggatggagtgaacagcgccaaccgctactacctgaaccgcttcaaggatgcctaccggcaggccgtcatcgacctgatgcagggcatccctgtgacagaggacctgtacagcatcttcaccaaggagaaggagcacgaggccctgcacaaggagaaccagaggagccaccaggagctgatcagccagctgctgcagagctacatgaagctgctgctgcctgatgatgagaagttccacggcggctgggccctgattgactgtgaccccagcctgattgatgccacccacagagatgtggatgtgctgctgctgctgagcaacagcgcctactacgtggcctactatgatgatgaggtggacaaggtgaaccagtaccagaggctgagcctggagaacctggagaagattgaaattggccctgagcccaccctgtttgggaagcccaagttcagctgcatgaggctgcactaccgctacaaggaggccagcggctacttccacaccctgcgggctgtgatgagaaatccagaagaagatggcaaggacaccctgcagtgcatcgccgagatgctgcagatcaccaagcaggccatgggcagtgacctgcccatcatcgagaagaagctggagaggaagagcagcaagccccatgaggacatcatcggcatccgcagccagaaccagggcagcctggcccagggcaagaacttcctgatgagcaagttcagcagcctgaaccagaaggtgaagcagaccaagagcaatgtgaacatcggcaacctgaggaagctgggcaacttcaccaagccagagatgaaggtgaacttcctgaagcccaacctgaaggtgaacctgtggaagagtgacagcagcctggagaccatggagaacacaggagtgatggacaaggtgcaggccgagagtgatggagacatgagcagtgacaatgacagctaccacagtgatgagttcctgaccaacagcaagagtgatgaagatcggcagctggccaacagcctggagagcgtgggccccattgattatgtgctgcccagctgtggcatcatcgccagcgccccccggctgggcagccgcagccagagcctgagcagcacagacagctctgtgcacgcccccagcgagatcaccgtggcccacggcagcggcctgggcaagggccaggagagccccctgaagaagagccccagcgctggagatgtgcacatcctgaccggctttgccaagcccatggacatctactgccacagatttgtgcaggatgcccagaacaaggtgacccacctgtctgagaccaggtctgtgtcccagcaggccagccaggagaggaaccagatgaccaaccaggtgtccaatgagacccagagcgagagcacagagcagacccccagccggcccagccagctggatgtgtccctgagcgccaccggcccccagttcctgtctgtggagcccgcccacagcgtggccagccagaagacccccaccagcgccagctccatgctggagctggagaccggcctgcacgtgacccccagccccagcgagagcagcagcagcagagctgtgagcccctttgccaagatccgcagctccatggtgcaggtggccagcatcacccaggccggcctgacccacggcatcaactttgctgtgtccaaggtgcagaagagccccccagagcctgagatcatcaaccaggtgcagcagaatgagctgaagaagatgttcatccagtgccagacccgcatcatccagatctag

SEQ ID NO: 183289 - DNA, 4925 bp, Artificial Sequence
  derived and/or modified sequence
tctcctcctaccggtcgggtgccccggggcgttccctctgccgctgcttctcggcgcggttcctacccggccgctccccgaggcgcgggctctggcggcctcgaccgactaggacgccccgtgcgccgcccgcgggccgccgcctccctgggcgcgcggggccagcatggagctcttccaagccaaggaccactacatcctgcagcagggcgagcgcgcgctgtggtgcagccgccgcgacggcggcctccagctccgacccgctactgatctacttcttgcctggaatcccatttgtttggggttggtagaaggtgttattgggaaaattcaacttcattcagatcttccatggtggcttattctaattcggcagaaagcattggtgggcaaactcccaggagaccatgaggtctgtaaagttaccaaaattgctgtgctctcactttctgaaatggaacctcaggatcttgagctagagctctgtaagaagcatcattttggtattaacaaaccagagaagatcataccatctcctgatgactcaaagtttctactgaagacctttacgcatattaaatccaatgtgtctgctcctaataaaaagaaagttaaggaaagtaaagagaaggagaagttggagaggagattacttgaagagttgctgaagatgttcatggactcagaatccttttattatagcttgacctatgacctgaccaattccgtgcagaggcagagcactggggagagggacggtcggcccctctggcagaaggttgatgaccgatttttttggaataaatacatgatacaagatcttactgagattggtactccagatgtggacttttggattatccccatgatccaaggttttgtgcagattgaagaacttgtggttaattataccgaatcatctgatgatgagaaaagcagcccagagaccccccctcaggagtccacctgtgtagatgatattcacccacgatttctagtggctctcatttcacgccgaagtaggcacagagcaggaatgcgctataaacgaagaggagtggataaaaatggaaatgttgccaattatgtggagactgagcagttgattcatgttcataatcataccctgtcatttgttcaaacacgaggctctgtgcctgtcttttggagccaggttgggtatcgatataacccaagaccgcggctggacagaagtgaaaaggaaactgttgcctatttctgtgcccatttcgaagaacaactgaacatttacaaaaaacaggttattattaacttggtagaccaggcaggaagagagaagattattggcgatgcttacctgaagcaagtgttgcttttcaacaactcacacctcacttacgtttcgtttgacttccatgagcactgccgaggaatgaagtttgagaatgttcagacactaacagatgccatttatgacattattcttgatatgaagtggtgttgggttgatgaagctggggtaatatgtaagcaggaagggatttttcgtgttaattgtatggactgcctggatcgcaccaacgtggtccaagctgccatcgcgagagtggtcatggaacagcagctgaaaaaattaggtgtgatgcccccggaacagccattacctgtgaaatgtaatcgcatctaccagataatgtgggccaataatggtgactccattagcagacagtatgctgggacagctgctctgaagggtgactttacaaggacaggagaaaggaagttagcaggagttatgaaagatggagtgaactcagcaaacagatattacctcaaccgatttaaggatgcttataggcaagctgttatagatttgatgcaaggcattccagtgacagaagatctttattccatatttaccaaggagaaagaacatgaagctttgcataaggaaaatcagagaagccaccaggaactaattagccagctcttacaaagttacatgaagttactactgcctgatgatgagaagttccatgggggctgggccctcattgactgtgaccctagcctcattgatgctactcacagagacgtggatgtgctgttactgctttctaactctgcctactacgtggcctattatgatgatgaagttgataaagtaaaccagtatcaacgactaagtctagaaaacctggaaaaaattgaaataggccctgaacccactctttttggtaagccaaagttctcctgcatgcgactgcactacagatacaaagaagcgagtggctatttccacacattgcgagctgtaatgcgtaatcctgaagaggatggaaaagatacccttcagtgcattgcagagatgctgcagatcaccaagcaagccatgggatcggatttacccataattgagaagaaacttgagaggaagagcagtaaacctcacgaagacatcattggtatcaggtctcaaaaccaaggttctttggcccagggaaagaattttttaatgagcaaattttcatctctaaatcaaaaagtgaagcagaccaaatccaatgtaaatattggcaacctccgaaagctaggaaactttaccaaacctgaaatgaaagttaactttctaaaaccaaacttaaaagtaaatctttggaaatcagatagtagtcttgaaactatggaaaacacaggagtgatggataaggttcaggcagagtctgatggggacatgtcttcagataatgactcataccactctgatgaattccttacaaattctaagtctgatgaagacaggcagctagctaactcattagagagtgtagggccaatagattacgttcttcctagttgtggtattattgcctcagcgcctcgattgggcagtcggtcccagtctcttagcagcacagatagtagcgttcatgctccttcagagattactgttgctcatgggagtgggcttggaaaaggccaggagtctcctttgaagaaaagtccttctgctggcgacgtacacatattgactggctttgccaagcctatggatatttactgccacagatttgtgcaagatgcacagaacaaagtgacccacctatcagagaccagatctgtgtctcagcaggctagtcaggaaagaaatcaaatgaccaatcaagtttcaaatgaaacccaatcagaatcaacagaacagacaccttctcggccatcgcaattagatgtctctctttctgcaacaggcccacagtttttgtcagttgagccagcgcattcagttgcatctcaaaaaacccccacctccgcttccagcatgcttgaacttgagacagggcttcatgtaactccttctccttcagagagcagtagcagcagagcagtctctccctttgccaagattcgaagttccatggtccaggttgctagtattacccaagctggattaacccatgggataaactttgcagtgtcaaaagttcagaagagtcctccagaacctgaaatcattaatcaagtccagcaaaatgaacttaaaaagatgtttatacaatgccagacacggataattcagatttagcttttagccataagaatccttccatggcttttatttaaaaatatgaaattttcacctcttggggtattttaattgtactgtctgaacccagggatcacaaattctgttcattggaaagggttttaaacggagtcggaacctgagtagatttccaaattttacagccaggactacagaagtgcatcattctagaatgtgtagacctgagtagcttatacactacagagcactttgcttatttgaaagtaattcagcaacaggtcactttgggatataacctgaacctttttttggagtggggtgggtagactacagtagacacaagggctggacatgcagatgcttaggggattagcgtttttcataatttgttctgtttgtcagttcattcctgtgtgttcttacctctacaaagtaaattacacatttagtttttagtgactttaacatgttactgaagcatttgaatataaagctattttagttttgatggcttaactgttccctgaggagttgagggttattgacactagagaaatgaattctcatttgatcctaattttccccgtattctacttgaacacattaaaaatactctgctgcctatacaatgtaaacctaggagcattaagacttgtcacacagtaaacctgatacatcagaggtgaataccagcacctattaggtttcattttgctgttttcaggaatgtaagaacacccatattggctactggaaattctagaagtcagtcaggttttaatttattccaggaggggcatcctcgacatcttatgtagatgatccacaacttcaaaatttagtctgggcctagtgcagtggctcacacctataatcccaacactttgggaggccaggagttttgagaccagcctgggaaacatctgtctctacaaaaaaatacaaaaattagctgggcatagtggtgcatgcctgtgtttctagctacgcaggaggattgcttgagcccatgagattgaggctgcagtgagctgtgatcgtgccactgacctccagcctgggggacagagcaagaccgtgtctcaaaaacaatttagtctgaaacacaattgtgctgaatctgtctgactataactctgaccacacagaaccagggctgcccctgtaatccccacagtaagaaagttgtatggcatattccaacaagtattggttcgtctggtgtctttagagctttactctgttgaagtgactgattctcaactgaacattatgtcgttactttgataagcattccacttttgttatttattagtgctatcttttttttttacgtgttaaatcttgtgattattaaaataaagtaccattgtaattt

SEQ ID NO: 183290 - DNA, 3399 bp, Artificial Sequence
  derived and/or modified sequence
atggagctgttccaggccaaggaccactacatcctgcagcagggcgagcgtgctttgtggtgtagtaggcgggacggtggactccagttgcggcccgctacagatttgttgttagcttggaaccctatctgcctggggttggttgagggggtgatcgggaaaatccagctgcacagtgacctgccttggtggcttatcctgatccgccaaaaggccctggttggcaagctgcccggcgaccatgaggtgtgcaaagtgacaaagatcgccgttcttagcttgagcgaaatggagccgcaagacttagagcttgaattgtgcaaaaagcaccatttcggaatcaacaagcccgagaaaatcattccctctccagacgattccaagttcttgctgaagacattcacccatatcaagagtaacgtctctgcacccaataagaagaaagtgaaggaaagcaaagaaaaggagaaattggagagacgtctgctggaagaactgctgaaaatgttcatggactctgaatccttttattacagcctcacctacgaccttacaaattccgtgcagagacaaagtaccggtgaaagggatgggcgacctctgtggcagaaggtagacgacaggtttttttggaacaagtacatgatacaggatctgacagagatcgggacccctgacgtggacttctggatcattccgatgatccaggggttcgtgcagatcgaagagttggtggtaaactatacagagtcttccgatgacgagaaatcctcccccgagacacctcctcaagaatccacatgtgtggatgatattcacccacggtttctggttgctctcatttccaggcggagccggcacagagctggaatgcgatacaagaggaggggcgtggacaagaatgggaatgtcgccaattatgtggagactgagcagttgatccacgtccataatcatactctgagttttgttcagacccggggatccgtccccgtgttttggagccaagtcggatatcgttataacccccggccacgcctggacagaagtgagaaggagacggtggcctacttctgtgctcatttcgaagaacagttaaatatttataaaaaacaggtcataataaatttagttgatcaggctgggcgggagaaaatcatcggagatgcctatctcaaacaggtgctcctgtttaataactcccacctgacctatgtctccttcgactttcacgagcactgtaggggcatgaaattcgaaaacgttcagacactgaccgacgcgatatacgatattatcttagatatgaagtggtgttgggtcgatgaagccggagtgatttgtaaacaagaggggatctttcgcgtcaattgtatggactgcctggatagaaccaacgtagtacaggctgcaattgcccgtgtggtgatggagcaacagttgaaaaagttaggtgtcatgccccctgaacagcccctgccagtaaagtgtaaccgcatttaccaaataatgtgggctaacaatggggacagtatctcaaggcagtatgctgggacagccgcactcaagggggacttcacccggacaggggagcgaaagctcgctggagtgatgaaggacggggtgaacagcgccaaccgctattacctgaataggtttaaagacgcttatagacaagccgttatcgatttgatgcaaggcattcccgtcactgaggacctatactcgatcttcactaaagagaaggagcacgaggccctgcataaggagaatcagcggtcccaccaggaactgataagtcagctattacagtcctacatgaagctgcttctgccagacgacgaaaagttccacgggggctgggcattgatcgattgtgacccatccttgatcgacgcaacgcatcgagatgtggatgtcctgctgctgctgtccaacagcgcctattatgtagcctactatgacgacgaggttgataaggtcaaccagtaccagcggctatctctcgaaaacctggagaagattgaaatcggacccgaaccgacactgttcggcaagcccaagttctcctgcatgagactacactacaggtacaaggaggcttcagggtatttccacacacttagagctgtcatgagaaaccctgaggaggatgggaaggataccctccagtgcatcgccgaaatgttgcagattaccaaacaagccatgggctcagacctacccattattgaaaagaagctggaacggaagtcatctaaaccccacgaggatattatcgggatccggtcccagaaccagggtagtcttgcccagggaaagaatttcctaatgagcaagttttcctcccttaaccagaaagtcaaacagacaaagagtaatgtgaacatcgggaatctccgtaaacttggcaatttcacaaagcccgagatgaaggtaaacttcctcaagccaaatctgaaggttaacctgtggaaatccgactccagcctggagactatggagaataccggggtcatggacaaggtccaagctgagtctgacggagatatgagttcggacaacgactcttatcactcagacgaattcctcaccaactccaaatctgatgaggacaggcagctcgccaacagcttagaaagcgtgggccccattgattatgtgctcccttcctgcggaatcatcgcatcggcgccccggctgggtagtcggtcacaaagtttaagctctacggatagttcagttcacgcaccctctgagatcaccgttgcccatggctccggcctagggaagggtcaagaaagtccactgaaaaagtccccttcagcaggcgacgtgcatatcctcactggcttcgccaagcccatggacatctactgccacagattcgtgcaggatgcacagaacaaagtcacccatctgtcggaaactaggagtgtgtctcagcaagctagccaggaacgtaaccagatgaccaaccaggtgagcaacgaaacccagtcagagagcacggaacagaccccttctaggcctagtcagctggatgtaagcctgtccgctaccggcccacaatttctgtccgtggagcccgctcacagtgtggcctcccagaaaacacccacctctgcctcttccatgctagaattagagactggactgcatgtgacacccagtccaagcgaaagttcaagttcccgggccgtctcgccattcgccaaaatcagatccagcatggtacaagtcgcttccatcacccaggccgggctaacccacggcatcaactttgctgtctccaaggtgcagaagtctccccctgaaccggaaattatcaaccaggtacaacagaacgagctgaaaaaaatgtttatccagtgccagacccggataatacagatctag

SEQ ID NO: 183291 - DNA, 3399 bp, Artificial Sequence
  derived and/or modified sequence
atggagctctttcaggccaaggatcactatatacttcaacaaggcgaaagggcactgtggtgtagccggcgtgacggaggcctgcaactgaggccagctacagacctcctcttggcatggaatcctatctgcctgggtctcgtagaaggtgtgatcggaaaaatacagctgcattcagacttaccatggtggctgattctcattcgccaaaaagctctagtggggaaattgcctggcgaccatgaggtctgcaaagtgacaaaaattgccgtgctctctctttcagagatggagccccaggatctggaactggagctgtgtaaaaagcaccactttggaatcaataaacctgagaagattattccaagtccagacgattcaaagttcctgctcaagacatttactcacatcaaatcaaatgtgtcagcgcctaacaagaagaaagtcaaagagtctaaggaaaaagaaaagctggaaagacgactactggaggagcttcttaaaatgttcatggactcagaaagtttttactactcgctgacttacgacctgacgaatagcgtccagaggcagagtactggcgagagagacggaagaccattatggcagaaggtggatgacagatttttttggaataagtacatgatccaggatcttaccgaaattggcacgcccgacgtggatttctggattattcctatgattcagggctttgtacaaattgaggaactcgtggtgaattacacagaaagctccgatgacgaaaagagtagtcccgagaccccacctcaagagtctacctgcgttgacgatatccacccacgcttcctagtggccctcatcagccgacgcagtcggcaccgcgctggcatgagatataaacgaagaggagttgacaagaatggcaatgtggctaactacgtggaaactgagcaactcatacacgtccacaaccacaccctgagtttcgtccagactcgagggtctgtgcctgtcttttggagccaggtggggtaccggtataatcccaggccaaggctggatcggtccgaaaaggaaactgtcgcctacttttgtgcccacttcgaggagcagctcaatatatataagaaacaggtgataataaaccttgtggatcaggccggaagggagaaaatcataggagacgcctacctcaagcaggtgctcttgttcaacaactcccacttgacatatgtcagcttcgatttccacgagcactgccgcggtatgaaattcgagaatgtccagaccttgacagacgctatctatgatattatcctggatatgaagtggtgctgggttgatgaagccggagtgatatgcaagcaagaaggcatcttcagagttaactgtatggactgcctagaccgtaccaatgtcgtccaggccgcaatagccagggttgtgatggaacaacagctcaagaagcttggagttatgccccctgagcaaccgcttccggtaaaatgcaacaggatttatcagatcatgtgggcaaataacggggacagcatcagccggcaatacgctggaaccgctgcacttaagggcgacttcacccgcacaggggaacggaagttagctggcgtcatgaaagacggagtgaatagcgccaaccgctactaccttaatcgtttcaaggatgcttatagacaagctgtcatcgatttgatgcagggtatccctgtaacagaagatctatactcaatcttcacaaaggagaaagagcacgaagcactccacaaggaaaaccagcgttctcatcaggagcttatttcacagttgctacagagctatatgaagcttttgctgcctgacgatgagaaattccacggtggttgggcactgattgattgcgatccgagtctcatcgatgctacccacagagatgttgatgtgctgctcttgctaagcaatagtgcttattacgtcgcctattacgacgacgaggtggacaaagtgaatcagtaccagcgcctgtctctggagaatcttgagaagattgagatcggccctgaacccactctgttcggaaagcccaaattcagctgcatgcggctacattacaggtataaggaggccagtgggtactttcataccctgagggccgtgatgaggaacccagaagaagatggtaaggacactcttcagtgcattgctgaaatgctccagattacaaaacaagctatgggatcggaccttccgattatcgagaaaaaactcgagcgcaaatcctcaaagccccatgaggatataattggtatccgttcccagaaccaaggatcgttagcacaggggaagaacttcctgatgtctaaattcagcagcttgaaccaaaaggttaaacagacgaagtctaatgtgaacatcggaaacctgaggaagctagggaactttaccaaaccggaaatgaaggtcaacttcctgaagccaaacttgaaagttaacctgtggaagagcgattcctctctggagacaatggagaacaccggtgtgatggataaggtgcaggccgaatccgacggagacatgtccagcgacaacgattcatatcacagcgacgagttcttaactaatagcaaatctgacgaggaccgtcagctggcgaattcactggagagcgtaggaccaatcgactatgtcctcccaagttgtggtattattgctagcgcccctaggttggggtcacgctcccagagcctgtcatctacggattctagtgtccacgctccgtccgagataactgtcgcccacggcagcgggctgggtaagggacaggaatcccccctgaaaaaatctcctagcgcaggggacgtccacatactgacaggctttgccaagccaatggacatttactgccaccgttttgtgcaagatgctcagaacaaagttacccacctgtccgaaacccgcagcgtctctcaacaggcctcccaagaacggaaccagatgacaaaccaagtctctaacgaaacgcagtccgagagtactgaacagacccctagccggccttcacagttggatgtgtccctgtccgcgacaggaccacaattcttatcggtggagcctgcacattctgtggctagtcagaagacacccacctcagcatcttcaatgcttgagttggagactgggctgcatgtcactcctagcccatcagagtcctcctccagcagggccgtgtcaccctttgcaaagatccgatcttcaatggtgcaagtggccagcataactcaagccggactcacccacggcattaactttgccgttagcaaggttcagaagtccccgccagaacccgaaattatcaatcaggtgcagcaaaacgagctaaaaaaaatgttcatccaatgccagacccgtattatacagatctag

SEQ ID NO: 183292 - protein, 919 aa, Artificial Sequence
  derived and/or modified sequence
MAADVFMCSPRRPRSRGRQVLLKPQVSEDDDDSDTDEPSPPPASGAATPARAHASAAPPPPRAGPGREEPPRRQQIIHSGHFMVSSPHREHPPKKGYDFDTVNKQTCQTYSFGKTSSCHLSIDASLTKLFECMTLAYSGKLVSPKWKNFKGLKLQWRDKIRLNNAIWRAWYMQYLEKRKNPVCHFVTPLDGSVDVDEHRRPEAITTEGKYWKSRIEIVIREYHKWRTYFKKRLQQHKDEDLSSLVQDDDMLYWHKHGDGWKTPVPMEEDPLLDTDMLMSEFSDTLFSTLSSHQPVAWPNPREIAHLGNADMIQPGLIPLQPNLDFMDTFEPFQDLFSSSRSIFGSMLPASASAPVPDPNNPPAQESILPTTALPTVSLPDSLIAPPTAPSLAHMDEQGCEHTSRTEDPFIQPTDFGPSEPPLSVPQPFLPVFTMPLLSPSPAPPPISPVLPLVPPPATALNPPAPPTFHQPQKFAGVNKAPSVITHTASATLTHDAPATTFSQSQGLVITTHHPAPSAAPCGLALSPVTRPPQPRLTFVHPKPVSLTGGRPKQPHKIVPAPKPEPVSLVLKNARIAPAAFSGQPQAVIMTSGPLKREGMLASTVSQSNVVIAPAAIARAPGVPEFHSSILVTDLGHGTSSPPAPVSRLFPSTAQDPLGKGEQVPLHGGSPQVTVTGPSRDCPNSGQASPCASEQSPSPQSPQNNCSGKSDPKNVAALKNRQMKHISAEQKRRFNIKMCFDMLNSLISNNSKLTSHAITLQKTVEYITKLQQERGQMQEEARRLREEIEELNATIISCQQLLPATGVPVTRRQFDHMKDMFDEYVKTRTLQNWKFWIFSIIIKPLFESFKGMVSTSSLEELHRTALSWLDQHCSLPILRPMVLSTLRQLSTSTSILTDPAQLPEQASKAVTRIGKRLGES

SEQ ID NO: 183293 - protein, 218 aa, Artificial Sequence
  derived and/or modified sequence
MDEQGCEHTSRTEDPFIQPTDFGPSEPPLSVPPPPISPVLPLVPPPATALNPPAPPTFHQPQKFAGVNKAPSVITHTASATLTHDAPATTFSQSQGLVITTHHPAPSAAPCGLALSPVTRPPQPRLTFVHPKPVSLTGGRPKQPHKIVPAPKPEPVSLVLKNARIAPGEPGGETQCGAPPDPEGCFPIPKAFKLVTTTTTLVCTCMRTHIHLNETKVS

SEQ ID NO: 183294 - protein, 526 aa, Artificial Sequence
  derived and/or modified sequence
MDEQGCEHTSRTEDPFIQPTDFGPSEPPLSVPQPFLPVFTMPLLSPSPAPPPISPVLPLVPPPATALNPPAPPTFHQPQKFAGVNKAPSVITHTASATLTHDAPATTFSQSQGLVITTHHPAPSAAPCGLALSPVTRPPQPRLTFVHPKPVSLTGGRPKQPHKIVPAPKPEPVSLVLKNARIAPAAFSGQPQAVIMTSGPLKREGMLASTVSQSNVVIAPAAIARAPGVPEFHSSILVTDLGHGTSSPPAPVSRLFPSTAQDPLGKGEQVPLHGGSPQVTVTGPSRDCPNSGQASPCASEQSPSPQSPQNNCSGKSDPKNVAALKNRQMKHISAEQKRRFNIKMCFDMLNSLISNNSKLTSHAITLQKTVEYITKLQQERGQMQEEARRLREEIEELNATIISCQQLLPATGVPVTRRQFDHMKDMFDEYVKTRTLQNWKFWIFSIIIKPLFESFKGMVSTSSLEELHRTALSWLDQHCSLPILRPMVLSTLRQLSTSTSILTDPAQLPEQASKAVTRIGKRLGES

SEQ ID NO: 183295 - DNA, 5400 bp, Artificial Sequence
  derived and/or modified sequence
atggccgccgacgtcttcatgtgctccccgcgccggcctcgcagccggggccgccaggtgctgctcaagccccaggtgtccgaggacgacgacgactcggacacggatgagccgtccccgccgcccgcctccggcgcggccaccccggcccgggcccacgcgagcgccgcgccaccgccgcctcgggccgggccgggccgcgaggaacctccgcgccgccagcagatcatccacagcggccacttcatggtgtcgtcgccgcaccgagagcacccgcccaagaagggctacgatttcgacacggtcaacaaacagacgtgccagacctacagcttcggcaagactagctcctgccacctgtccatcgacgcctcgctcaccaagctcttcgagtgcatgactttggcctacagtgggaagttggtgtctccaaagtggaagaatttcaagggcctgaagctacagtggagagacaagatccggctcaataatgccatctggcgggcctggtacatgcagtatctggagaagcgcaagaatcctgtgtgccactttgtgacacccctggacggctctgtggacgtagacgagcaccgccggccggaggccatcaccacggaagggaagtactggaagagccgcatcgagattgtgatccgggagtatcacaagtggagaacctacttcaagaaaaggctacagcagcacaaggatgaggacctctccagcctggtccaggacgatgacatgctgtattggcacaagcacggggatggatggaagacccccgtccccatggaggaggatcccctgctggacacagacatgctcatgtcggaattcagcgacaccctcttctccacactttcttcacaccagccggtggcctggcccaatccccgggaaatagcacatctgggaaatgcagacatgatccagccgggactgattcctttgcagcctaacctggacttcatggacacctttgagcctttccaggacctcttctcttctagccgctccatttttggctccatgctacctgcatctgcctcagcacctgtaccagatcccaacaacccacctgcacaggagagcatcctgccgaccacagccctccccactgtgagccttcctgacagcctcatcgcgccccctaccgccccatccctggctcacatggatgagcagggctgtgaacacacctcccggactgaggacccgtttatccagcccacggacttcggtccctcagagccgccactgagtgtcccgcagcccttcctccctgtcttcaccatgcccctgctgtctcccagccccgccccaccgcccatctcccccgtgttaccattagttcctcctcctgccactgccctgaaccccccggctccacccaccttccatcagccacagaagtttgctggagtcaacaaagcgccgtctgtcatcacccacacggcctctgccaccctcacccacgatgcccccgccaccacctttagccagagtcagggccttgtgatcaccacccatcaccctgccccgtcagcggccccttgtgggctggcactgtctcctgtcacccggcctccccagccacggttaacttttgtgcaccccaaacctgtatccttgactgggggcaggcctaagcagccccacaaaatagtgcctgctcccaaaccagagcccgtgtccttggtgttgaagaatgcccgtatcgccccagctgccttttcaggccaaccacaagcggtgatcatgacgtcagggcctctgaagagagaagggatgttggcctccaccgtgtcccagtccaacgtggtcattgcgcctgctgccatcgccagggctcctggggtcccggagttccacagcagcatcctggtgacagatctcggccatggcacgagcagcccgcctgcccccgtctcccggctcttcccaagcacagcgcaagaccccctggggaagggcgagcaggtcccgctgcatgggggcagcccccaggtcactgtcacagggcccagtcgggactgcccaaactcagggcaggcctctccgtgtgcatcggagcagagccccagtcctcaatctccccagaacaactgctcagggaaatccgaccccaaaaatgtggctgcactaaagaaccggcagatgaagcacatctcagctgagcagaaaaggcgcttcaacatcaagatgtgcttcgacatgctcaacagcctcatctccaacaattccaagctgaccagtcacgccatcacactgcagaagactgtggagtacatcaccaagctgcagcaggagagaggccagatgcaggaggaggcccggcggctgcgggaggagatcgaggagctcaatgccaccatcatctcctgccagcagctgctccctgccacgggagtccccgttacccggcgccagtttgatcacatgaaagacatgtttgacgaatacgtgaaaacccggaccttgcagaattggaagttctggattttcagcatcatcatcaagccgctgtttgagtcgttcaagggcatggtgtccaccagcagcctggaggagctgcaccggacggcgctctcctggctggaccagcactgctccctgcccatcctcaggccgatggtattgagcacgctgcggcagctgagcacctccacctccatcctcacagacccggcacagctgccagagcaggcgtccaaggctgtcaccaggattggcaagagattgggagagtcctagctgcttagctggcatgtggccgcatgagatgccaggagacccttccctgcccatggagagtaggctgcgccccccagcccttcctgacgctcagcctcggggcctctctccaactctgccggcccaccgtggcatcgggaggccatgctcaggtctgaagcaggtttggggcctgctgacagcaatagcccgcctttgggaaccccttgctgtgaactctctcactcagtgacctcagtcaccaacctcctctgccctcggggcagcccacacaaaagggaagtgctggccgtgctggtcctgccctgctggtggcctgccgggcctggcgccggtgagcggaatcgatgggatgagggtgacagggcctgctcctgtcctgaggcccagccttgtccctcctgccacgtcctgtccacatgcatgcctctgcctgatgccctgctccactctctggtctgcccgtggggcagttggaaggcgtctttctttctcccctcaactctgacagcacccagcccttgtggatggacttgggcttctattcaggcttatgcatggcaggctgccagggggaagtgccttcttcagaggtcctccaggacacatgtgtgcagaaacggtggatgtggaacacacaggaccagaatggaagcgtgtgatgcacggtggctgctctggctgagaggccctgctgggcatgtttcatctgtccccttttagctccacctgacattgcaggatccatggggactcagcccagggccttctcggatgtcacctcaccgctgtggcccttctgccgttcttctccacttggctccagctgcagctgttgacagatcaagcatgtcctgtgggagcttagaaccctgaagttctagtgtctgaaagatcagactccacgtcctgctgtcagccttgtcatcttgtctgatgtctttcagctgggagccccaaaccaggacagttctcggaccaaagatgcccccacactcaaaagtctgtcccgtcttgtgtttggagaaggaaacaatgttggcaggcagcactctgtggtggtcagccctcagagctgtttctaggcatctctcagatcagacagcaaagaatctacccagatctgggctgggtggaggtgtggctgggctgggggccattctgagcctgcagtgagagtttggcccagcctcagtccttgctcttctctggctacctctgcagggagctgcaggggcaagcactctctccagcactcaggaagcccggccgagggtacctcctcgtggaaagaatgcactttaaagctctgctgaggagttcggagcccaggctttcaggcgacctctgccctccctgcctctcctcaccctccctctcttcctgcagggcctgggaagggctttgagggagcctgggagccatgtgaagaggggcacgcctgggctgtcccacagtttagatccagttggaggttctccctggctcctgcaggcctgcggggatctctccccacttcaggcctccggccagctgcctgccctcttgtctgtgcttcagccctgcacaaaagcagcttggtgacaccactcagccacccagagtacgtgtttacaggctttccagatcaccttcctgtggggtgaacgtaatgaggcggggctggtccttggaatttcccctggaaaatggtaacagactccatccttgacccggggatgagcatgaaggcattgtcccaaaggcagaggccaccgtggtaggaattccaccaaggccagaagggaaaaaggaagaacccaccgtgtctggctgtgcgggccctggggagggtcgtgagtgcagcccctctctacttctgtgcctttgtaaaacgtgtagataaccgcagtggttggctgagccaagaactctcctaaatcagtggctttctccccaccccttgctggggagtcatttttaaaaaaatctgtgggatataaaattggcctcctgctgcttcagcctacctctccctctgctgacttaatgtcgtgattctgtttcttcagatatttaaggctgttaggttgtgtgagccttgaagtgtgtgtgtgtgtcccagcgactgtccactgtccaggagatgcatgtctttgtattggagatatttctgtaactcattctcttggtgctcacgattgccatggccatagggccacagtgccgtatctgctgcagacatgattgtttcttgttctagaggttttcttgttttcgaatcttgcctgatgaatccagccagaccaaggggcctagatttgacctctgtcctgggctcctgggccaggtgcaggaacatctgaggccactctgctggccacctccagtgggtgctgaccacaggatgggctttgtttacactcattttcaccctgattcttgcccccactttcataaaagaaacttcaaaatgctgacgctttggagagtaagaaaatcaatcttggctgggcacggtggctcctgcctgtgatcctagcactttgggaggctgaagctgaaggatcacttgagctcaggagttggagaccaaccctggcaacataacaagaccctgtctctacaaaaaaaaaaaaaaaaaaaaaaaaaaaaaaaaaa

SEQ ID NO: 183296 - DNA, 2760 bp, Artificial Sequence
  derived and/or modified sequence
atggcggccgatgtctttatgtgctctcccaggaggcccagaagcagaggtcgtcaggtgctgctcaaaccccaagtctccgaggatgatgacgattcagataccgacgagcccagtcctccacccgcaagcggggccgccacgcctgctcgggcccatgcatctgccgctccacctcccccccgcgctggccctggacgcgaggagccaccccggcgccaacaaataatccattctggtcattttatggtgtccagcccccatagggaacaccctcctaagaagggttatgattttgacaccgtcaacaaacagacctgtcagacctattccttcggaaagacctcttcttgccacctgtctatcgacgcttccctcacaaagctctttgagtgtatgacactggcgtactcaggaaagctcgtctcccctaaatggaagaatttcaagggtctgaagttgcagtggagggataagatccgacttaacaacgccatctggcgagcttggtatatgcagtacttggagaagcggaagaaccccgtgtgtcatttcgtgacccctctggacgggagcgttgatgtggatgaacaccggagacctgaagcgataactacagagggcaaatactggaagagtcgaattgagatagtgatccgggaataccataagtggcgcacctactttaagaaacgattgcagcagcacaaggatgaggacctgtcaagcttggttcaggatgatgacatgctttactggcataagcacggcgacggatggaagactccagtccctatggaagaagatccactgttagatactgacatgttaatgtccgaattttccgacacactgttctccactctgtccagccaccagcccgttgcctggcccaacccgagagaaatcgcacacctggggaacgccgacatgattcaaccaggtctgatcccactccaaccaaatctggatttcatggacacattcgagccatttcaggaccttttctcaagctccaggagtatttttgggagcatgttacccgctagcgcaagtgcccccgtgccagacccaaataatccacccgcccaggagagtattcttcccactactgctctgcctacagtttcacttcctgatagcctgatcgctccgcctacagcaccctccctggcccatatggacgaacaaggctgtgaacatacatctcgcacggaggatcccttcatacaaccaacagactttggacctagcgagccacctctgtccgtgccacagcccttcctcccggtgttcaccatgccactgctgagcccgagtccggcccctccacctatttcacctgtgctccccctggtgccaccacctgctacagctcttaacccaccagcgcctccaacgttccaccagccccagaagttcgccggagtaaataaagctccctccgtcatcacacacactgcctctgctacactcacccatgatgcgcctgctactacattttcgcagagccagggcttggtcatcacgacccaccaccctgcccccagcgccgccccttgcggacttgccctgtcgcctgtgactcgccctccgcagccacggctgacctttgtgcacccaaagcctgtttcacttaccggcggccgcccaaagcaacctcataagatcgtgcctgctcccaagcctgagcctgtgagcctggtcctaaaaaatgcccggattgccccagcggccttcagcggacagccccaagccgtgattatgacgtccgggcctctgaagcgagaaggaatgctagccagtacggtctcacagagcaacgtcgtcattgcccccgccgcaatcgcccgcgctcctggagtgcctgaattccattcgagtatcctcgtaaccgatctgggacatgggacttcatcacccccagctccagtatcccgtctgtttccttccaccgcccaggacccactggggaagggagagcaagtccctcttcatggtgggtcaccacaggttacagtcacaggccctagccgcgactgccctaactctggccaggctagtccgtgcgcgagcgagcagtcgccttctccccagtccccccagaacaattgtagcggaaagtctgacccgaaaaacgtggccgctctgaagaaccggcagatgaagcacatttcggctgagcaaaagcgccgcttcaatatcaaaatgtgcttcgacatgttgaactccctcataagcaataattctaagttgacgtctcatgcgataactctccagaagactgtggagtacattacaaagctgcagcaggaacggggccagatgcaggaggaggcccggcgcctgagggaagagatcgaagagttaaacgcaacaattatctcctgccaacagctgctgcctgcgacaggtgtccctgtgacccggcgtcaattcgaccacatgaaagacatgtttgacgaatacgtgaaaactcggaccttgcagaattggaaattttggattttttccataatcataaagcccttgttcgagagctttaaaggaatggtctctacttcttctctggaggaactgcaccgcaccgctctgtcctggctggatcagcattgcagcttgccaatcctgcgaccaatggtcctgagcacacttcgccagctgtctacttccacttctatcctcaccgaccccgcccagctgccagaacaggcatcaaaggctgtcacgagaatagggaagcgtctcggcgaaagctag

SEQ ID NO: 183297 - DNA, 1581 bp, Artificial Sequence
  derived and/or modified sequence
atggacgaacaaggctgtgaacacacatccaggactgaggatcccttcatccagccaacagattttggcccctcagagccccccctttcggtaccccaacctttcctacccgtgttcaccatgccccttctttcccccagccctgcacctccacccatatctccagtgttgcccctcgtgccaccacctgcaaccgctttgaaccccccagcccctcccactttccaccagcctcaaaagttcgctggagtgaataaagcaccatccgtgatcactcatacagcctcggccacacttactcacgatgctcctgcgaccactttttcacagtctcaaggacttgtgatcacaacacaccaccctgccccatctgcagctccatgtgggttggcactgtctccagtgaccaggccccctcagccgcgattaacttttgtgcaccctaagcccgtttctttaactggtggccgtcccaagcagccgcacaaaatcgttccagcacctaagcctgaacccgtctcgctggttctgaagaatgctcgaatcgctcctgctgccttctctggtcagccccaggcagtcataatgacttctggcccccttaaaagggaggggatgttagcatcgacagtcagccagtccaacgttgtgatcgctcctgctgcaatcgctcgagcaccaggagtgccagaatttcactcaagtattctggttacagatctgggccatggcactagttcaccgccagccccagtgagtaggctgttcccatcaaccgcacaagaccctctaggtaagggcgaacaggtacccctgcacgggggtagtccccaggtgaccgtcaccggccctagccgtgactgtccaaattccggccaggcctccccttgcgcttcggagcagtccccgagcccccagtctccccagaacaactgcagtggtaaatcggacccgaagaacgtggccgccttgaaaaaccgacagatgaagcatatcagcgcagagcaaaagcggcggtttaacatcaagatgtgcttcgacatgctgaactccctgatatcaaataattccaagctgacttctcacgctattaccctgcaaaaaaccgtcgagtacatcacaaaattgcagcaagagcgcggacagatgcaagaagaggcccgacgactccgcgaggagatcgaagaactgaatgcaactattatctcctgtcaacaactcctccctgcaactggcgtccccgtgactaggaggcagttcgaccacatgaaggacatgttcgatgagtacgtgaagacgaggaccctccagaattggaaattctggatcttctccatcattatcaagcccctgttcgagtctttcaagggaatggtgtctacgtcatcactcgaggagctgcataggactgccttgtcctggctcgaccaacactgctcacttccaatcctgcggccgatggtgctctcgactcttcgccagttgagcaccagcaccagtatcctgactgatccggcccagctccctgaacaagcatccaaagccgtgacccgaatcggaaagcggctgggagaatcttag

SEQ ID NO: 183298 - DNA, 2760 bp, Artificial Sequence
  derived and/or modified sequence
atggctgctgatgtgttcatgtgcagcccccggcggcccaggagccggggccggcaggtgctgctgaagccccaggtgtctgaagatgatgatgacagcgacacagatgagcccagccccccaccagccagcggggccgccaccccagcccgggcccacgccagcgctgcccctcctccacccagggctggccctggccgggaggagcccccccggcggcagcagatcatccacagcggccacttcatggtgagcagcccccaccgggagcacccccccaagaagggctatgactttgacacagtgaacaagcagacctgccagacctacagctttgggaagaccagcagctgccacctgagcattgatgccagcctgaccaagctgtttgagtgcatgaccctggcctacagcggcaagctggtgagccccaagtggaagaacttcaagggcctgaagctgcagtggagggacaagatccggctgaacaatgccatctggagggcctggtacatgcagtacctggagaagaggaagaaccctgtgtgccactttgtgacccccctggatggctctgtggatgtggatgagcacagaagacctgaggccatcaccacagagggcaagtactggaagagcagaattgaaattgtcatccgggagtaccacaagtggaggacctacttcaagaagaggctgcagcagcacaaggatgaggacctgagcagcctggtgcaggatgatgacatgctgtactggcacaagcatggagatggctggaagacccctgtgcccatggaggaggaccccctgctggacacagacatgctgatgtctgagttcagtgacaccctcttcagcaccctgagcagccaccagcctgtggcctggcccaacccccgggagatcgcccacctgggcaatgctgacatgatccagcccggcctcatccccctgcagcccaacctggacttcatggacacctttgagcccttccaggacctcttcagcagcagccgcagcatcttcggctccatgctgcctgccagcgccagcgcccctgtgcctgaccccaacaaccccccagcccaggagagcatcctgcccaccacagccctgcccaccgtgtccctgcctgacagcctgattgccccacccacagcccccagcctggcccacatggatgagcagggctgtgagcacaccagcaggacagaggaccccttcatccagcccacagactttggccccagcgagccccccctgtctgtgccccagcccttcctgcccgtcttcaccatgcccctgctgagccccagccctgcccccccacccatcagccctgtgctgcccctggtgcccccaccagccacagccctgaaccccccagccccacccaccttccaccagccccagaagtttgctggggtgaacaaggcccccagcgtcatcacccacacagccagcgccaccctgacccatgatgccccagccaccaccttcagccagagccagggcctggtgatcaccacccaccacccagcccccagcgctgccccctgtggcctggccctgagccctgtgaccaggcctccccagccccggctgacctttgtgcaccccaagcctgtgtccctgactggaggccggcccaagcagccccacaagatcgtgcctgcccccaagccagagcctgtgtccctggtgctgaagaatgccagaattgccccagctgccttcagcggccagccccaggccgtcatcatgaccagcggccccctgaagcgggagggcatgctggccagcacagtgtcccagagcaatgtggtgattgccccagctgccatcgcccgggcccctggggtgcctgagttccacagcagcatcctggtgacagacctgggccacggcaccagcagccccccagcccctgtgtcccggctcttccccagcacagcccaggaccccctgggcaaaggagagcaggtgcccctgcacggcggcagcccccaggtgacagtgacaggccccagccgggactgccccaacagcggccaggccagcccctgtgccagcgagcagagccccagcccccagagcccccagaacaactgcagcggcaagagtgaccccaagaatgtggccgccctgaagaaccggcagatgaagcacatctctgctgagcagaagaggcgcttcaacatcaagatgtgctttgacatgctgaacagcctcatcagcaacaacagcaagctgaccagccacgccatcaccctgcagaagacagtggagtacatcaccaagctgcagcaggagcggggccagatgcaggaggaggcccggcggctgcgggaggagattgaggagctgaatgccaccatcatcagctgccagcagctgctgcctgccaccggggtgcctgtgacccggcggcagtttgaccacatgaaggacatgtttgatgaatatgtgaagaccaggaccctgcagaactggaagttctggatcttcagcatcatcatcaagcccctgtttgagagcttcaagggcatggtgtccaccagcagcctggaggagctgcacaggacagccctgtcctggctggaccagcactgcagcctgcccatcctgcggcccatggtgctgagcaccctgcggcagctgagcaccagcaccagcatcctgacagatcctgcccagctgcctgagcaggccagcaaggctgtgacccgcatcggcaagaggctgggggagagctag

SEQ ID NO: 183299 - DNA, 1581 bp, Artificial Sequence
  derived and/or modified sequence
atggatgagcagggctgtgagcacaccagcaggacagaggaccccttcatccagcccacagactttggccccagcgagccccccctgtctgtgccccagcccttcctgcctgtgttcaccatgcccctgctgagccccagccctgcccccccacccatcagccctgtgctgcccctggtgcccccaccagccacagccctgaaccccccagccccacccaccttccaccagccccagaagtttgctggggtgaacaaggcccccagcgtcatcacccacacagccagcgccaccctgacccatgatgccccagccaccaccttcagccagagccagggcctggtgatcaccacccaccacccagcccccagcgctgccccctgtggcctggccctgagccctgtgacccggcccccccagccccggctgacctttgtgcaccccaagcctgtgtccctgaccggcggccggcccaagcagccccacaagatcgtgcctgcccccaagccagagcctgtgtccctggtgctgaagaatgcccgcatcgccccagctgccttcagcggccagccccaggccgtcatcatgaccagcggccccctgaagcgggagggcatgctggccagcacagtgtcccagagcaatgtggtgattgccccagctgccatcgcccgggcccctggggtgcctgagttccacagcagcatcctggtgacagacctgggccacggcaccagcagccccccagcccctgtgagccgcctcttccccagcacagcccaggaccccctgggcaagggggagcaggtgcccctgcatggaggcagcccccaggtgacagtgacaggccccagccgggactgccccaacagcggccaggccagcccctgtgccagcgagcagagccccagcccccagagcccccagaacaactgcagcggcaagagtgaccccaagaatgtggccgccctgaagaaccggcagatgaagcacatctctgctgagcagaagaggcgcttcaacatcaagatgtgctttgacatgctgaacagcctcatcagcaacaacagcaagctgaccagccacgccatcaccctgcagaagacagtggagtacatcaccaagctgcagcaggagcggggccagatgcaggaggaggcccggcggctgcgggaggagattgaggagctgaatgccaccatcatcagctgccagcagctgctgcctgccactggagtgcctgtgacccggcggcagtttgaccacatgaaggacatgtttgatgaatatgtgaagaccaggaccctgcagaactggaagttctggatcttcagcatcatcatcaagcccctgtttgagagcttcaagggcatggtgtccaccagcagcctggaggagctgcacaggacagccctgtcctggctggaccagcactgcagcctgcccatcctgcggcccatggtgctgagcaccctgcggcagctgagcaccagcaccagcatcctgacagatcctgcccagctgcctgagcaggccagcaaggctgtgaccagaattggcaagaggctgggggagagctag

SEQ ID NO: 183300 - DNA, 5799 bp, Artificial Sequence
  derived and/or modified sequence
cctccccctcccgccgcgccgcgcgctcgcggacagtcggcgcgcgggccgggccgggccggcgcccctctgcctcgcgcgcttgtcgcgttgccccgggctccgggggatgcccccggccgagcccttctcatggccgccgacgtcttcatgtgctccccgcgccggcctcgcagccggggccgccaggtgctgctcaagccccaggtgtccgaggacgacgacgactcggacacggatgagccgtccccgccgcccgcctccggcgcggccaccccggcccgggcccacgcgagcgccgcgccaccgccgcctcgggccgggccgggccgcgaggaacctccgcgccgccagcagatcatccacagcggccacttcatggtgtcgtcgccgcaccgagagcacccgcccaagaagggctacgatttcgacacggtcaacaaacagacgtgccagacctacagcttcggcaagactagctcctgccacctgtccatcgacgcctcgctcaccaagctcttcgagtgcatgactttggcctacagtgggaagttggtgtctccaaagtggaagaatttcaagggcctgaagctacagtggagagacaagatccggctcaataatgccatctggcgggcctggtacatgcagtatctggagaagcgcaagaatcctgtgtgccactttgtgacacccctggacggctctgtggacgtagacgagcaccgccggccggaggccatcaccacggaagggaagtactggaagagccgcatcgagattgtgatccgggagtatcacaagtggagaacctacttcaagaaaaggctacagcagcacaaggatgaggacctctccagcctggtccaggacgatgacatgctgtattggcacaagcacggggatggatggaagacccccgtccccatggaggaggatcccctgctggacacagacatgctcatgtcggaattcagcgacaccctcttctccacactttcttcacaccagccggtggcctggcccaatccccgggaaatagcacatctgggaaatgcagacatgatccagccgggactgattcctttgcagcctaacctggacttcatggacacctttgagcctttccaggacctcttctcttctagccgctccatttttggctccatgctacctgcatctgcctcagcacctgtaccagatcccaacaacccacctgcacaggagagcatcctgccgaccacagccctccccactgtgagccttcctgacagcctcatcgcgccccctaccgccccatccctggctcacatggatgagcagggctgtgaacacacctcccggactgaggacccgtttatccagcccacggacttcggtccctcagagccgccactgagtgtcccgcagcccttcctccctgtcttcaccatgcccctgctgtctcccagccccgccccaccgcccatctcccccgtgttaccattagttcctcctcctgccactgccctgaaccccccggctccacccaccttccatcagccacagaagtttgctggagtcaacaaagcgccgtctgtcatcacccacacggcctctgccaccctcacccacgatgcccccgccaccacctttagccagagtcagggccttgtgatcaccacccatcaccctgccccgtcagcggccccttgtgggctggcactgtctcctgtcacccggcctccccagccacggttaacttttgtgcaccccaaacctgtatccttgactgggggcaggcctaagcagccccacaaaatagtgcctgctcccaaaccagagcccgtgtccttggtgttgaagaatgcccgtatcgccccagctgccttttcaggccaaccacaagcggtgatcatgacgtcagggcctctgaagagagaagggatgttggcctccaccgtgtcccagtccaacgtggtcattgcgcctgctgccatcgccagggctcctggggtcccggagttccacagcagcatcctggtgacagatctcggccatggcacgagcagcccgcctgcccccgtctcccggctcttcccaagcacagcgcaagaccccctggggaagggcgagcaggtcccgctgcatgggggcagcccccaggtcactgtcacagggcccagtcgggactgcccaaactcagggcaggcctctccgtgtgcatcggagcagagccccagtcctcaatctccccagaacaactgctcagggaaatccgaccccaaaaatgtggctgcactaaagaaccggcagatgaagcacatctcagctgagcagaaaaggcgcttcaacatcaagatgtgcttcgacatgctcaacagcctcatctccaacaattccaagctgaccagtcacgccatcacactgcagaagactgtggagtacatcaccaagctgcagcaggagagaggccagatgcaggaggaggcccggcggctgcgggaggagatcgaggagctcaatgccaccatcatctcctgccagcagctgctccctgccacgggagtccccgttacccggcgccagtttgatcacatgaaagacatgtttgacgaatacgtgaaaacccggaccttgcagaattggaagttctggattttcagcatcatcatcaagccgctgtttgagtcgttcaagggcatggtgtccaccagcagcctggaggagctgcaccggacggcgctctcctggctggaccagcactgctccctgcccatcctcaggccgatggtattgagcacgctgcggcagctgagcacctccacctccatcctcacagacccggcacagctgccagagcaggcgtccaaggctgtcaccaggattggcaagagattgggagagtcctagctgcttagctggcatgtggccgcatgagatgccaggagacccttccctgcccatggagagtaggctgcgccccccagcccttcctgacgctcagcctcggggcctctctccaactctgccggcccaccgtggcatcgggaggccatgctcaggtctgaagcaggtttggggcctgctgacagcaatagcccgcctttgggaaccccttgctgtgaactctctcactcagtgacctcagtcaccaacctcctctgccctcggggcagcccacacaaaagggaagtgctggccgtgctggtcctgccctgctggtggcctgccgggcctggcgccggtgagcggaatcgatgggatgagggtgacagggcctgctcctgtcctgaggcccagccttgtccctcctgccacgtcctgtccacatgcatgcctctgcctgatgccctgctccactctctggtctgcccgtggggcagttggaaggcgtctttctttctcccctcaactctgacagcacccagcccttgtggatggacttgggcttctattcaggcttatgcatggcaggctgccagggggaagtgccttcttcagaggtcctccaggacacatgtgtgcagaaacggtggatgtggaacacacaggaccagaatggaagcgtgtgatgcacggtggctgctctggctgagaggccctgctgggcatgtttcatctgtccccttttagctccacctgacattgcaggatccatggggactcagcccagggccttctcggatgtcacctcaccgctgtggcccttctgccgttcttctccacttggctccagctgcagctgttgacagatcaagcatgtcctgtgggagcttagaaccctgaagttctagtgtctgaaagatcagactccacgtcctgctgtcagccttgtcatcttgtctgatgtctttcagctgggagccccaaaccaggacagttctcggaccaaagatgcccccacactcaaaagtctgtcccgtcttgtgtttggagaaggaaacaatgttggcaggcagcactctgtggtggtcagccctcagagctgtttctaggcatctctcagatcagacagcaaagaatctacccagatctgggctgggtggaggtgtggctgggctgggggccattctgagcctgcagtgagagtttggcccagcctcagtccttgctcttctctggctacctctgcagggagctgcaggggcaagcactctctccagcactcaggaagcccggccgagggtacctcctcgtggaaagaatgcactttaaagctctgctgaggagttcggagcccaggctttcaggcgacctctgccctccctgcctctcctcaccctccctctcttcctgcagggcctgggaagggctttgagggagcctgggagccatgtgaagaggggcacgcctgggctgtcccacagtttagatccagttggaggttctccctggctcctgcaggcctgcggggatctctccccacttcaggcctccggccagctgcctgccctcttgtctgtgcttcagccctgcacaaaagcagcttggtgacaccactcagccacccagagtacgtgtttacaggctttccagatcaccttcctgtggggtgaacgtaatgaggcggggctggtccttggaatttcccctggaaaatggtaacagactccatccttgacccggggatgagcatgaaggcattgtcccaaaggcagaggccaccgtggtaggaattccaccaaggccagaagggaaaaaggaagaacccaccgtgtctggctgtgcgggccctggggagggtcgtgagtgcagcccctctctacttctgtgcctttgtaaaacgtgtagataaccgcagtggttggctgagccaagaactctcctaaatcagtggctttctccccaccccttgctggggagtcatttttaaaaaaatctgtgggatataaaattggcctcctgctgcttcagcctacctctccctctgctgacttaatgtcgtgattctgtttcttcagatatttaaggctgttaggttgtgtgagccttgaagtgtgtgtgtgtgtcccagcgactgtccactgtccaggagatgcatgtctttgtattggagatatttctgtaactcattctcttggtgctcacgattgccatggccatagggccacagtgccgtatctgctgcagacatgattgtttcttgttctagaggttttcttgttttcgaatcttgcctgatgaatccagccagaccaaggggcctagatttgacctctgtcctgggctcctgggccaggtgcaggaacatctgaggccactctgctggccacctccagtgggtgctgaccacaggatgggctttgtttacactcattttcaccctgattcttgcccccactttcataaaagaaacttcaaaatgctgacgctttggagagtaagaaaatcaatcttggctgggcacggtggctcctgcctgtgatcctagcactttgggaggctgaagctgaaggatcacttgagctcaggagttggagaccaaccctggcaacataacaagaccctgtctctacaaaaaaaaaaaaaaaaaaaaaaaatttagccgtgtgtagcagtgagtgcctgtggtcccagctacttgggcctgaggctggaggattgcttgagcctagaagttgcagtgagctatgatcatgccacactgtactccagcctggatgacagagtgaaaccctgcctctaaataaaagaaaatagaggcagactgtggtggctcacgcctgtaatcccagcactttggtaggccaaggcgggtggatcacctgcagtcaggagttcacaaccagcctgaccaacatggtgaaaccctgtcta

SEQ ID NO: 183301 - DNA, 5097 bp, Artificial Sequence
  derived and/or modified sequence
gtgcagaggcacgattccatccctcttttacagcatccttcagcacccatggggtgggagactcttggtccaggtgtgcttctgcctgagtgccaggtaacctatgtgcagctagctctgctccgactaattaacacagaattagctagacagagaagaaaaacatggattactaataaaaataacttctgtatatttctttcacgttttactaagcaatccaaaaagttgcttacaggtgcttggggctacagagctgagtgaggtaccattctttgtccttacggagccctcatgcttatgcccatgaccagttagacactggtaacctggcaccatcttcaaacgggctccgggaagaattgctactgcagagactgggatctgaaccattgattcctcgtagcttttcttatttaggaagaggtggcctgatgaccagttgacacgtgaaattgtcctcggggattcccgagcagctgcaatccaggctgcctctgctcagtaatagaagatggcagagactttggggagactctgctggactccagaaacaagatattcccaggctgctagccagctgtgtgagggccgttgccttatctgagctctgagttatttagtttttaatggaaacaagacccccgcagacacgcagggaaacacaaatccctatcagatcagcagccatggacgtggagacgtggcctttgtccctctgtcccagcgcccggcctgtgtagttggacttggcagtgtgcagcgctagaaaggaattgtctgaccccagcattgcttcctggctcctttcttcctttttcaggagagcatcctgccgaccacagccctccccactgtgagccttcctgacagcctcatcgcgccccctaccgccccatccctggctcacatggatgagcagggctgtgaacacacctcccggactgaggacccgtttatccagcccacggacttcggtccctcagagccgccactgagtgtcccgcagcccttcctccctgtcttcaccatgcccctgctgtctcccagccccgccccaccgcccatctcccccgtgttaccattagttcctcctcctgccactgccctgaaccccccggctccacccaccttccatcagccacagaagtttgctggagtcaacaaagcgccgtctgtcatcacccacacggcctctgccaccctcacccacgatgcccccgccaccacctttagccagagtcagggccttgtgatcaccacccatcaccctgccccgtcagcggccccttgtgggctggcactgtctcctgtcacccggcctccccagccacggttaacttttgtgcaccccaaacctgtatccttgactgggggcaggcctaagcagccccacaaaatagtgcctgctcccaaaccagagcccgtgtccttggtgttgaagaatgcccgtatcgccccagctgccttttcaggccaaccacaagcggtgatcatgacgtcagggcctctgaagagagaagggatgttggcctccaccgtgtcccagtccaacgtggtcattgcgcctgctgccatcgccagggctcctggggtcccggagttccacagcagcatcctggtgacagatctcggccatggcacgagcagcccgcctgcccccgtctcccggctcttcccaagcacagcgcaagaccccctggggaagggcgagcaggtcccgctgcatgggggcagcccccaggtcactgtcacagggcccagtcgggactgcccaaactcagggcaggcctctccgtgtgcatcggagcagagccccagtcctcaatctccccagaacaactgctcagggaaatccgaccccaaaaatgtggctgcactaaagaaccggcagatgaagcacatctcagctgagcagaaaaggcgcttcaacatcaagatgtgcttcgacatgctcaacagcctcatctccaacaattccaagctgaccagtcacgccatcacactgcagaagactgtggagtacatcaccaagctgcagcaggagagaggccagatgcaggaggaggcccggcggctgcgggaggagatcgaggagctcaatgccaccatcatctcctgccagcagctgctccctgccacgggagtccccgttacccggcgccagtttgatcacatgaaagacatgtttgacgaatacgtgaaaacccggaccttgcagaattggaagttctggattttcagcatcatcatcaagccgctgtttgagtcgttcaagggcatggtgtccaccagcagcctggaggagctgcaccggacggcgctctcctggctggaccagcactgctccctgcccatcctcaggccgatggtattgagcacgctgcggcagctgagcacctccacctccatcctcacagacccggcacagctgccagagcaggcgtccaaggctgtcaccaggattggcaagagattgggagagtcctagctgcttagctggcatgtggccgcatgagatgccaggagacccttccctgcccatggagagtaggctgcgccccccagcccttcctgacgctcagcctcggggcctctctccaactctgccggcccaccgtggcatcgggaggccatgctcaggtctgaagcaggtttggggcctgctgacagcaatagcccgcctttgggaaccccttgctgtgaactctctcactcagtgacctcagtcaccaacctcctctgccctcggggcagcccacacaaaagggaagtgctggccgtgctggtcctgccctgctggtggcctgccgggcctggcgccggtgagcggaatcgatgggatgagggtgacagggcctgctcctgtcctgaggcccagccttgtccctcctgccacgtcctgtccacatgcatgcctctgcctgatgccctgctccactctctggtctgcccgtggggcagttggaaggcgtctttctttctcccctcaactctgacagcacccagcccttgtggatggacttgggcttctattcaggcttatgcatggcaggctgccagggggaagtgccttcttcagaggtcctccaggacacatgtgtgcagaaacggtggatgtggaacacacaggaccagaatggaagcgtgtgatgcacggtggctgctctggctgagaggccctgctgggcatgtttcatctgtccccttttagctccacctgacattgcaggatccatggggactcagcccagggccttctcggatgtcacctcaccgctgtggcccttctgccgttcttctccacttggctccagctgcagctgttgacagatcaagcatgtcctgtgggagcttagaaccctgaagttctagtgtctgaaagatcagactccacgtcctgctgtcagccttgtcatcttgtctgatgtctttcagctgggagccccaaaccaggacagttctcggaccaaagatgcccccacactcaaaagtctgtcccgtcttgtgtttggagaaggaaacaatgttggcaggcagcactctgtggtggtcagccctcagagctgtttctaggcatctctcagatcagacagcaaagaatctacccagatctgggctgggtggaggtgtggctgggctgggggccattctgagcctgcagtgagagtttggcccagcctcagtccttgctcttctctggctacctctgcagggagctgcaggggcaagcactctctccagcactcaggaagcccggccgagggtacctcctcgtggaaagaatgcactttaaagctctgctgaggagttcggagcccaggctttcaggcgacctctgccctccctgcctctcctcaccctccctctcttcctgcagggcctgggaagggctttgagggagcctgggagccatgtgaagaggggcacgcctgggctgtcccacagtttagatccagttggaggttctccctggctcctgcaggcctgcggggatctctccccacttcaggcctccggccagctgcctgccctcttgtctgtgcttcagccctgcacaaaagcagcttggtgacaccactcagccacccagagtacgtgtttacaggctttccagatcaccttcctgtggggtgaacgtaatgaggcggggctggtccttggaatttcccctggaaaatggtaacagactccatccttgacccggggatgagcatgaaggcattgtcccaaaggcagaggccaccgtggtaggaattccaccaaggccagaagggaaaaaggaagaacccaccgtgtctggctgtgcgggccctggggagggtcgtgagtgcagcccctctctacttctgtgcctttgtaaaacgtgtagataaccgcagtggttggctgagccaagaactctcctaaatcagtggctttctccccaccccttgctggggagtcatttttaaaaaaatctgtgggatataaaattggcctcctgctgcttcagcctacctctccctctgctgacttaatgtcgtgattctgtttcttcagatatttaaggctgttaggttgtgtgagccttgaagtgtgtgtgtgtgtcccagcgactgtccactgtccaggagatgcatgtctttgtattggagatatttctgtaactcattctcttggtgctcacgattgccatggccatagggccacagtgccgtatctgctgcagacatgattgtttcttgttctagaggttttcttgttttcgaatcttgcctgatgaatccagccagaccaaggggcctagatttgacctctgtcctgggctcctgggccaggtgcaggaacatctgaggccactctgctggccacctccagtgggtgctgaccacaggatgggctttgtttacactcattttcaccctgattcttgcccccactttcataaaagaaacttcaaaatgctgacgctttggagagtaagaaaatcaatcttggctgggcacggtggctcctgcctgtgatcctagcactttgggaggctgaagctgaaggatcacttgagctcaggagttggagaccaaccctggcaacataacaagaccctgtctctac

SEQ ID NO: 183302 - DNA, 2760 bp, Artificial Sequence
  derived and/or modified sequence
atggccgccgacgtgttcatgtgcagcccccggcggccccggagccgaggacggcaggtacttttgaagccgcaggtgtcggaggatgacgacgatagcgacaccgatgaaccaagcccaccgcctgcatctggagctgcaaccccagcccgcgcgcacgcaagcgcagccccacctcctcctcgggcaggacctggcagagaagagccacctcgtcgccaacagatcatccacagtggtcactttatggtatcctccccccatcgcgaacaccccccaaagaaaggctacgacttcgataccgtgaataaacaaacatgccagacttactctttcggaaaaacatcttcttgccacctaagtattgatgcctccctaacaaagctgtttgagtgtatgaccctcgcctatagtggcaagctagtaagtcccaagtggaagaacttcaaaggactaaagctccaatggcgggataagattcgacttaacaacgcaatttggcgagcctggtatatgcagtaccttgaaaaacgtaagaacccggtatgccactttgtgacacccttggacggatcagtggatgtggatgaacatcgaagacccgaggccattacaacggaaggaaaatactggaaaagccgcatcgagatcgtgattagggagtaccacaagtggcgcacctacttcaaaaagcgcttgcaacaacacaaggatgaggacctgtcatccctggttcaagatgatgacatgctttactggcacaaacacggagatggatggaagaccccagttcccatggaggaagaccctctccttgacaccgatatgctcatgtccgagttcagtgacaccctgttcagcaccctttcaagtcatcaacccgtggcctggccaaacccacgggagatcgcccacttgggaaatgcggacatgatacagccaggcctcatcccattacaacctaaccttgactttatggacaccttcgaaccgtttcaggacctattttccagctccagatccatctttgggtccatgctacccgcctccgccagtgctcctgtccctgatccaaacaatccaccagcacaggaaagtatactgcccactacggcgctccccacagtgagccttcctgactcccttattgctccaccgactgccccctctcttgcccatatggatgaacaagggtgtgagcatacttctagaactgaagatccttttatccagccaactgactttgggcctagtgagccgccactgagcgtgccccagccattccttcccgtatttaccatgcccttactctccccgtcccccgcccccccccccatctcccctgtacttcctctcgtgcctccccctgcgaccgcactgaatccaccagcacctcctacgtttcaccagccacaaaaatttgcgggagtgaacaaggccccatccgtgattacacatactgctagcgccacgctcacccacgacgctcccgctacaactttttcacagagccagggtctggtgatcaccacccaccacccagccccgtctgcagccccttgtgggctggccttgagcccagtgacccgacctccccagccgaggctgaccttcgtgcacccaaagcccgtgtctctgacaggcggacggccgaagcagccccataagatcgtccctgcaccaaagcctgagcccgtgtcccttgtgctcaagaacgctcggattgcccccgcagcattctccggccagccccaggccgtgattatgacttcaggccccttaaagagagaagggatgttagcctcgacagtctcacagtctaatgtggtgatcgccccagccgcaattgccagagccccaggagtgccggaatttcattcgtctatcctggtaactgacctggggcacggcacctcctccccacctgcccctgtgagccggctcttccccagcactgcacaggatcctttggggaagggagagcaggtccctttgcatgggggaagccctcaggtcacggtaaccgggccctcacgggattgtcctaattccgggcaggccagtccatgtgcgtcagagcaatctcccagcccacagtcccctcagaacaactgttccgggaaatccgatccaaaaaacgtggccgccctcaagaacaggcagatgaagcacataagtgctgaacaaaaacgaaggttcaacatcaagatgtgcttcgacatgttaaactcgctgatctcaaacaacagcaagttaaccagccacgcgatcactctccagaagaccgttgagtatattactaagctccaacaggaaagaggccaaatgcaggaagaggcccgacgcctgagggaagagattgaggagttgaacgctaccattatttcctgtcagcagctgcttccggctactggggtgccagttacaaggcggcagtttgaccacatgaaggacatgttcgatgagtatgttaagacccgcacattacaaaattggaaattctggatcttttctataatcatcaagcctttgtttgaatcttttaaaggcatggtgagcactagtagcctggaggagcttcaccggacggccctgtcatggttggaccaacattgtagcttgcctattcttcggccgatggtcctgtccaccttgaggcagctctcaacaagcacctccattctcactgacccagctcagttgcccgagcaggccagcaaagccgtaactcgaattgggaagaggcttggagagtcctag

SEQ ID NO: 183303 - DNA, 1581 bp, Artificial Sequence
  derived and/or modified sequence
atggacgagcagggctgcgagcacaccagccggaccgaggaccccttcattcaacccacagactttggcccatccgaacctcccctttccgtacctcagcctttcttgcctgtgttcacaatgccacttctttcccctagtccagctcccccacccatctccccagtgctgcctctggtccctccccctgccaccgccctcaatcctccagcgcctcctacattccaccagcctcaaaaattcgccggggtcaataaggccccaagcgttattacccacacagcatcagccacactgacacacgacgccccagccacaaccttttcacagtcccagggcctggtgataacaacacatcacccagccccgagcgcagcaccctgcggtttggctctcagtcctgtaacacggccaccccagccacggcttacgttcgtccaccctaaacccgtttccttgacaggaggtcgacctaagcagccccacaagatagtccctgctcctaagccagaaccagtgtccctggtgcttaaaaacgctcggatcgcacccgcagccttttcaggacagcctcaggctgtgataatgaccagtggccccctgaaaagggagggaatgctagcaagtactgtctcgcagagtaacgttgtgatcgctcccgccgctattgctagggcccccggagtgccagaattccacagtagcatcctcgtgaccgatctaggacatggcacctcatcccctcctgccccggtgtcccggctttttccatctaccgcgcaggatccactcgggaagggggagcaagtgccattgcacggaggttcccctcaggtaaccgtgacgggtcccagccgggattgtcccaattcaggtcaggcgtccccttgtgcctccgaacaatcacccagcccccagagtccacaaaataattgctctgggaagtccgatcccaagaatgttgccgccctgaagaatagacagatgaaacacatcagtgctgaacaaaagaggcgcttcaatattaaaatgtgtttcgatatgctcaattctttgattagcaataactctaagctgacttcccatgctattacactgcaaaagactgtggagtatatcacaaaattgcagcaggaaagaggccagatgcaggaggaagcacgccgcctgcgagaagagattgaggagctcaacgcaactattattagctgccagcagctgctgcctgccacgggtgtccccgtgaccaggcgacaatttgatcacatgaaagacatgttcgacgaatacgtaaaaactcgaacccttcagaactggaagttctggattttctcaatcataataaagccactctttgaatcattcaagggcatggttagcacatctagcctcgaggagttacataggacggcgttaagctggctggatcagcactgcagtctgccgatccttagacccatggttctgagtacactgagacagctgtctacttccacaagcattctcaccgatccagcacaactgccagagcaagcttccaaagccgttacccgaatcgggaaacgactcggagagtcttag

SEQ ID NO: 183304 - DNA, 2760 bp, Artificial Sequence
  derived and/or modified sequence
atggcagctgatgtattcatgtgtagtccccgtcgtccgagatcaaggggtcgacaggtccttctgaaaccccaggtatcagaagacgacgacgattccgacaccgatgaaccaagccccccacccgcatccggcgctgccactcctgctagagctcatgcatccgcagcccctccaccgcctcgcgctggtcctggacgcgaagagcctccccgaaggcagcagatcatccatagcggacactttatggtgtcaagtccccacagagagcatccacccaaaaagggctacgattttgacaccgtgaataagcagacctgccagacctacagctttggtaaaacctcgagttgccatctgagcattgacgccagtttgaccaaacttttcgagtgtatgacgttggcgtactctggtaagctggtgtctcccaagtggaagaacttcaaaggcttgaagttgcaatggcgggacaaaatacggctgaacaatgcgatttggcgcgcttggtatatgcagtatctggaaaaacgcaaaaatcccgtttgccacttcgtgactcccttagacgggtccgtcgatgtcgatgagcatcgacgtcccgaggctatcacaaccgaaggaaagtactggaaatctcggattgaaatcgtaatcagggaatatcacaagtggcgcacatactttaaaaagagactacagcagcacaaggacgaagaccttagcagcctggtccaggacgacgatatgctctactggcacaaacacggagacggttggaagacaccggtgcctatggaggaagatccactcctggacacagacatgctcatgtcggaatttagtgataccttgttcagtacactttccagccaccagccggtggcatggcctaacccacgtgaaattgcacacctgggaaacgctgatatgattcagccaggactgatcccccttcagcccaacctggacttcatggacacctttgagccttttcaggatcttttcagttcaagccgctccatcttcggatccatgttgcctgctagtgctagtgctccggtacctgaccccaacaatccgcctgcacaggagtccattcttccaacaaccgcacttcctacagtgagtctgcctgatagcctgattgcgcctccaacagctcccagcctggcacacatggacgagcagggctgtgaacatacaagtcggacagaagacccctttatacagccaactgatttcggcccaagtgaacccccattaagcgttccccagcccttcttgcctgtgttcactatgccactgctcagtccaagcccagccccaccaccgatttctcctgtgttgcccctggtgccccctccggcaactgccctgaaccctccagcacctcccaccttccaccaaccccagaaatttgctggagtgaataaagcgccaagtgtgatcacacataccgcttctgccaccctcacccatgacgcaccagccaccacatttagtcagtcacagggcctcgttatcacaacccaccacccagctcctagcgctgccccttgtgggctggccctcagtccagtcacaaggcccccacagcctcgcctgacgtttgtgcatccaaagccagtgtccttgactggcggacgtcctaagcagccgcacaaaatcgtgcccgcacccaagccagaaccagtcagcctggtgctgaagaatgctagaattgcaccagccgctttcagtggccaaccgcaggctgtgatcatgacctctgggcctctgaaacgggaaggaatgctcgcatctacggtgagccagtcaaacgtggtgatcgctcccgctgctattgcccgagcccctggcgtgccagaatttcactcaagtatactcgtcacagatctcggtcatgggacctccagtcctcctgcccctgtatcaaggctcttcccctctactgctcaggacccactggggaaaggcgaacaggtgccccttcatgggggatcacctcaagtaactgtgactggcccaagtcgagactgcccaaattctggccaggcaagtccatgcgccagcgaacagagccccagcccccagtcaccgcaaaataactgtagtggcaaatctgaccccaagaatgttgccgctctgaaaaataggcaaatgaagcacatcagtgcggagcagaaacgacgctttaacatcaagatgtgtttcgacatgctgaattccttgatatccaacaactcaaagctgactagccacgcaatcacccttcagaagaccgtggagtacattaccaaactgcagcaggagaggggacagatgcaggaagaggctcgacgtttgcgggaggaaatcgaggagctcaatgcaactattatctcatgtcagcagcttcttcctgccaccggtgtgccagttaccagaaggcagttcgatcacatgaaggacatgtttgacgagtacgtgaaaaccaggacattgcaaaattggaagttttggatcttcagcatcattattaagcccttgttcgagtcatttaagggtatggtatcaacgagtagtttagaggagctacatcgcactgctctctcctggctggatcagcattgtagcctccctatacttcgtcccatggtgttgtccactctgcggcagctgtccacaagtacaagtattctaaccgacccggcacagctgcccgaacaagcgagcaaggcggtgacacgtatcggcaaaaggttgggcgagagttag

SEQ ID NO: 183305 - DNA, 1581 bp, Artificial Sequence
  derived and/or modified sequence
atggacgagcagggatgtgagcacactagccgaaccgaagacccctttatccaacctacagactttgggccaagcgaaccccctctctctgtgccacagccattcctgcccgtatttacaatgcctttgctcagcccaagtcccgcaccgcctccgataagtcccgttctgcccctagtgccgcctcccgcaacggctctcaatcctcctgcccctcctactttccaccagcctcagaagtttgccggagtgaataaagcaccttctgtgataacacataccgcaagcgctacccttacccacgacgccccagccaccacctttagtcagagccagggcttggtcattacaactcaccaccctgcccctagcgccgcaccgtgtgggctggctctgagccccgtgaccagacctccacagccccgactcacattcgtccaccctaagccagtcagccttaccggaggtagaccaaagcaaccacacaagattgtcccagctcctaagcctgagcccgtttccctagttctgaaaaacgccaggatcgcacctgccgctttttccggccagcctcaggcagtgatcatgacctctggacctctgaaacgggaagggatgttggcttcaacggtatcgcagtctaatgtcgttatcgcacccgcagcaattgctagggctcccggagtgccagagtttcatagttcaattctcgtgaccgacttggggcacggaacgtctagcccgccagccccagtgtctagactgttccccagtaccgctcaggacccactcggaaagggcgagcaagtgcccctgcacggcggatcaccgcaggttactgtgacgggcccttctcgcgactgtccgaacagtggccaagcctctccctgcgcgtccgagcagtctccatcaccccaatccccgcagaataattgttccggcaagtccgatcctaagaacgttgctgctctaaagaaccggcagatgaagcatatctcagctgaacagaagcgcagattcaacatcaagatgtgctttgacatgctcaacagcctgatctccaataactccaagctgacctcacatgctatcaccctccagaagacggtggaatacatcaccaagctacaacaggaacgcggacagatgcaagaagaggcccgacgcctgagagaggagatcgaagagctaaacgctacgattataagctgtcagcagctccttcccgctactggcgttcctgtgacacgaagacaattcgatcacatgaaggacatgtttgacgaatacgtgaagacgaggaccctgcagaattggaagttctggatattttcaataattattaagcccttgttcgaaagcttcaaaggcatggttagcaccagttccctggaagaattgcatcgcactgctttatcatggctggatcagcattgcagtctccccattctgaggcctatggtcctctccactctgcggcagctttcaacgtctacctcgattctcactgatccagctcaattgccagagcaggccagcaaggccgttacgagaatcggtaagaggctcggggagagttag

SEQ ID NO: 183306 - DNA, 2760 bp, Artificial Sequence
  derived and/or modified sequence
atggccgccgacgtgttcatgtgcagccccagaagacccagaagcagaggcagacaggtgctgctgaagccccaggtgagcgaggacgacgacgacagcgacaccgacgagcccagccccccccccgccagcggcgccgccacccccgccagagcccacgccagcgccgccccccccccccccagagccggccccggcagagaggagccccccagaagacagcagatcatccacagcggccacttcatggtgagcagcccccacagagagcacccccccaagaagggctacgacttcgacaccgtgaacaagcagacctgccagacctacagcttcggcaagaccagcagctgccacctgagcatcgacgccagcctgaccaagctgttcgagtgcatgaccctggcctacagcggcaagctggtgagccccaagtggaagaacttcaagggcctgaagctgcagtggagagacaagatcagactgaacaacgccatctggagagcctggtacatgcagtacctggagaagagaaagaaccccgtgtgccacttcgtgacccccctggacggcagcgtggacgtggacgagcacagaagacccgaggccatcaccaccgagggcaagtactggaagagcagaatcgagatcgtgatcagagagtaccacaagtggagaacctacttcaagaagagactgcagcagcacaaggacgaggacctgagcagcctggtgcaggacgacgacatgctgtactggcacaagcacggcgacggctggaagacccccgtgcccatggaggaggaccccctgctggacaccgacatgctgatgagcgagttcagcgacaccctgttcagcaccctgagcagccaccagcccgtggcctggcccaaccccagagagatcgcccacctgggcaacgccgacatgatccagcccggcctgatccccctgcagcccaacctggacttcatggacaccttcgagcccttccaggacctgttcagcagcagcagaagcatcttcggcagcatgctgcccgccagcgccagcgcccccgtgcccgaccccaacaacccccccgcccaggagagcatcctgcccaccaccgccctgcccaccgtgagcctgcccgacagcctgatcgccccccccaccgcccccagcctggcccacatggacgagcagggctgcgagcacaccagcagaaccgaggaccccttcatccagcccaccgacttcggccccagcgagccccccctgagcgtgccccagcccttcctgcccgtgttcaccatgcccctgctgagccccagccccgcccccccccccatcagccccgtgctgcccctggtgcccccccccgccaccgccctgaacccccccgccccccccaccttccaccagccccagaagttcgccggcgtgaacaaggcccccagcgtgatcacccacaccgccagcgccaccctgacccacgacgcccccgccaccaccttcagccagagccagggcctggtgatcaccacccaccaccccgcccccagcgccgccccctgcggcctggccctgagccccgtgaccagacccccccagcccagactgaccttcgtgcaccccaagcccgtgagcctgaccggcggcagacccaagcagccccacaagatcgtgcccgcccccaagcccgagcccgtgagcctggtgctgaagaacgccagaatcgcccccgccgccttcagcggccagccccaggccgtgatcatgaccagcggccccctgaagagagagggcatgctggccagcaccgtgagccagagcaacgtggtgatcgcccccgccgccatcgccagagcccccggcgtgcccgagttccacagcagcatcctggtgaccgacctgggccacggcaccagcagcccccccgcccccgtgagcagactgttccccagcaccgcccaggaccccctgggcaagggcgagcaggtgcccctgcacggcggcagcccccaggtgaccgtgaccggccccagcagagactgccccaacagcggccaggccagcccctgcgccagcgagcagagccccagcccccagagcccccagaacaactgcagcggcaagagcgaccccaagaacgtggccgccctgaagaacagacagatgaagcacatcagcgccgagcagaagagaagattcaacatcaagatgtgcttcgacatgctgaacagcctgatcagcaacaacagcaagctgaccagccacgccatcaccctgcagaagaccgtggagtacatcaccaagctgcagcaggagagaggccagatgcaggaggaggccagaagactgagagaggagatcgaggagctgaacgccaccatcatcagctgccagcagctgctgcccgccaccggcgtgcccgtgaccagaagacagttcgaccacatgaaggacatgttcgacgagtacgtgaagaccagaaccctgcagaactggaagttctggatcttcagcatcatcatcaagcccctgttcgagagcttcaagggcatggtgagcaccagcagcctggaggagctgcacagaaccgccctgagctggctggaccagcactgcagcctgcccatcctgagacccatggtgctgagcaccctgagacagctgagcaccagcaccagcatcctgaccgaccccgcccagctgcccgagcaggccagcaaggccgtgaccagaatcggcaagagactgggcgagagctag

SEQ ID NO: 183307 - DNA, 1581 bp, Artificial Sequence
  derived and/or modified sequence
atggacgagcagggctgcgagcacaccagcagaaccgaggaccccttcatccagcccaccgacttcggccccagcgagccccccctgagcgtgccccagcccttcctgcccgtgttcaccatgcccctgctgagccccagccccgcccccccccccatcagccccgtgctgcccctggtgcccccccccgccaccgccctgaacccccccgccccccccaccttccaccagccccagaagttcgccggcgtgaacaaggcccccagcgtgatcacccacaccgccagcgccaccctgacccacgacgcccccgccaccaccttcagccagagccagggcctggtgatcaccacccaccaccccgcccccagcgccgccccctgcggcctggccctgagccccgtgaccagacccccccagcccagactgaccttcgtgcaccccaagcccgtgagcctgaccggcggcagacccaagcagccccacaagatcgtgcccgcccccaagcccgagcccgtgagcctggtgctgaagaacgccagaatcgcccccgccgccttcagcggccagccccaggccgtgatcatgaccagcggccccctgaagagagagggcatgctggccagcaccgtgagccagagcaacgtggtgatcgcccccgccgccatcgccagagcccccggcgtgcccgagttccacagcagcatcctggtgaccgacctgggccacggcaccagcagcccccccgcccccgtgagcagactgttccccagcaccgcccaggaccccctgggcaagggcgagcaggtgcccctgcacggcggcagcccccaggtgaccgtgaccggccccagcagagactgccccaacagcggccaggccagcccctgcgccagcgagcagagccccagcccccagagcccccagaacaactgcagcggcaagagcgaccccaagaacgtggccgccctgaagaacagacagatgaagcacatcagcgccgagcagaagagaagattcaacatcaagatgtgcttcgacatgctgaacagcctgatcagcaacaacagcaagctgaccagccacgccatcaccctgcagaagaccgtggagtacatcaccaagctgcagcaggagagaggccagatgcaggaggaggccagaagactgagagaggagatcgaggagctgaacgccaccatcatcagctgccagcagctgctgcccgccaccggcgtgcccgtgaccagaagacagttcgaccacatgaaggacatgttcgacgagtacgtgaagaccagaaccctgcagaactggaagttctggatcttcagcatcatcatcaagcccctgttcgagagcttcaagggcatggtgagcaccagcagcctggaggagctgcacagaaccgccctgagctggctggaccagcactgcagcctgcccatcctgagacccatggtgctgagcaccctgagacagctgagcaccagcaccagcatcctgaccgaccccgcccagctgcccgagcaggccagcaaggccgtgaccagaatcggcaagagactgggcgagagctag

SEQ ID NO: 183308 - protein, 547 aa, Artificial Sequence
  derived and/or modified sequence
MEVGGDTAAPAPGGAEDLEDTQFPSEEAREGGGVHAVPPDPEDEGLEETGSKDKDQPPSPSPPPQSEALSSTSRLWSPAAPENSPTCSPESSSGGQGGDPSDEEWRSQRKHVFVLSEAGKPIYSRYGSVEALSATMGVMTALVSFVQSAGDAIRAIYAEDHKLVFLQQGPLLLVAMSRTSQSAAQLRGELLAVHAQIVSTLTRASVARIFAHKQNYDLRRLLAGSERTLDRLLDSMEQDPGALLLGAVRCVPLARPLRDALGALLRRCTAPGLALSVLAVGGRLITAAQERNVLAECRLDPADLQLLLDWVGAPAFAAGEAWAPVCLPRFNPDGFFYAYVARLDAMPVCLLLLGTQREAFHAMAACRRLVEDGMHALGAMRALGEAASFSNASSASAPAYSVQAVGAPGLRHFLYKPLDIPDHHRQLPQFTSPELEAPYSREEERQRLSDLYHRLHARLHSTSRPLRLIYHVAEKETLLAWVTSKFELYTCLSPLVTKAGAILVVTKLLRWVKKEEDRLFIRYPPKYSTPPATSTDQAAHNGLFTGL

SEQ ID NO: 183309 - protein, 145 aa, Artificial Sequence
  derived and/or modified sequence
MEVGGDTAAPAPGGAEDLEDTQFPSEEAREGGGVHAVPPDPEDEGLEETGSKDKDQPPSPSPPPQSEALSSTSRLWSPAAPENSPTCSPESSSGGQGGDPSDEEWRSQRNGCRTCTTACMLVSTAPPDPCASFTTWLRRRHYWPG

SEQ ID NO: 183310 - DNA, 1644 bp, Artificial Sequence
  derived and/or modified sequence
atggaggtaggaggtgatactgccgcccctgctccgggtggcgctgaagaccttgaagacacccaatttccctctgaagaagccagagagggtggtggtgtgcacgctgtcccccccgacccagaggatgagggactggaggagaccgggagcaaggataaagaccagcctccaagtccgtcccctccgcctcagtccgaagcactgagcagtacatcccgattatggagtccagccgctcccgagaattcaccaacttgttccccagagtctagctcgggcggacaaggcggtgacccaagcgacgaagagtggagatctcaaaggaaacacgttttcgttctaagcgaggccggtaagccaatttactctaggtatgggtccgtcgaggccctgtctgcgaccatgggtgtcatgacagcacttgtgagtttcgtgcagagcgcaggggacgctattcgcgcaatatacgccgaggaccacaagttggtgttcctgcaacagggacccttactgctcgtcgccatgagccgtacatcccagtccgctgcacaactccgaggagaattactcgcagttcacgcacagatcgtgtcgaccctgaccagagcgagcgtcgctaggatattcgcgcataagcaaaattatgatctcagaagactgctggctggaagtgagcggactctcgacagattgcttgatagcatggagcaggaccccggtgcactcctcctaggtgctgtgaggtgtgtcccactggcgaggcccttacgcgacgccctcggcgctctcttacgacggtgtacagcaccgggcttggctcttagcgtgctggcggtcggcggccggcttatcaccgcagcccaggaaaggaacgtcttagccgaatgccgcctagatcccgctgatctacaactgttgctggactgggtgggcgcccccgccttcgctgcgggcgaagcatgggctcctgtctgtcttccgcgatttaacccagacggcttcttttatgcctatgtagcacgtctggacgcaatgccagtttgcctcctcctgctgggaacccagcgtgaagcctttcatgcaatggccgcgtgccggaggctggtggaagatggcatgcacgcgcttggtgcgatgagagccctcggtgaagcagcctctttcagcaatgctagctcagccagcgcacctgcctactcagtacaggccgtgggagcccctggactccgccacttcctgtacaaaccactcgacatccccgatcatcatcgccagctgccccagttcacttcccctgagctggaagccccttactctagggaggaagaacgccaacgcctgagcgacctgtatcacaggctccatgcccgtcttcactcgacttcacggcccctccggctgatttatcatgtggccgagaaggaaacgctgttggcgtgggtgacaagtaagttcgaactttatacttgcttatcacccttggtgacaaaggctggagcaatccttgtggttacaaagctcctgcggtgggtcaagaaagaggaggatagactattcataagatatcccccgaaatattcgacaccccctgccacctctactgaccaggccgcccacaacggtctattcactggactgtag

SEQ ID NO: 183311 - DNA, 438 bp, Artificial Sequence
  derived and/or modified sequence
atggaggtcggtggggacaccgctgctccagcccctggaggggccgaggacctcgaggatacccagttccccagcgaagaggcgcgcgagggagggggcgtgcacgcagttcctccggatcccgaagatgagggcctggaagagacagggagtaaggacaaggatcagccgccctccccgtctccaccacctcagtctgaagctctgagctcaactagtcggctatggtcgcccgctgcccccgagaactcacctacatgctccccagagtcctccagcggtggtcagggaggagatccgagtgacgaagagtggcggtctcaaaggaatgggtgcaggacgtgcaccacggcttgcatgctagtatctactgccccacctgacccatgtgcttcctttactacgtggctgagaaggagacactactggcctggctag

SEQ ID NO: 183312 - DNA, 1644 bp, Artificial Sequence
  derived and/or modified sequence
atggaggtgggcggggacacagctgccccagcccctgggggcgctgaggacctggaggacacccagttccccagcgaggaggcccgggagggcggcggcgtgcatgctgtgcccccagaccctgaagatgagggcctggaggagaccggcagcaaggacaaggaccagccccccagccccagccccccaccccagagcgaggccctgagcagcaccagccggctgtggagccctgctgcccctgagaacagccccacctgcagccctgagagcagcagcggcggccagggcggggaccccagtgatgaggagtggaggagccagaggaagcacgtgtttgtgctgtctgaggccggcaagcccatctacagccgctatggctctgtggaggccctgagcgccaccatgggcgtgatgacagccctggtgtcctttgtgcagagcgctggagatgccatccgggccatctatgcagaggaccacaagctggtgttcctgcagcagggccccctgctgctggtggccatgagcaggaccagccagagcgctgcccagctgcggggggagctgctggccgtgcacgcccagatcgtgtccaccctgacccgggcctctgtggcccgcatctttgcccacaagcagaactatgacctgcggcggctgctggccggcagcgagaggaccctggaccggctgctggacagcatggagcaggaccccggggccctgctgctgggcgctgtgcgctgtgtgcccctggcccggcccctgagagatgccctgggcgccctgctgcggcgctgcacagcccctggcctggccctgtctgtgctggccgtgggcggccgcctcatcacagctgcccaggagagaaatgtgctggccgagtgccgcctggaccctgctgacctgcagctgctgctggactgggtgggcgccccagcctttgctgctggggaggcctgggcccctgtgtgcctgccccgcttcaacccagatggcttcttctacgcctacgtggcccggctggatgccatgcctgtgtgcctgctgctgctgggcacccagcgggaggccttccacgccatggccgcctgccggcggctggtggaggatggcatgcacgccctgggcgccatgagggccctgggggaggccgccagcttcagcaatgccagcagcgccagcgccccagcctacagcgtgcaggccgtgggcgcccctggcctgcggcacttcctgtacaagcccctggacatcccagaccaccaccggcagctgccccagttcaccagccctgagctggaggccccctacagccgggaggaggagcggcagaggctgagtgacctgtaccaccggctgcacgcccggctgcacagcaccagccggcccctgcggctcatctaccacgtggccgagaaggagaccctgctggcctgggtgaccagcaagtttgagctgtacacctgcctgagccccctggtgaccaaggccggggccatcctggtggtgaccaagctgctgcgctgggtgaagaaggaggaggacaggctcttcatccgctacccacccaagtacagcaccccaccagccaccagcacagaccaggccgcccacaacggcctcttcaccggcctgtag

SEQ ID NO: 183313 - DNA, 438 bp, Artificial Sequence
  derived and/or modified sequence
atggaggtgggcggggacacagctgccccagcccctgggggcgctgaggacctggaggacacccagttccccagcgaggaggcccgggagggcggcggcgtgcatgctgtgcccccagaccctgaagatgagggcctggaggagaccggcagcaaggacaaggaccagccccccagccccagccccccaccccagagcgaggccctgagcagcaccagccggctgtggagccctgctgcccctgagaacagccccacctgcagccctgagagcagcagcggcggccagggcggggaccccagtgatgaggagtggaggagccagagaaatggctgcaggacctgcaccacagcctgcatgctggtgtccacagcccccccagacccctgtgccagcttcaccacctggctgcggcggcggcactactggccaggatag

SEQ ID NO: 183314 - DNA, 6088 bp, Artificial Sequence
  derived and/or modified sequence
acgccaaccactggtaagcgaagtgggcctcgctctcccgggttagcagccgtagccagatccgttgaaaggagtgcagagaggtctcattgcgctcccgaacagacctgacgtagatccgaagtggcccgcgccatctcaactatgaggggacacccgtaggcggcgggagagggacgccgcgaggagccaataaagctccgcaaccggaagtgtcttctgggaggggtcgtacccggaagtgtggcacctcccgggccgcacccggaagtgtgatgccaccgccgctacggggaagtaatggtatccggccaattgagattcggagttaaaacagggatgtgcagatggaggtcggaggagacactgctgccccggcccccgggggcgcggaggacttggaggacacgcagttccccagtgaggaagctagagaaggtggaggggttcacgcggtcccgccggatcccgaagacgagggcctggaggaaacaggatccaaggacaaggaccagccacccagcccatcaccaccgccccagtcagaggccctgtcaagcacctctcggctctggagtcctgcagcccctgagaatagtcccacatgtagccctgagagtagctctggaggccagggcggggaccccagtgatgaggagtggcgcagccagcggaagcatgtgtttgtgctgagtgaggctggcaagcccatctactcgcggtatggtagtgtggaggcgctgtcggctaccatgggtgtaatgaccgccctggtgtcctttgtgcagagtgcgggagatgccatccgtgccatctacgctgaggaccacaagctggtgttcctacaacagggcccactgttgctcgtggccatgtcacggacttctcagtcagcagcccagctgcggggggagctgctagctgtgcacgcacagatcgtgagcacacttacacgtgcaagtgtcgcccgcatcttcgcacacaagcagaactatgacctccgccgcctgctggctggttcagagcgcacactggaccgacttctggacagtatggagcaggacccaggagccctgctcctgggtgccgtgcgctgtgtgccccttgcccgcccgctgcgagacgcactaggtgcgctcctccgacgttgcacagcgcctggcctggcgctgtcagtgctggcagtaggcggtcgacttataacagcagcccaggagcgaaatgtgctggccgagtgccggctggacccagctgacctgcagttgctgctcgactgggtgggtgcaccagcctttgcggcgggtgaggcttgggcacctgtgtgcctgccccgcttcaaccctgatggttttttctacgcctacgtggcccgcctggatgctatgcctgtctgcctgctgctgcttggcacccaacgtgaagccttccatgccatggccgcctgccggcgcctggttgaagatgggatgcatgcccttggtgccatgcgtgcccttggggaggctgccagcttctctaatgcctcatcagccagtgctcctgcctacagcgtgcaggctgtcggggcgccgggcctccggcacttcctgtataagccgctggacatccctgaccaccaccgccaactgccccagtttaccagccctgagctagaggccccctacagcagagaggaggagcggcagcggctgtcggacctgtaccaccgcctgcatgctcgtctccacagcacctcccgacccctgcgcctcatttaccacgtggctgagaaggagacactactggcctgggtgacctccaaattcgagctctatacctgcctcagccctctggtgaccaaggcaggtgcaatcttggtagtgaccaaactcctgcgctgggtgaagaaagaggaggaccggctcttcattcgttacccacccaagtactccacaccaccagccacctctacggaccaagctgcccataatggcttgttcactggactctgatagttggagctcccagaccaggcagtgctgggagcaaccacctttgttttttaccttctgtctaccctggaaatgtgtgtgggggtgtgtctgtggccagtcattgtctccctaagcaatggggcaaggtctgagggcccaccgatgagagagatggtggcagccgccaggcgagcaggctgctttccctgcccagtcatgcacctccccctctggggaaatccttaggcctccctctcccttccctctgtctcatctcctccacttggatgatgctctagcctctgtcagggactgtcccctccaaacttgcttccgtggtctgcctcctagttgaatctcagccctgagtgtccagatctggccaaggtgtctagggtggcccacgggggtgctggaattggcacttcagggccaggctatgcttgggactggcctgagggtattttaaagaaaaaaactacataaaaggcctaaaagtaagacccacaaggatattcctttgcccttcttgtacttttttcatctttaccctgccagaaatgacccgccctcaatgctggctgctgctaacattaatgagaaggtggccttcagtgtccacctgtggaacccaggacacagcacctgactgcacacagtggctgaaatccagcatttttacataggagatgcacttagcctctaagcctcgttttactcatctgtgaaacagagataagtaaccctctctcatgaactctttgatgaggatttgtaaacgaaaacagactcgaactattgtgtaccaccacatagcacatgcacgtctgtcccagactttgacaacctgcacaagacaagcagcctaaagcaggagagacctccctagggttttgtgtgtgtgcacactaccctcactccccaactggccattaccctagttctgcccttgtttgtggagttacagcctcaaggttgtagcatgtgtgctggcaatcagggccgcagtgtgttctgcgcctgcccagagctgactcctgatttaaccgctggcgtaaccgcgggttgcacgcatgcgtgctgaaaagcctttcaccctcacgtggtttcttttttaaccagtcatcaagcgaggctcgcgcgcaggccccgcgttggaaaatggcggggaagctgaaacctctgaatgtggaggcgccagaagctactgaggaggctgaaggtagtgagggcaagtgggctgcactcctttctctccaaccagggcagaaaggagggaggattcgtcccattacaataatgaaataatgatattctaatttttttaaataaaatgttaagccttttgttattgaagaaaaacaattttttaaccgttcagcacagtggagataaattaacaggcatattcttatcaccgagattaacttttgtcaactgtagtgtatacgttgttgaaagtaaacaacatgtagttcagtacgaaagtcttcaaacaaaagtggggcggtggggatgttctcataacaatcaccgtgctgcagccaccccttattaacagtaattcccagtgtcgccatttcacacctaacacatatgacactttgatggactcttaaacctcctaatcgaacatggcctcccccacagcctcttttctccagggtattgacttgaatgacaggcaaaggagggtggaggggtgtcggcctagacactattggaaattgtattccatccaaaagaaaaaaaaatctcaggccgggcacggaggctcacgcctgtaatcccagcactttgggaggccgaggcgggcggatcacgaggttaggagttcgaggccagcctgaccaacatggtgaaacaccatctctactaaaaaactatatatacatatacatatgtgtgtatgtgtatttatatgtatgtatgtatgtgtgtgtatatatatatatatgtatatgtgtatatatatatatatgtgtatatatatatatatatacacacactaatcagccgggcgcggtggtgtgggcctgtaatcgcagctactcaggaagctgaggcaggagaatcacttgaacccgagaggcggaggttgcagtgagccgagatcatgtcactgcactccagcctgggtgacagagtgagactccgtctcaaaagaaaaaaaattctcccttggccgggcttggtggcttatgcctgtaatcccagcactttggaaggccgaggcgggtgggtcacctgaggtcaggagtttgagaccagcctggccagcatggcgaaacctcgtctctactaaaaatacaaaaattgtccgggtgtggtggcgggcgcctgtagtcccagctactggggaggctgaggcaggggaattgcttgaacccgggaggcagaggttatcgtgagctgacattgcgccactgcactccagcgcggaagacagagtgagcaaaaaaaaaaaaaaaaaaagaaaaaacaaaaagaaaaaaatctcccaaggcagtcatgcatttgtatgccactagcatttttttgttatagaaatattcaaagtgtaccaacgtagagaaaatagctttaaacaaagcccatgtgtacctatcagtatgctttaactgttgtcacctttctgccccacttttatctatctcgaacacccctttctgcacactctttaaaccactgtattaacaaacacattagactgcatcctgccagacctacccatacagacatcaaagtaatgattattgcttattgcctgacctaggatgtgagctccatgagaacagagactgtttacctctcgctcccctgcacctaaaacaatgcctgcttggtgtaaagtaagtgctcagtaattttttaatgtgtgaccaatgaaataacttcaagagcagagagctcttttagattagaggcacatactaagtgccagcattcaacaaaagacagacggaaataagacagatgcaaatagatctcatttattaactgtgtaatgcagctgccactgcaattaaaaaaaaaattttagtatcaacctttcaaattcctcaaaattaaagttatgactaacttcaccagcaaaggaaaaattgaaggatgtatcaagttgccatttctagcccatcaaatcggctttataaagggaagcatagtatctggtattgacgaccttgtagagaaacaggccttttcctgcctcagggaagagagctgactcaaagtaaaggctttgctagaggcagtcggcagagtatttttagcatctaaaatgctcttccacttcggcagtgaccatgcgatgtaatcaaaggagaatacgtaagtgtatggaccaggaatggtcactggagtgttgatgtaggcacaacacaagaagtagtcacagaaattgctaagtctaggtttatgtgtgcatgctgtggagtgtctctgtggtggatttctttttaagaggcagaaaaaaattctaatttaaatgtattaaattataagttctaatttaaatgtattaaaattaaattataagttgataggattattattgacacacaaggagctccaaaagagatcgtatttttattagagacaagccagttgggattgaaacaaaaatggaggggggtatagccctgtgtatgttgcacagaaaaagtatctgaatgataaaggcctaagtgataactctggacaaggaatttggattttgggagtagtgcagaggtagaggcatttttgtgatttattgttctattttttcttctagaaaaatgtaagtagtcatatataattttaaaatataaaggagaagaggcaaaatgttgaatggcacctgaggatcctatattcatattggatcagtattaacatccaggttttgattgttgtactatggttacctggtagattccctttgtatataggaaatagacactggaatagtaaggagtagtgggtcaagatgtctgcaacttattgttcagaatcactcacaaatgggaaatctgatataaggacaaaatgggagcactgtggcctatttttacaacttttgtgtacatctgcaattgtttcaaaataaaatgtttaaaagggtgctctta

SEQ ID NO: 183315 - DNA, 768 bp, Artificial Sequence
  derived and/or modified sequence
gcgaagtgggcctcgctctcccgggttagcagccgtagccagatccgttgaaaggagtgcagagaggtctcattgcgctcccgaacagacctgacgtagatccgaagtggcccgcgccatctcaactatgaggggacacccgtaggcggcgggagagggacgccgcgaggagccaataaagctccgcaaccggaagtgtcttctgggaggggtcgtacccggaagtgtggcacctcccgggccgcacccggaagtgtgatgccaccgccgctacggggaagtaatggtatccggccaattgagattcggagttaaaacagggatgtgcagatggaggtcggaggagacactgctgccccggcccccgggggcgcggaggacttggaggacacgcagttccccagtgaggaagctagagaaggtggaggggttcacgcggtcccgccggatcccgaagacgagggcctggaggaaacaggatccaaggacaaggaccagccacccagcccatcaccaccgccccagtcagaggccctgtcaagcacctctcggctctggagtcctgcagcccctgagaatagtcccacatgtagccctgagagtagctctggaggccagggcggggaccccagtgatgaggagtggcgcagccagcggaacggctgtcggacctgtaccaccgcctgcatgctcgtctccacagcacctcccgacccctgcgcctcatttaccacgtggctgagaaggagacactactggcctgggtaa

SEQ ID NO: 183316 - DNA, 1644 bp, Artificial Sequence
  derived and/or modified sequence
atggaggtgggcggcgacaccgccgcccccgcccccggcggcgccgaagaccttgaggatacccagttcccatccgaggaggcccgggagggggggggggtgcatgccgttcccccggatcccgaagacgaagggctggaggagaccgggagcaaggataaagaccagccccccagtccttcaccccctccacagtccgaagccttgtcctccaccagccggctctggtctcccgccgcccctgaaaactcccccacctgtagtccagaatcatcgagcgggggccagggaggagatccttcagacgaagagtggcgttcgcagagaaagcatgttttcgtgttgtctgaggctggcaaaccaatctacagccgctatggaagcgtggaggctctaagtgccactatgggggtgatgaccgctctggtgtcatttgtgcagtctgccggcgacgccattcgggccatctacgccgaggaccataaactcgtgtttctgcagcagggccctctgctgttagtagccatgtcacgcacctcccagagtgctgcccagctgcgaggtgagctgctggctgtgcacgcacaaattgtgtcaacactgacgagggccagcgtggctcggatattcgctcacaagcaaaactacgacctgcggcgactgttagctggcagcgaaaggacactggatcggttgctggatagcatggaacaggatccaggcgcgctgctcctgggagctgtgcgctgtgtcccactcgcccggcctcttcgggacgcattgggcgctcttctgaggagatgtacagcccctggactggcactgagcgttctggcagtaggcgggcggctgataactgccgcccaggagcgtaatgtgctcgcagaatgtcgcctcgatcccgccgacctacagctcctcctcgactgggtgggcgctcctgcctttgcggccggggaggcctgggccccagtgtgcctgccacggtttaaccccgatggcttcttttacgcatacgtggctcggctcgacgctatgccagtctgcctgctgctgctgggcacacagcgcgaggctttccacgcaatggccgcttgcagacgtctggtggaagatgggatgcacgcccttggcgccatgcgagcgctaggtgaagccgccagcttcagcaacgcttcctctgcaagtgctccagcttactccgtgcaggctgtgggtgcccccggattgaggcatttcctgtataaacccctggacattccagaccatcatagacaattgccacaatttacatctccggaactcgaagctccatattccagggaggaggaaaggcagcggctatctgatctgtaccatagactgcatgcccggttacacagcacatccagacccctgaggctgatctatcacgttgcagagaaagagacactgctagcttgggtgacaagcaaatttgagctttacacatgcctgtcccctctagtaacaaaggctggagcaatcctggtcgtaacaaaactgttgaggtgggtcaagaaagaagaggaccgactgtttattcgatacccgcctaaatattcaaccccgcccgccacttcaacagaccaggcagctcataacggactctttacaggcctatag

SEQ ID NO: 183317 - DNA, 438 bp, Artificial Sequence
  derived and/or modified sequence
atggaggtgggcggcgacaccgccgcccccgcccccggcggcgccgaggacctggaggacactcagttcccttcagaggaggctcgtgaaggcggaggggtgcatgctgtgccaccggatccagaagacgagggactggaagagaccggctctaaggacaaggatcaaccacctagcccgagccctcccccccagtccgaagctctgagctcaacctctcgcctctggtctcccgcagcccccgagaatagccccacctgttctcctgagtcctcatctgggggccagggcggcgatccttccgatgaagaatggaggtctcagcgtaacggctgccgcacgtgtacgactgcctgtatgttagtgtctacagcccctcccgatccctgtgctagttttacgacttggcttaggaggagacactactggccaggttag

SEQ ID NO: 183318 - DNA, 1644 bp, Artificial Sequence
  derived and/or modified sequence
atggaggttggtggggacactgccgctcccgctccgggaggcgctgaggacttggaggacactcaatttccgagcgaggaagccagagaagggggaggggtgcacgctgtgcccccagacccagaggatgaaggcctggaggaaacaggctctaaggacaaagatcaacccccttcccccagcccccctccccagtctgaggctctgagttccaccagtcggctctggtcaccggcagccccagaaaatagcccaacttgctcccctgaatcatcttctggaggacagggcggtgatccttcagatgaagaatggcggagccagcgcaaacatgtgtttgtcctcagcgaggctggaaaaccaatttattcccgatatggatcggtggaggccctcagcgccacaatgggcgttatgacagccctcgtatcttttgtccaatctgccggagacgcaatacgagccatttatgccgaagatcataagctcgtcttcctccaacaagggccactgctcctggtggctatgagtcgcacttctcagtctgctgcccaactcaggggcgaactgctggccgtacacgcccagatcgtcagcacactcacaagggcctcagttgccaggatctttgctcacaaacagaattatgacctgagacgcttactggcgggtagcgagcgtaccctcgaccggttactcgactccatggaacaggaccccggagcactgctcttaggcgcagtgcgctgtgtccctctggccaggcctctacgagatgctctgggcgctctgctgaggcggtgtacggccccaggactcgctctaagtgtcctagccgtgggtgggaggctgattaccgctgcccaggagcggaatgtgctggctgaatgccgcctggatcctgcagatctccagttactccttgactgggtaggtgccccagctttcgccgctggcgaagcatgggcccctgtttgcctgcctcgtttcaatcctgacggatttttttacgcttatgtggcaagactcgatgctatgcctgtgtgtctgttactgcttgggactcagcgggaagcattccatgctatggcagcgtgtcgacgacttgtggaagacggaatgcacgcactaggagcaatgagggcactgggcgaagccgcatccttttcaaacgccagcagcgcaagcgctccagcttacagtgtgcaggctgtcggcgctcccggtctgcgccatttcctttataagcccctggatatccccgatcaccatcggcaactccctcagttcacttctcccgaactggaggccccttacagtagagaagaagaaagacagcggctgagtgacctgtatcacagactacatgcgagactccactccactagccgcccactgcgcctcatttatcatgtagctgagaaagaaacgttactggcttgggtaacctctaagttcgagctgtatacgtgtctaagcccgctggtgaccaaggcaggggcaatccttgtggtcacaaagcttctgcggtgggtgaagaaagaggaggaccggcttttcattagataccctcctaaatacagcacgcctcctgctacaagcacggatcaggccgcacacaacggattgttcacagggttatag

SEQ ID NO: 183319 - DNA, 438 bp, Artificial Sequence
  derived and/or modified sequence
atggaggtcggaggcgacacagccgctccggctcccggaggagcagaagatcttgaagatacccagtttccatcagaggaagcccgagaaggaggtggagtgcatgccgttcctccagacccggaggatgagggactggaggaaactggctcaaaggacaaagaccagcctccttctccttctccgccaccgcaatctgaagctttgagctctacaagtcggctttggtcaccagcggcaccagagaactcccctacgtgctctccagagtcatcttccggaggccagggaggcgatccctctgacgaggagtggcgttctcagagaaacggctgtcggacatgcaccactgcctgcatgctagtgagcacagctccgccagatccatgcgcgtcttttacaacctggttgagacgtagacactattggcccggatag

SEQ ID NO: 183320 - DNA, 1644 bp, Artificial Sequence
  derived and/or modified sequence
atggaggtgggcggcgacaccgccgcccccgcccccggcggcgccgaggacctggaggacacccagttccccagcgaggaggccagagagggcggcggcgtgcacgccgtgccccccgaccccgaggacgagggcctggaggagaccggcagcaaggacaaggaccagccccccagccccagcccccccccccagagcgaggccctgagcagcaccagcagactgtggagccccgccgcccccgagaacagccccacctgcagccccgagagcagcagcggcggccagggcggcgaccccagcgacgaggagtggagaagccagagaaagcacgtgttcgtgctgagcgaggccggcaagcccatctacagcagatacggcagcgtggaggccctgagcgccaccatgggcgtgatgaccgccctggtgagcttcgtgcagagcgccggcgacgccatcagagccatctacgccgaggaccacaagctggtgttcctgcagcagggccccctgctgctggtggccatgagcagaaccagccagagcgccgcccagctgagaggcgagctgctggccgtgcacgcccagatcgtgagcaccctgaccagagccagcgtggccagaatcttcgcccacaagcagaactacgacctgagaagactgctggccggcagcgagagaaccctggacagactgctggacagcatggagcaggaccccggcgccctgctgctgggcgccgtgagatgcgtgcccctggccagacccctgagagacgccctgggcgccctgctgagaagatgcaccgcccccggcctggccctgagcgtgctggccgtgggcggcagactgatcaccgccgcccaggagagaaacgtgctggccgagtgcagactggaccccgccgacctgcagctgctgctggactgggtgggcgcccccgccttcgccgccggcgaggcctgggcccccgtgtgcctgcccagattcaaccccgacggcttcttctacgcctacgtggccagactggacgccatgcccgtgtgcctgctgctgctgggcacccagagagaggccttccacgccatggccgcctgcagaagactggtggaggacggcatgcacgccctgggcgccatgagagccctgggcgaggccgccagcttcagcaacgccagcagcgccagcgcccccgcctacagcgtgcaggccgtgggcgcccccggcctgagacacttcctgtacaagcccctggacatccccgaccaccacagacagctgccccagttcaccagccccgagctggaggccccctacagcagagaggaggagagacagagactgagcgacctgtaccacagactgcacgccagactgcacagcaccagcagacccctgagactgatctaccacgtggccgagaaggagaccctgctggcctgggtgaccagcaagttcgagctgtacacctgcctgagccccctggtgaccaaggccggcgccatcctggtggtgaccaagctgctgagatgggtgaagaaggaggaggacagactgttcatcagatacccccccaagtacagcaccccccccgccaccagcaccgaccaggccgcccacaacggcctgttcaccggcctgtag

SEQ ID NO: 183321 - DNA, 438 bp, Artificial Sequence
  derived and/or modified sequence
atggaggtgggcggcgacaccgccgcccccgcccccggcggcgccgaggacctggaggacacccagttccccagcgaggaggccagagagggcggcggcgtgcacgccgtgccccccgaccccgaggacgagggcctggaggagaccggcagcaaggacaaggaccagccccccagccccagcccccccccccagagcgaggccctgagcagcaccagcagactgtggagccccgccgcccccgagaacagccccacctgcagccccgagagcagcagcggcggccagggcggcgaccccagcgacgaggagtggagaagccagagaaacggctgcagaacctgcaccaccgcctgcatgctggtgagcaccgccccccccgacccctgcgccagcttcaccacctggctgagaagaagacactactggcccggctag

SEQ ID NO: 183322 - protein, 722 aa, Artificial Sequence
  derived and/or modified sequence
MSQQDAVAALSERLLVAAYKGQTENVVQLINKGARVAVTKHGRTPLHLAANKGHLPVVQILLKAGCDLDVQDDGDQTALHRATVVGNTEIIAALIHEGCALDRQDKDGNTALHEASWHGFSQSAKLLIKAGANVLAKNKAGNTALHLACQNSHSQSTRVLLLAGSRADLKNNAGDTCLHVAARYNHLSIIRLLLTAFCSVHEKNQAGDTALHVAAALNHKKVAKILLEAGADTTIVNNAGQTPLETARYHNNPEVALLLTKAPQVLRFSRGRSLRKKRERLKEERRAQSVPRDEVAQSKGSVSAGDTPSSEQAVARKEEAREEFLSASPEPRAKDDRRRKSRPKVSAFSDPTPPADQQPGHQKNLHAHNHPKKRNRHRCSSPPPPHEFRAYQLYTLYRGKDGKVMQAPINGCRCEPLINKLENQLEATVEEIKAELGSVQDKMNTKLGQMENKTQHQMRVLDKLMVERLSAERTECLNRLQQHSDTEKHEGEKRQISLVDELKTWCMLKIQNLEQKLSGDSRACRAKSTPSTCVDQLVVTAGPAAASDSSPPVVRPKEKALNSTATQRLQQELSSSDCTGSRLRNVKVQTALLPMNEAARSDQQAGPCVNRGTQTKKSGKSGPTRHRAQQPAASSTCGQPPPATGSEQTGPHIRDTSQALELTQYFFEAVSTQMEKWYERKIEEARSQANQKAQQDKATLKEHIKSLEEELAKLRTRVQKEN

SEQ ID NO: 183323 - DNA, 2169 bp, Artificial Sequence
  derived and/or modified sequence
atgagccagcaggatgctgtggctgccctgtctgagaggctcctcgtagccgcctacaaaggccagaccgagaacgtggtgcagctgatcaacaagggcgcaagagtggccgttacaaagcatggcaggacccccctgcatcttgcagcaaacaagggacacctgcccgtcgtgcagatactactgaaggctggatgcgatctggatgttcaggacgatggagaccagaccgcactccaccgggctaccgtggtcgggaatacagagattattgctgctttgatccatgaggggtgcgccctcgacagacaggacaaagatggtaacacagctctgcatgaggcaagttggcacggcttctcacaatccgctaagctgcttatcaaagctggggcaaacgttctagctaagaacaaagcaggaaacactgccctacacctcgcgtgccagaattctcattcccagagtacgcgcgtgctcctcctggccggcagtagggccgatctgaagaacaacgccggagacacttgcctccacgtagctgccaggtacaaccacctcagcattattcggctcttattgactgccttctgcagtgtgcatgaaaaaaaccaggctggcgataccgctctgcacgtggcagccgctctgaaccacaaaaaggtcgccaagatcttgctcgaggcgggggctgacaccaccatagtgaacaatgctggccaaacccctcttgagacagcccgctatcacaacaatccagaggtagccttactgctgacaaaagcaccccaggtgctgcggttctccagaggtagaagcctgcggaagaagcgagaaagactgaaagaggagcggcgcgcacaatcagtcccaagggatgaagttgcccagtccaagggctcagtgtctgccggcgacacaccatcttccgaacaggcagtggcaagaaaagaagaggctcgggaagagttcctcagcgcctccccggagcccagagccaaggacgaccggagacgcaaaagtaggcctaaggtttccgctttctccgatcctacccctcctgcagaccagcagccgggccaccaaaagaacctgcacgctcataatcacccgaagaagcggaatagacaccgctgttcctcccccccccctccacacgagttcagggcataccagttgtataccctgtaccgcggaaaggatgggaaggtcatgcaggctccgatcaacggctgtagatgcgaaccccttatcaacaaactggagaaccaactcgaagcaacggttgaagaaataaaggccgagctgggctcggtacaagacaaaatgaatactaaactcggacaaatggagaacaagacccagcatcagatgcgcgtgctcgataagcttatggtagagcgcctgagtgccgagaggacagaatgtctgaatagactgcaacagcacagtgataccgaaaaacacgagggcgagaaaaggcaaatcagtctggtcgacgaactgaagacgtggtgcatgctaaaaatccagaacttggaacaaaaactgtcaggggacagtagagcgtgcagagccaagagtacaccctccacatgcgttgatcagctggttgtgactgcagggcccgccgccgcctcagactctagcccacccgttgtcagaccaaaagaaaaggccctgaatagcaccgccacccaacgccttcaacaggagctgtcgagcagtgattgcactggctctcggctgcgcaatgtgaaggttcagacagccctgctgcccatgaacgaagctgcacgaagcgaccagcaggccgggccgtgcgttaatcggggaacacagacgaaaaaatcgggtaaatctggtcctactaggcacagggcccagcagccggcggcctcatctacatgcggacagcccccaccagccacaggatccgaacaaacgggcccccacattcgcgacacctcgcaggcactggagctgacacaatacttttttgaagcagtctcgacccagatggaaaaatggtacgagcggaagatcgaggaagccaggagtcaggcaaatcagaaggcccagcaagacaaagccacgctcaaggagcatatcaaatctctggaggaagagctggctaagctgagaacacgtgtgcagaaggagaattag

SEQ ID NO: 183324 - DNA, 2169 bp, Artificial Sequence
  derived and/or modified sequence
atgagccagcaggatgctgtggccgccctgtctgagcggctgctggtggccgcctacaagggccagacagaaaatgtggtgcagctgatcaacaagggggcccgggtggccgtgaccaagcacggccgcacccccctgcacctggccgccaacaagggccacctgcctgtggtgcagatcctgctgaaggccggctgtgacctggatgtgcaggatgatggagaccagacagccctgcaccgggccaccgtggtgggcaacacagagatcatcgccgccctgatccacgagggctgtgccctggaccggcaggacaaggatggcaacacagccctgcacgaggcctcctggcacggcttcagccagagcgccaagctgctgatcaaggccggggccaacgtgctggccaagaacaaggccggcaacacagccctgcacctggcctgccagaacagccacagccagagcaccagggtgctgctgctggccggcagcagagctgacctgaagaacaatgctggggacacctgcctgcacgtggccgcccgctacaaccacctgagcatcatccggctgctgctgacagccttctgcagcgtgcatgagaagaaccaggccggggacacagccctgcacgtggccgccgccctgaaccacaagaaggtggccaagatcctgctggaggccggggctgacaccaccatcgtgaacaatgccggccagacccccctggagacagcccgctaccacaacaaccctgaggtggccctgctgctgaccaaggccccccaggtgctgcgcttcagccggggccgcagcctgaggaagaagcgggagcggctgaaggaggagcggcgggcccagagcgtgcccagagatgaggtggcccagagcaaaggatctgtgtctgctggggacacccccagcagcgagcaggccgtggccaggaaggaggaggcccgggaggagttcctgagcgccagccctgagccccgggccaaggatgacagaagaaggaagagccggcccaaggtgtctgccttcagtgaccccaccccacctgctgaccagcagcccggccaccagaagaacctgcacgcccacaaccaccccaagaagaggaacagacaccgctgcagcagccccccacctcctcatgagttccgggcctaccagctgtacaccctgtaccggggcaaggatggcaaggtgatgcaggcccccatcaatggctgccgctgtgagcccctcatcaacaagctggagaaccagctggaggccaccgtggaggagatcaaggccgagctgggctctgtgcaggacaagatgaacaccaagctgggccagatggagaacaagacccagcaccagatgagggtgctggacaagctgatggtggagcggctgtctgctgagaggacagaatgtctgaaccggctgcagcagcacagcgacacagagaagcatgaaggagagaagaggcagatcagcctggtggatgagctgaagacctggtgcatgctgaagatccagaacctggagcagaagctgagcggggacagccgggcctgccgggccaagagcacccccagcacctgtgtggaccagctggtggtgacagctggccctgctgctgccagtgacagcagcccccctgtggtgcggcccaaggagaaggccctgaacagcacagccacccagaggctgcagcaggagctgagcagcagtgactgcaccggcagccggctgagaaatgtgaaggtgcagacagccctgctgcccatgaatgaggccgcccggagtgaccagcaggccggcccctgtgtgaacagaggcacccagaccaagaagagcggcaagagcggccccaccaggcaccgggcccagcagcctgctgccagcagcacctgtggccagcccccaccagccaccggcagcgagcagacaggcccccacatccgggacaccagccaggccctggagctgacccagtacttctttgaagctgtgtccacccagatggagaagtggtatgaaaggaagattgaggaggcccggagccaggccaaccagaaggcccagcaggacaaggccaccctgaaggagcacatcaagagcctggaggaggagctggccaagctgcggaccagggtgcagaaggaaaattag

SEQ ID NO: 183325 - DNA, 2169 bp, Artificial Sequence
  derived and/or modified sequence
atgagccagcaggacgccgtggccgccctgagcgagcggctgctggtggcagcctacaaggggcagaccgaaaacgtcgttcaactcattaataaaggcgcacgggtggctgtgactaagcatggcaggaccccactccacctggcagcaaataaggggcatctcccagtggttcaaatcctgctgaaggctggttgtgatcttgacgtgcaggatgatggcgatcagactgccctgcacagagcaaccgttgtaggtaatactgagattattgccgctctaatccacgagggctgcgcacttgataggcaggacaaggatgggaatacagcgctacacgaagctagctggcacgggttttcgcagtctgctaagttattgattaaggccggagcgaatgtgctggctaagaataaggcaggcaacacggcccttcacttggcctgccagaattcgcattcccagagtactcgagtgctgctattagccggttctcgtgccgatcttaagaataacgccggagacacatgcctccacgtggccgccaggtacaaccatctcagcataatcagactcctcctcactgctttttgttctgtgcatgaaaaaaatcaggcgggcgacactgccttgcatgttgctgccgcactcaatcataaaaaggtcgcaaagatcctgctggaggccggcgcagatactacaatcgtcaacaatgctgggcaaaccccactggagaccgcaaggtaccacaacaaccccgaggtcgccctgttattgacgaaagctccacaggttctacgctttagtcgtggacggtcattgaggaagaagcgcgaacggctcaaagaggagagaagggctcagagcgtgccaagggacgaagtagcccagtcgaaaggttctgtgtctgccggggatacaccctctagcgagcaggcggtcgcccgcaaggaagaggctagagaggaatttctgtcagcctccccggaacctcgggccaaggatgacaggagacgcaaatcacgcccaaaggttagcgccttctctgacccgaccccacccgcggaccagcaacctggtcaccagaaaaatctccacgcgcacaatcaccccaagaaaagaaatcgccatcgctgcagttccccgccacctccacacgaattccgggcttaccagctttacaccctctatcgaggcaaagatggaaaggttatgcaagcgcccatcaatggatgtcgatgtgagcctttaatcaataaactcgagaaccaactggaagccactgtggaggaaatcaaagcagagcttggctctgtgcaggacaaaatgaacaccaagctgggccagatggagaataagactcagcatcagatgcgggttctggacaaattaatggtggaaaggctttcagctgaacgcaccgagtgtttgaacagacttcagcagcactcagacaccgaaaagcacgaaggtgagaaacggcaaatcagtctggtggacgagctgaagacttggtgcatgctgaaaattcagaacctggagcagaaactttcaggggattcgagggcgtgccgcgccaagtctaccccctccacgtgcgtggatcaactggtggtgacagcaggacccgcagcggccagcgactcctccccccccgttgttcgacctaaggagaaagcgctcaatagtactgccacacaaaggctgcagcaggaattgtccagctccgactgcactggaagtagacttcggaatgtcaaagtgcagactgccctgctgccaatgaatgaagccgcacggtctgatcagcaggccggaccctgtgtgaatcgagggactcagactaaaaagagcggaaaatcaggcccgacacggcaccgggctcagcagcctgcagcctcctcgacctgcgggcagcctccaccagcaacaggtagcgaacaaaccggaccacacatccgcgatacctcccaggctttggaactgactcagtatttctttgaggctgtctcgacccagatggagaagtggtacgagcgcaaaatcgaagaggcccggtctcaagctaaccagaaggcccagcaagataaagctactctgaaagaacatatcaaatctctcgaagaagagctcgccaagttacgaacaagggttcagaaggaaaattag

SEQ ID NO: 183326 - DNA, 2968 bp, Artificial Sequence
  derived and/or modified sequence
gcgctgcctggcgcgcgggcggctggaggcacggcgctgggcggcgccgaggccctggggccgccggagccagcgggagccagtccccgtcttcgcccctcgccccccaccgtgtcgccggccttggtccctgcggcgcggacgtccggcgcgggagagaaaggtcccgaagatggcatattcataaagacatcttctgatgattgtgaacatctttacctctgggtgccaggccgggccagtgacttcgtgttgagctgaaggaacttgtctaccgcttccctgaaaacctttctttcctaattcatgagccagcaagatgcggtcgctgcactttcagagcgccttctcgtagctgcgtacaaaggccaaacagagaatgtggttcagctcatcaacaagggcgccagggtagcggttaccaagcatggccggactcccctgcatcttgctgccaataagggccatcttcctgtggtccagatcttgctgaaggctggctgcgaccttgatgtccaggatgatggggaccagaccgccttgcaccgggccacagtggtggggaacacggagatcatcgcggcgctcatccacgaagggtgtgccctggacagacaagacaaggatgggaatacagccttgcatgaagcatcctggcatggtttcagccagtcagccaagctgctcattaaagcaggagccaacgtgcttgccaagaacaaggcggggaacacagctctgcacctggcctgccagaacagccactcccagagcacgcgcgtcctcctgctggccgggtcccgcgctgacctcaaaaataatgcaggagacacctgtttgcacgttgctgcgcgctataatcacttgtccatcattaggctcctcctcactgctttctgttctgtccatgaaaagaaccaggctggagacacagcacttcacgttgctgctgccctaaatcacaagaaggtggccaaaatcttactggaagccggagcagatacgaccattgttaacaatgcaggccagactccgctggagactgcccgctaccacaataacccggaagttgctcttctccttactaaagctccccaggtcttgcgcttcagtcgtgggcgaagcctgaggaaaaagagagagaggctcaaggaagagaggagagcccagtctgtgccaagagatgaggtggcccaaagcaagggcagtgtctcagcaggagacacccccagcagtgaacaggctgtggccagaaaagaagaagccagagaagagttcctgtcagcctccccagaacccagagcaaaggatgacaggaggagaaagtcaaggcccaaggtgtcagcattttctgaccccaccccaccagccgaccaacagcctggacaccagaagaacctgcatgctcataatcaccctaaaaagaggaacaggcatcggtgttcatccccacccccaccccatgagttcagggcgtatcagctctacacattgtaccggggcaaggatgggaaagtgatgcaggcaccaataaatggttgtcgatgtgaacctctaatcaacaagctggagaatcagttggaggctactgtggaggagataaaagcagagctgggatcggttcaggacaaaatgaatacaaagctggggcagatggagaataagacccagcaccaaatgcgtgttttggacaagctgatggttgagcgactttctgcagagaggacggagtgcctgaaccgcctgcaacagcactcagacacagagaagcatgagggggagaaacgacagatatccttggtggatgaattaaaaacctggtgcatgttaaagattcagaatctggagcagaagctttctggagattctagggcctgcagagctaaatccacaccatctacttgtgtggaccaattagtggtgactgcaggtccagcagcagcttccgacagctcccctccagtggttaggcccaaagagaaggccctcaactccactgctacccagagactccagcaggagctgtcgtcttctgactgtacaggctcccgactgagaaacgtcaaggtccagacagccttgctacccatgaatgaggcagccagatctgatcagcaggctgggccctgcgtcaacagaggcactcaaactaagaagtctgggaagagtgggccaacaaggcatcgtgcccagcaacccgcagccagcagcacctgtgggcagccgccaccagccacaggcagcgagcagactggccctcacattcgggacacctcccaagctctggagcttacccagtatttttttgaggctgtttctacccagatggaaaagtggtatgaaaggaagattgaagaagcacgaagccaagccaatcagaaagcccagcaagataaggctacattgaaggaacacattaaaagtttagaagaggaacttgccaaactaaggactagggtgcagaaggaaaattagcaccaataaagaggaaatatgaaaggattcttgaagatttccagttttgcaactgcataatagctatgcccaaggagtcaactattgtatatattgcagatttgcctttttaaaaaaatcactaattctacaatgtgccagatacatgtttcctatgcccaggaagttatgaagacttcaacaattaaactgaaaccaggggaagcttgcttagttttgggtttcattataaactcttagcctcagtccaggttaatctgaagtttgaaagctcagattaagcaagccatgccaagaaactggacgatgtgtaagcctagactctaaaattcaagatgtgtgaaataatataagtcaaaagcaagaaaaacgtaatcccgtctgaactcaagtagtcattcatataaatttgaacacacctgctgtgcctagacaagtgtctttctgtaagagctgtaactctgagatgtgctaaataaaccctctttctcaa

SEQ ID NO: 183327 - DNA, 2169 bp, Artificial Sequence
  derived and/or modified sequence
atgtctcaacaggacgccgtcgctgcactctcagagcgcctacttgtcgccgcatacaagggccaaaccgaaaacgttgtacagttaatcaataaaggggctagggtcgcagtgaccaaacacgggaggacccctctccatcttgctgctaataaagggcacctacccgtggtccagatcttactcaaggctgggtgtgacctcgacgtgcaggacgacggagatcagactgctcttcaccgcgctactgtggtcgggaataccgagataatcgcagcgctcatccacgaagggtgcgccctggacaggcaggacaaggatgggaatacagcgctgcacgaggcatcttggcacggcttctcccagagtgccaaacttctgataaaagccggagccaacgtcctagcaaagaataaggcaggaaacacggcgctgcacctggcatgccaaaattcccacagccagagcacaagagtcttgttgctcgcgggttcacgcgcagatctcaagaacaacgctggggatacgtgcctgcacgtcgctgcgagatacaaccacctctctattatccggctcctactgactgccttttgtagcgtgcacgagaagaatcaggccggagacaccgccctccacgtcgcggcagcacttaatcataaaaaagtggccaaaatcctcttggaggcaggcgcagatactaccattgtgaataacgctggacaaacccctctcgagaccgccagataccataataaccctgaggtagcgttgctcctgactaaggctccacaagttttacggttctcacgcggaagatccctgcgaaaaaaacgcgaaagactaaaggaagagagaagggctcagtctgtgcctagggatgaggtggcgcagagcaagggaagcgttagcgcgggagacaccccaagcagcgaacaggcggtcgcccgtaaggaggaggcccgagaagagttcttgagcgcatccccagagccaagggctaaggatgacagaagacgcaagtcacgccctaaagtcagcgcctttagtgaccccaccccaccggcagaccagcagccaggacaccaaaaaaacctgcacgcacataatcacccaaagaagcgtaatcgccaccgctgctcttctccaccacccccacatgaattcagagcttatcaactctacaccctgtaccggggtaaggatggaaaagtgatgcaagccccaatcaatggatgtcgatgtgagcctctcatcaacaaactggagaaccagctcgaggctaccgtggaggagataaaggcggaactgggtagcgtccaggacaaaatgaatactaagctgggtcagatggaaaataaaacccagcaccaaatgagagtactggacaagttgatggtcgagcgattgtccgccgagcgaaccgagtgtcttaatagactccagcagcactcagacactgagaagcacgagggggaaaaaagacagatctccttggtcgacgagctcaagacctggtgtatgctgaagattcagaatctggagcagaagctctctggcgactctcgagcttgccgagcaaaatccacaccttctacgtgcgtggaccagctggtagtgaccgcgggtcccgctgcagctagtgacagctctcctccagttgttcgtcctaaggaaaaagcactcaacagcaccgctactcagcggcttcaacaggagctgtccagctccgactgtaccggctctaggctccggaacgtgaaagtccagaccgcgctactccccatgaatgaagcagcccgatcggatcaacaagctggaccctgcgtcaacagaggtacccagacaaaaaagtccggtaaatctggaccaactagacatagagcccagcaacctgcagcttcatcaacatgcggacagccacccccagctacagggtccgagcagactgggccacacatccgggatacctcacaggctcttgaactcacgcagtacttcttcgaagccgtgtccacgcagatggagaagtggtatgagcgaaagatagaggaggccaggagtcaagccaatcagaaggcccagcaggacaaggcaactctgaaagaacatattaagagccttgaggaggaactcgctaagctgcgcaccagagtgcagaaggaaaattag

SEQ ID NO: 183328 - DNA, 2169 bp, Artificial Sequence
  derived and/or modified sequence
atgagccagcaggacgccgtggccgccctgagcgagagactgctggtggccgcctacaagggccagaccgagaacgtggtgcagctgatcaacaagggcgccagagtggccgtgaccaagcacggcagaacccccctgcacctggccgccaacaagggccacctgcccgtggtgcagatcctgctgaaggccggctgcgacctggacgtgcaggacgacggcgaccagaccgccctgcacagagccaccgtggtgggcaacaccgagatcatcgccgccctgatccacgagggctgcgccctggacagacaggacaaggacggcaacaccgccctgcacgaggccagctggcacggcttcagccagagcgccaagctgctgatcaaggccggcgccaacgtgctggccaagaacaaggccggcaacaccgccctgcacctggcctgccagaacagccacagccagagcaccagagtgctgctgctggccggcagcagagccgacctgaagaacaacgccggcgacacctgcctgcacgtggccgccagatacaaccacctgagcatcatcagactgctgctgaccgccttctgcagcgtgcacgagaagaaccaggccggcgacaccgccctgcacgtggccgccgccctgaaccacaagaaggtggccaagatcctgctggaggccggcgccgacaccaccatcgtgaacaacgccggccagacccccctggagaccgccagataccacaacaaccccgaggtggccctgctgctgaccaaggccccccaggtgctgagattcagcagaggcagaagcctgagaaagaagagagagagactgaaggaggagagaagagcccagagcgtgcccagagacgaggtggcccagagcaagggcagcgtgagcgccggcgacacccccagcagcgagcaggccgtggccagaaaggaggaggccagagaggagttcctgagcgccagccccgagcccagagccaaggacgacagaagaagaaagagcagacccaaggtgagcgccttcagcgaccccaccccccccgccgaccagcagcccggccaccagaagaacctgcacgcccacaaccaccccaagaagagaaacagacacagatgcagcagccccccccccccccacgagttcagagcctaccagctgtacaccctgtacagaggcaaggacggcaaggtgatgcaggcccccatcaacggctgcagatgcgagcccctgatcaacaagctggagaaccagctggaggccaccgtggaggagatcaaggccgagctgggcagcgtgcaggacaagatgaacaccaagctgggccagatggagaacaagacccagcaccagatgagagtgctggacaagctgatggtggagagactgagcgccgagagaaccgagtgcctgaacagactgcagcagcacagcgacaccgagaagcacgagggcgagaagagacagatcagcctggtggacgagctgaagacctggtgcatgctgaagatccagaacctggagcagaagctgagcggcgacagcagagcctgcagagccaagagcacccccagcacctgcgtggaccagctggtggtgaccgccggccccgccgccgccagcgacagcagcccccccgtggtgagacccaaggagaaggccctgaacagcaccgccacccagagactgcagcaggagctgagcagcagcgactgcaccggcagcagactgagaaacgtgaaggtgcagaccgccctgctgcccatgaacgaggccgccagaagcgaccagcaggccggcccctgcgtgaacagaggcacccagaccaagaagagcggcaagagcggccccaccagacacagagcccagcagcccgccgccagcagcacctgcggccagcccccccccgccaccggcagcgagcagaccggcccccacatcagagacaccagccaggccctggagctgacccagtacttcttcgaggccgtgagcacccagatggagaagtggtacgagagaaagatcgaggaggccagaagccaggccaaccagaaggcccagcaggacaaggccaccctgaaggagcacatcaagagcctggaggaggagctggccaagctgagaaccagagtgcagaaggagaactag

SEQ ID NO: 183329 - protein, 616 aa, Artificial Sequence
  derived and/or modified sequence
MNSPGGRGKKKGSGGASNPVPPRPPPPCLAPAPPAAGPAPPPESPHKRNLYYFSYPLFVGFALLRLVAFHLGLLFVWLCQRFSRALMAAKRSSGAAPAPASASAPAPVPGGEAERVRVFHKQAFEYISIALRIDEDEKAGQKEQAVEWYKKGIEELEKGIAVIVTGQGEQCERARRLQAKMMTNLVMAKDRLQLLEKMQPVLPFSKSQTDVYNDSTNLACRNGHLQSESGAVPKRKDPLTHTSNSLPRSKTVMKTGSAGLSGHHRAPSYSGLSMVSGVKQGSGPAPTTHKGTPKTNRTNKPSTPTTATRKKKDLKNFRNVDSNLANLIMNEIVDNGTAVKFDDIAGQDLAKQALQEIVILPSLRPELFTGLRAPARGLLLFGPPGNGKTMLAKAVAAESNATFFNISAASLTSKYVGEGEKLVRALFAVARELQPSIIFIDEVDSLLCERREGEHDASRRLKTEFLIEFDGVQSAGDDRVLVMGATNRPQELDEAVLRRFIKRVYVSLPNEETRLLLLKNLLCKQGSPLTQKELAQLARMTDGYSGSDLTALAKDAALGPIRELKPEQVKNMSASEMRNIRLSDFTESLKKIKRSVSPQTLEAYIRWNKDFGDTTV

SEQ ID NO: 183330 - DNA, 1851 bp, Artificial Sequence
  derived and/or modified sequence
atgaacagccccggcggcagaggcaagaagaagggcagcggcggcgccagcaaccccgtgccccccagacccccccccccctgcctggcccccgccccccccgccgccggccccgcccccccccccgagagcccccacaagagaaacctgtactacttcagctaccccctgttcgtgggcttcgccctgctgagactggtggccttccacctgggcctgctgttcgtgtggctgtgccagagattcagcagagccctgatggccgccaagagaagcagcggcgccgcccccgcccccgccagcgccagcgcccccgcccccgtgcccggcggcgaggccgagagagtgagagtgttccacaagcaggccttcgagtacatcagcatcgccctgagaatcgacgaggacgagaaggccggccagaaggagcaggccgtggagtggtacaagaagggcatcgaggagctggagaagggcatcgccgtgatcgtgaccggccagggcgagcagtgcgagagagccagaagactgcaggccaagatgatgaccaacctggtgatggccaaggacagactgcagctgctggagaagatgcagcccgtgctgcccttcagcaagagccagaccgacgtgtacaacgacagcaccaacctggcctgcagaaacggccacctgcagagcgagagcggcgccgtgcccaagagaaaggaccccctgacccacaccagcaacagcctgcccagaagcaagaccgtgatgaagaccggcagcgccggcctgagcggccaccacagagcccccagctacagcggcctgagcatggtgagcggcgtgaagcagggcagcggccccgcccccaccacccacaagggcacccccaagaccaacagaaccaacaagcccagcacccccaccaccgccaccagaaagaagaaggacctgaagaacttcagaaacgtggacagcaacctggccaacctgatcatgaacgagatcgtggacaacggcaccgccgtgaagttcgacgacatcgccggccaggacctggccaagcaggccctgcaggagatcgtgatcctgcccagcctgagacccgagctgttcaccggcctgagagcccccgccagaggcctgctgctgttcggcccccccggcaacggcaagaccatgctggccaaggccgtggccgccgagagcaacgccaccttcttcaacatcagcgccgccagcctgaccagcaagtacgtgggcgagggcgagaagctggtgagagccctgttcgccgtggccagagagctgcagcccagcatcatcttcatcgacgaggtggacagcctgctgtgcgagagaagagagggcgagcacgacgccagcagaagactgaagaccgagttcctgatcgagttcgacggcgtgcagagcgccggcgacgacagagtgctggtgatgggcgccaccaacagaccccaggagctggacgaggccgtgctgagaagattcatcaagagagtgtacgtgagcctgcccaacgaggagaccagactgctgctgctgaagaacctgctgtgcaagcagggcagccccctgacccagaaggagctggcccagctggccagaatgaccgacggctacagcggcagcgacctgaccgccctggccaaggacgccgccctgggccccatcagagagctgaagcccgagcaggtgaagaacatgagcgccagcgagatgagaaacatcagactgagcgacttcaccgagagcctgaagaagatcaagagaagcgtgagcccccagaccctggaggcctacatcagatggaacaaggacttcggcgacaccaccgtgtag

SEQ ID NO: 183331 - DNA, 1851 bp, Artificial Sequence
  derived and/or modified sequence
atgaactcaccagggggccggggaaagaaaaagggttctgggggcgcatccaaccctgtgcctcccaggcccccccccccatgtctcgctccagcacctcctgcggccggacctgctcctcctccagagtccccgcacaagaggaacttgtactatttctcgtacccgttgtttgtggggtttgcactcctgcgtctcgtggcattccacctgggcctcttgtttgtgtggctctgccagaggttctccagggcactcatggccgctaaacgatcctctggggctgcccctgctcctgcatccgcaagtgccccagccccggtgcccggtggcgaggcggagagagttagggtgtttcacaagcaggcgttcgaatacattagcatcgcgctgagaatcgacgaggacgagaaagccggccaaaaagaacaggccgttgagtggtacaagaaaggaattgaggagctcgaaaaagggatcgcagtgattgtgacaggacagggggaacagtgcgagcgagcacgccgcctgcaggccaaaatgatgactaacctcgtgatggccaaagatagactgcagttgctcgagaaaatgcaacccgtgctgcccttctcaaagagccagactgatgtgtataatgactcaacgaatctggcatgtcgtaacgggcacctccagagtgagagtggagccgtgcctaaacgcaaagatcccctgacacacacatctaactctcttcccagatccaagacagtgatgaagacaggtagtgcaggcctgtctggccaccaccgcgcgcccagctactcaggcctgagtatggtttcgggggtgaaacagggtagcggcccagcaccaaccactcataaaggtacaccaaagactaacagaaccaataaaccttcaacgccgaccacagccacacgaaaaaaaaaagacctgaaaaattttcgtaatgtggacagcaatctcgcgaacttaatcatgaacgaaatcgtggacaacgggacagctgttaagtttgacgacatcgccggacaggacttagctaagcaggctctgcaggagatagtcatactgccctctctacgtccagaactgttcactgggttgcgtgcaccagcccgcgggctgctgctgttcggtcccccaggaaatggcaagaccatgttggccaaggctgtggctgccgaaagtaacgccacttttttcaacatttccgccgcctccctcacttccaagtatgtgggggagggtgagaagcttgtcagagcgctcttcgctgttgcccgggagttacagccgtcaatcatattcatcgatgaagtggactcattactttgcgagcgccgcgagggcgagcatgacgcttctcggcgcctgaaaaccgagttcctgatcgagttcgacggggttcaaagtgccggagatgatagagtgctggtgatgggagccactaatcgccctcaagaactggatgaagctgttctaagacgatttatcaagcgcgtatacgtgtctctacctaatgaggagacgcgtctcttgttgctcaaaaacctcctctgtaagcaaggcagccctctaacacagaaagaactggcccagctggcaaggatgacagacggctattctgggtcggatcttacggctctggctaaggatgccgcactgggcccgattagagagctcaaaccagagcaggtcaagaacatgagcgcatcagagatgcgcaacattcggctcagcgacttcacggagtccctgaaaaaaatcaagcgaagcgtcagtcctcagacactggaggcctacatccgatggaacaaggacttcggtgacaccacagtttag

SEQ ID NO: 183332 - DNA, 1851 bp, Artificial Sequence
  derived and/or modified sequence
atgaacagccctgggggccggggcaagaagaagggcagcggcggggccagcaaccctgtgcccccccggcccccaccaccctgcctggccccagcccctcctgctgctggccctgcccctcctcctgagagcccccacaagaggaacctgtactacttctcctaccccctgtttgtgggctttgccctgctgcggctggtggccttccacctgggcctgctgtttgtgtggctgtgccagcgcttcagccgggccctgatggccgccaagaggagcagtggagctgccccagccccagccagcgccagcgccccagcccctgtgcctggaggagaggccgagcgggtgcgggtcttccacaagcaggcctttgagtacatcagcatcgccctgagaattgatgaagatgagaaggccggccagaaggagcaggccgtggagtggtacaagaagggcatcgaggagctggagaagggcattgctgtgattgtgacaggccagggcgagcagtgtgagcgggcccggcggctgcaggccaagatgatgaccaacctggtgatggccaaggaccggctgcagctgctggagaagatgcagcctgtgctgcccttcagcaagagccagacagatgtgtacaatgacagcaccaacctggcctgcagaaatggccacctgcagagcgagagcggggctgtgcccaagaggaaggaccccctgacccacaccagcaacagcctgcccaggagcaagacagtgatgaagacaggcagcgctggcctgagcggccaccaccgggcccccagctacagcggcctgtccatggtgtctggagtgaagcagggcagcggccctgcccccaccacccacaagggcacccccaagaccaacagaaccaacaagcccagcacccccaccacagccaccaggaagaagaaggacctgaagaacttcagaaatgtggacagcaacctggccaacctgatcatgaatgagatcgtggacaatggaacagctgtgaagtttgatgacattgctggccaggacctggccaagcaggccctgcaggagatcgtcatcctgcccagcctgcggcctgagctgttcaccggcctgcgggccccagcccggggcctgctgctgtttggacctcctggaaatggcaagaccatgctggccaaggctgtggccgctgagagcaatgccaccttcttcaacatctctgctgccagcctgaccagcaaatatgtgggggagggggagaagctggtgcgggccctgtttgctgtggcccgggagctgcagcccagcatcatcttcattgatgaggtggacagcctgctgtgtgagcggcgggagggggagcatgatgccagccggcggctgaagacagagttcctgattgaatttgatggagtgcagagcgctggagatgacagagtgctggtgatgggcgccaccaaccggccccaggagctggatgaagctgtgctgcggcgcttcatcaagagggtgtatgtgtccctgcccaatgaggagacccggctgctgctgctgaagaacctgctgtgcaagcagggcagccccctgacccagaaggagctggcccagctggccaggatgacagatggctacagcggcagtgacctgacagccctggccaaggatgctgccctgggccccatccgggagctgaagccagagcaggtgaagaacatgtctgccagcgagatgaggaacatccggctgagtgacttcacagagagcctgaagaagatcaagaggtctgtgagcccccagaccctggaggcctacatccgctggaacaaggactttggagacaccaccgtgtag

SEQ ID NO: 183333 - DNA, 1851 bp, Artificial Sequence
  derived and/or modified sequence
atgaacagccccggcggccggggcaagaagaagggcagcggcggcgcctcaaatcctgtgccacctcgaccgcctccaccatgtctggctcctgcaccgcccgctgcagggcctgcccctcccccggaaagcccacataaacgtaacctgtactactttagttatcccctgttcgtgggtttcgcccttcttcggctggtggctttccacctgggtctgctgttcgtatggctatgccagcgctttagtagagcactgatggccgccaagcggtcttccggagccgctcctgccccggcgtccgctagcgctcctgcaccagttcctgggggagaagctgaaagagtgagggtatttcacaagcaggcttttgagtacatctcaattgctctgcgtattgacgaagacgaaaaagccggtcagaaagagcaggctgtcgagtggtacaagaagggcattgaggaactggagaaggggatagccgtgatagttaccggccagggggaacaatgtgaacgagctcgcaggctgcaggccaagatgatgacgaatctggttatggcaaaggacagactccagcttcttgaaaaaatgcagcccgtcctgccattcagtaagagccagacagacgtatataacgacagcaccaatctggcctgcaggaatggacatctgcagtctgaatcaggcgcagttccaaaacggaaggatccactgacccatacaagcaactctctccctcgttcgaagactgtgatgaagactgggtctgctggcctgtctggacatcacagggctccgtcatacagtgggttgtctatggtgagcggagttaagcagggaagcggtccagcacccaccactcataagggcacacccaagactaatagaacaaacaaacctagcacccccacaaccgctacccgcaaaaaaaaagatctgaagaatttccgaaacgtggactcaaatctggccaatctaattatgaatgagatcgtagataatggcactgcagtgaagtttgacgatattgccggccaggacttggccaagcaggcactgcaggaaatcgtcatcctgccgtccctgcggccggaattgttcactggtctccgggcccccgcacgcggcctgctgctatttggtccaccgggcaatggcaagaccatgctcgccaaggcagtggccgcagaaagtaatgccaccttcttcaacatttccgctgctagcctcacatcaaagtacgttggcgagggggaaaaattggtgcgtgctctgttcgctgttgcaagagagctgcagccttcaattatctttattgatgaagtcgattcactgctgtgtgaaaggcgcgagggcgagcacgatgcttcccgacggctaaagaccgagtttctgatcgaatttgatggtgttcagtccgcaggcgatgacagagtactcgttatgggcgcaacaaatcgaccacaagagctcgacgaagcagtgctaaggaggtttatcaagcgcgtctatgtgtccctcccgaacgaggagactcgcctgctgctcctcaagaatttgctgtgcaagcaggggagtcccctgactcagaaggaactggcccagctggccaggatgaccgacggctatagtggatccgacctgactgccttggcgaaggatgccgcgttgggtcccatccgggaattgaagcctgaacaggtgaaaaatatgagtgccagcgaaatgcggaacatcagactgtccgactttaccgagtcattaaagaaaatcaaaagatcagtctcccctcagaccctggaagcttacatccggtggaataaggacttcggtgacacaacggtgtag

SEQ ID NO: 183334 - DNA, 1851 bp, Artificial Sequence
  derived and/or modified sequence
atgaactccccaggcggacgaggcaagaaaaaaggatctggcggtgcctctaatccggtgccccctcggcctcctcctccgtgcctcgcaccagcacctcctgccgctggcccagcccctccacctgagtcgcctcataagcgcaacctctactatttttcctacccattgttcgtgggtttcgccttgctacggctggtggcattccatctgggccttctcttcgtgtggctctgtcagcggttcagtcgcgcattgatggccgctaagaggtcttcaggagccgctccagcgcctgcttccgcctccgcaccagcccctgtgcctgggggagaggccgaacgcgtccgggtctttcacaaacaggcctttgagtacatttcaatcgccctcagaatagacgaagacgaaaaggctggtcagaaggagcaagccgtggaatggtataagaaggggatagaagagctcgaaaagggtatcgcggtaatcgtgacgggccagggggaacagtgtgagcgtgcgagaaggcttcaggccaaaatgatgactaacctggtaatggcaaaggatcgcctgcagctgctggaaaaaatgcagcccgtactacccttttccaaaagtcaaaccgatgtctacaacgacagcacgaatctggcatgtcgaaatggtcatcttcagtctgagagtggtgcagtccccaaaaggaaggatcctctaacccacacgagtaactcactgccaagaagtaaaacggtgatgaagacgggttcagctgggcttagcggccaccatcgcgcaccctcatactctggcctgtcaatggtatccggggtcaagcagggaagcgggcctgctcctactacgcacaaaggcacaccgaagactaaccggaccaacaagccttccacaccaaccacagcgacccgcaaaaaaaaggacctgaaaaacttcagaaacgttgatagtaacttagcgaacctgataatgaacgagatcgtggacaatggcaccgccgtgaaattcgacgacattgcgggtcaggacctggcgaaacaagccctccaggagatcgtgattttgccaagcctccgcccagagctttttaccggcctgcgcgcaccggctagaggtttactgctctttgggccaccaggaaacggaaaaactatgcttgctaaggccgtcgcggcagaaagtaacgccaccttcttcaatattagcgcagcttcacttacctccaagtatgtgggcgagggagaaaaacttgtgcgagcactctttgcagtagcgagggagctacaaccgtctattatttttatcgatgaagtggattcactgttgtgcgaaagacgcgaaggggaacacgacgcgtcacgccgattgaaaactgaattccttattgaatttgacggggtgcagagcgccggagatgaccgggtcttggttatgggggctacaaataggccccaggagctcgatgaggcagtgctgagaagatttattaaacgggtctatgtctcgctccccaacgaggagactcgccttctccttctaaagaaccttctgtgtaagcaaggctcaccgctaacacagaaagaactggcgcaattggcccgaatgacagatggttacagtgggtctgatttgacagcactggctaaggacgctgctctgggccctatacgcgaactgaagcctgaacaggtcaaaaacatgagcgcctccgaaatgagaaatattagattgagcgattttacggaatccctgaaaaagatcaaacgctctgtgtccccgcagactcttgaggcatacattagatggaataaagatttcggtgacactaccgtgtag

SEQ ID NO: 183335 - DNA, 5117 bp, Artificial Sequence
  derived and/or modified sequence
gctcctgagaccggcgggcacacgggggtctgtggcccccgccgtagcagtggctgccgccgtcgcttggttcccgtcggtctgcgggaggcgggttatggcggcggcggcagtgagagctgtgaatgaattctccgggtggacgagggaagaagaaaggctccggcggcgccagcaacccggtgcctcccaggcctccgcccccttgcctggcccccgcccctcccgccgccgggccggcccctccgcccgagtcgccgcataagcggaacctgtactatttctcctacccgctgtttgtaggcttcgcgctgctgcgtttggtcgccttccacctggggctcctcttcgtgtggctctgccagcgcttctcccgcgccctcatggcagccaagaggagctccggggccgcgccagcacctgcctcggcctcggccccggcgccggtgccgggcggcgaggccgagcgcgtccgagtcttccacaaacaggccttcgagtacatctccattgccctgcgcatcgatgaggatgagaaagcaggacagaaggagcaagctgtggaatggtataagaaaggtattgaagaactggaaaaaggaatagctgttatagttacaggacaaggtgaacagtgtgaaagagctagacgccttcaagctaaaatgatgactaatttggttatggccaaggaccgcttacaacttctagagaagatgcaaccagttttgccattttccaagtcacaaacggacgtctataatgacagtactaacttggcatgccgcaatggacatctccagtcagaaagtggagctgttccaaaaagaaaagaccccttaacacacactagtaattcactgcctcgttcaaaaacagttatgaaaactggatctgcaggcctttcaggccaccatagagcacctagttacagtggtttatccatggtttctggagtgaaacagggatctggtcctgctcctaccactcataagggtactccgaaaacaaataggacaaataaaccttctacccctacaactgctactcgtaagaaaaaagacttgaagaattttaggaatgtggacagcaaccttgctaaccttataatgaatgaaattgtggacaatggaacagctgttaaatttgatgatatagctggtcaagacttggcaaaacaagcattgcaagaaattgttattcttccttctctgaggcctgagttgttcacagggcttagagctcctgccagagggctgttactctttggtccacctgggaatgggaagacaatgctggctaaagcagtagctgcagaatcgaatgcaaccttctttaatataagtgctgcaagtttaacttcaaaatacgtgggagaaggagagaaattggtgagggctctttttgctgtggctcgagaacttcaaccttctataatttttatagatgaagttgatagccttttgtgtgaaagaagagaaggggagcacgatgctagtagacgcctaaaaactgaatttctaatagaatttgatggtgtacagtctgctggagatgacagagtacttgtaatgggtgcaactaataggccacaagagcttgatgaggctgttctcaggcgtttcatcaaacgggtatatgtgtctttaccaaatgaggagacaagactacttttgcttaaaaatctgttatgtaaacaaggaagtccattgacccaaaaagaactagcacaacttgctagaatgactgatggatactcaggaagtgacctaacagctttggcaaaagatgcagcactgggtcctatccgagaactaaaaccagaacaggtgaagaatatgtctgccagtgagatgagaaatattcgattatctgacttcactgaatccttgaaaaaaataaaacgcagcgtcagccctcaaactttagaagcgtacatacgttggaacaaggactttggagataccactgtttaaggaaatacctttgtaaacctgcagaacattttacttaaaagaggaaacacaagatcttcaatgaacgtcatcggctacagaaacagcctaagtttacaggactttttagagtcttacatatttgtgcaccaaacttgaagatgaaccagaaaacagacttaaacaaaatatacaatgcaaatgtaattttttgttgtttaaggccttgccttgatggtcacagttatcccaatggacactaagttagagcacaacaaaacctgattctggtcttctttaccaatataatcataatgtaaataataatttgtatattgtgttgcagatgaaagtattccaggaacagtgaatggtagaagacacaagaacatttgtttgtttgtcttctgatgttttttcttaaaatagtaatttctcctacttttcttttctactgttgtcttaactacaggtgattggaatgccaaacactcttaagtttattttcttttttcgttttataaattcagtgtgccaaatgaaacttttttcctaagtaactgtaataggaaaaagtttattttgagagtttcttcttcataaatctacagacattaaacaattgttgtgttctttttaccttttatttttctattaccttgctaccaaacagtttagatagcaatataatagcaaaaaagcaaatatggtaaaatagagaaggtttgaaggtttgagttactctgtcatataacatgtagatcagtcttcatgtgacctgcagtatttttttttctaatgtatttgtcagaaatctgttgtagactgttaacttcttcctgatggaatttattttctgcaagaattattctgatatttaagagagccaattttaactgctgtgaaaatgtttccagtgcaagagaagggaaatactaggaactaagacatttctaatttattgcttattactttcttaattttacaggataattataagcaagtggaactaccatcttttattcttaataattattaatcccttcaatgaaactttaaaaaaactgaatttttatacatggcatacatttttctagttccttctgcttgctttattaactcaaaagttctagttctagtctgttgatctgccttttgttctcccaaaatgtacagtaattccatttgtttgtataaatatgcctggattttcattataaaaatgtcattgtagggagtagagactcatatcatggccttttaaatattgtaataaaggcaaatagatatttgcccttagtttactggttaaaagtttgtttacagaacttttctctggtgcttaaatgatgctatgtaaaatgtcatgagtggaaagaatatttgtagtagtaacaagaatttttcatttaggaaagatttcttaggttttgaaagaatacattaaaataaaaaacttgcccctactaggtaagaactttataatgaagacatacattcttcttaattttactcttgctcttgttaaagatttgtttgaatatagaagatgcatgatttctgggtttttttttttttttgagacagagtttcgctcttgttgcccaggctggagtgcaatggcgcaatctcgactcaccacaacctccgcctcccaggttcaagcaattctcctgcctcagcctcccgagtagctgggattacaggcatgcgccactaccccagctaattttgtatttttagtagagatggggtttctccatgttggtcaggctggtcttgaactcctgacctcaggtgatccgcctgcctcggcctcccaaagtgctgggattacaggcataagccactgcgcccagccagaagatgcatgatttcttaggatcatatgctgtttgtagccataaggtaaatcatgtctcttccaatcatgactttggaactccctgaataataaaaatgagagttgagataaataggggaaaaaaaatttttttcaagccagagctatgcatatgttaggtgatgggtagtatccctttaaggtctcaaacattacaacatcaattatgaaatactgataacgaaaggtagtaatgaaatatatatgatgaaaagaattgagaagttctaaattaagacatttcagttaagctcataaaatttcattgttttcatttaaaagattaacgttattgatacttggataactggctaatcatattaaaggactatgtggttccagctcaacttttaatatattgtctcctttaaaactatcatggttataattctattgggaaagacttttagataacaaagatttcaaatgttaaaagagataaaagtcaggttaatactatcttaaacactgagtcagaaaatcattactgtatagaagttgctttcctgatcaagtctgaacttcagctagtgctagagaactattttctatgacttaactctaaccaagttttattttaagctgtttctttgatagaagggccatgaaaatagagtaatgatatagtaggagataagggattggtttggtctttttcaataaagatagaagttgctgaagttttctgaattaataatgacttagattgtgaccttttagattcggtgttgagctctgtgttgtattacttcctaaaagataatgcttaaacattaagcattagtgtgctcttcatgttaatatggcagagttttgtaaactaaattaaaacttactgatatattggactttgagccaagggaaagaatgagtactatctttccagatatcttaagggtaaaagcttattctaagacagtctgtccattgagaatattagatttctgacttgcaaatatgtttgtactccagaagaattagaggaaaagcagatactagaattctaatttaattacatatacagccgtctttgtttatagtgtagaattctttatattttgtacaaaaactaattcttttggtaaaatgaaccatttacagttcggttttggactctgagtcaaaggattttcctttaaatgcttgtctcaattttagtctggtcttttgtacttttcttcagaagaaatgaattaaagggtacagttgcataaagtgggtttttatcctaatgtattggaaataaatgataaacttta

SEQ ID NO: 183336 - protein, 541 aa, Artificial Sequence
  derived and/or modified sequence
MVINLCLPQFRPRIHCNKISADGYEVENLISEDLTKRSHGFRTEYFIKPPVYVTVSFPFNVEICRINIDLTAGGGQNVTGLEMYTSASSSRVSWNTPQCRTLGPAEPSVPDKEAFTLVGKVLLKNQSQVVFSHRGFKARPPFGAMEATLPSPAVVAQELWNKGALSLSHVAHLRICITHVTGGGIPCIKRLEVWGQPAKTCSQEVIDSILLVTSENLPQDVALQAPALPMESDCDPGDQPESQQAPSSLQKLAEIIQDVPEEFLDPITLEIMPCPMLLPSGKVIDQSTLEKCNRSEATWGRVPSDPFTGVAFTPHSQPLPHPSLKARIDHFLLQHSIPGCHLLGRAQTALAVIPSSIVLPSQKRKIEQAEHVPDSNFGVNASCFSATSPLVLPTTSEHTAKKMKATNEPSLTHMDCSTGPLSHEQKLSQSLEIALASTLGSMPSFTARLTRGQLQHLGTRGSNTSWRPGTGSEQPGSILGPECASCKRVFSPYFKKEPVYQLPCGHLLCRPCLGEKQRSLPMTCTACQRPVASQDVLRVHF

SEQ ID NO: 183337 - DNA, 4631 bp, Artificial Sequence
  derived and/or modified sequence
ttttgtatttttagtagagacgggggtttcaccacgttagccaggctggtctcgaactcctgaactcaggtgatccgcccgccttggcctcccaaagtactgggattacaggcgtgagccaccgcgccgggactaagctgcttaatgacttccagagcgatccatccaggaaggtgttttccctctgcaggtcctagactccccctgcctcctcaacaacgtcctccagtggaaaatgtccttgggaaacgctgacagagtcttttgagcctcggccgcatccgtcactcgcgcagcaggcggaagtagcgggcagttggccggaagtggggctgtgaggctcggagtcgccggaggagccagtatctgtgtcgccgccgcccgcggcgtccccggtttggtgttgcggcgcccaccttcgggaggatcaggctgcttctgatgcttggaagatatcctctcagccacaaagatggtaataaatctttgcctcccacagttcagaccaagaattcactgcaacaagatatcagctgatggttacgaagtagaaaatctcatctctgaagatctcacaaagagaagtcatggtttcaggacagagtatttcattaagccaccagtctatgtgacagtttcatttccctttaatgtggaaatctgtaggatcaacatagacctcacagctgggggaggtcagaacgtcactggcctggaaatgtacacatctgcctcatctagcagagtgtcttggaatacgccccagtgccggaccctgggcccagctgagccatctgtcccagacaaggaggcgttcaccttggtaggcaaagtcttactgaaaaaccagagccaagtggtgtttagccacaggggcttcaaggccaggcccccttttggcgcgatggaagccacactcccctcccctgctgttgtggcccaggagctctggaataaaggggctctttcccttagccacgtggcccacttaaggatctgtatcacccatgtgacaggcggcggtatcccttgtatcaagcggttggaagtgtggggtcagccggccaagacctgctcccaggaagtgatagacagcatcctgctggtcacctcagagaacctgcctcaggatgtggctctgcaggctccagccttgcccatggaaagtgactgtgaccctggggaccagcctgagagccagcaggctccctccagcctgcagaagctggccgagatcattcaggatgtgcctgaggagttcctggatcccatcaccctggagatcatgccttgtcccatgctgctgccctcaggcaaggtcatcgaccagagcacactggagaagtgtaaccgcagtgaagccacatggggccgagtgcccagtgaccctttcacgggggtagcttttactccgcactctcagcccctgcctcacccctccctcaaggcccggattgaccatttcctgctccagcactccatccctggctgccacctgcttgggagagcacagacggcattggcagtgatcccttcttccattgttctgccctctcagaaaaggaagatagagcaggctgaacatgtcccagacagtaactttggtgtaaatgcttcctgtttttctgccacaagccctttggtcttacccactacctcagagcacactgctaagaaaatgaaagccaccaatgagcccagcctgacacatatggactgctcgacaggtccactgtcccacgagcagaagctgtcacaaagcttggaaattgccttggcatccacccttggctctatgccctccttcacggcacggctgaccaggggacagctccagcaccttggcacaagagggagcaacacttcctggaggcctggcaccggctcggagcagcctgggagcatcctgggccccgaatgtgcctcctgcaaaagagtattttctccctacttcaaaaaggagccggtgtaccagctgccctgcggccacctcctgtgccgaccctgcctgggtgagaagcaacgctccctgcccatgacgtgcacagcctgccagcggccggttgctagccaagacgtgctgcgggtccacttctgagtgactgacctccactggaggagacccattgctgggaggagctgagggggaacaggagcagggccacagcacccctgaggtctggccaggccccaggcacagagctgcctgctccctcccggggctcttcttcatcacctcacggtatagcacattgcttctgcgctggtggcaatagggcaacaaagccataggccagagggcggggggatgtccctgcctccctgccaccccccctgcctgagcccaggacccactggagccagccccaccctaggcaggaagacccctgctgagggcccccccgtgcagtccgcatacccccctgtccagcagggcactgtgggtggctcaccctagattgtggcccagatctcaggagtctctgccttcagggtcatccaaaagtggaccttgggagcagtgggggtgtctgtggagtgcatgactcagccccccgactcgcagccttaataaagcgatggttgacgtctgctgtgggtttcctcctggtggagtgcctgtctgtgtcacacactcctgtcgcccacctgcacccacacaagtggagctcacagggtagctgtgtgcagtcactgcagcttgccaggctgtcattcctgtcgatgacctgaaaggacacaaactggaattttcaggtctgtcccctgcatggggactcagaacccaggtttgcaggtgggcatacgtggtgggagggtggagggctccctctggccagtgccagctgtgctcagctggcttcagaaactgctccctgagggggagcgcagcgtttcctcatgcagttggtttcaggaaaaatacttgtttataggctgcatccttttttcagcccaacatttagctttatggagtgccaaagggaaaatatatccatatccctacaacttggtactctatcagattccagccactagaagaacctcagtgagaaaacacacccgcctttccctgttcccttctaagcacgtttgggaaggaacagcctaaagatgctttgtaaagctgtattttacccttgagcttagccgcgggtccctgtgaaccggcacattcctttcctttaggccgtccagagctctagtccacacccaatactttagagatctgggtttggggttagttgcttttttttttttttttttaattgagacagggttggtctctgttgcccaagcttgagggcagtggtgcaatcataactcattgcagcctcgaactcctgggcttaagggatccttctacctcagcctcccaggtagcaggaactataggcatgtgccaccatgcccagctaatttttttattttttgtagagacaaggtcttgctatgttgtccagactggtctcaaactcctgggctcaagcgatcctcccaaagtgcttggattgcaggcatgagccacttcgcctagccaagcctgcatttttttgagttcctacatcatttgtccacaaagatggcttcagagaggtggtcacatgctttgctctgcttcctcttggcactgaccttgatgcagccttcacatgagatttgagggtccgcatggatggcctgtgccgccctcgctggcgaggctcctgtgtgcccctggctttctgggtctgtgcctctccagaatcttgtcttaccctccggtgtgcttgtgttcttagaaaagccccagcatggccgggcatggtggctcatgcctattatcccagcactttgggaggccaaggtgggtggatcacttgaggtcaagagttcgagaccagcctggccaacatggcaaaaccccatctctactaaaaatacaaaaattagctgggcatggtggtgtgtgcctgtaatgccagctactcaggaggctgaggcatgagaatcgcttgaaccggggaggcagaggttgcagtgagccgagatctcaccactgtactccagcctgggcgacggagtgagactccctctcaaaaaaagaaaaaagccccagcatgtagcaaaagcatttcttggtgagtgtgggggctggtgattcccaccttcaccctgtcatggtctcagggaacagcctgcttcccaccagcagcttgacacccacagtgtgctctggctgctgggagcccatctctcggagaaaccctgtccacccaaccccgagagccctagcgtgcagtcagcgtcagcacggcgctcccagatgagggccggactgcctccccttaagcagctgtgttggaggtactgcccagaccgctgcaggtccctggggatctgcatttctaacaggctcctgcccccaagactgctctggtggaaaatccagcctgggagcccctggagtggcaggccctgtcctgggtacaggtggagccacccccaggagttgcgtgtgtttttcttaattgaaagacttcccccaaaaggaagtggtcttttcactacccttgccagaaacatgctaggcaccactgggctctgtttctgtcccctagaaaatgggaataaaatttcttttgctgtca

SEQ ID NO: 183338 - DNA, 1626 bp, Artificial Sequence
  derived and/or modified sequence
atggtcattaacctttgcctcccccagttccgaccacgcattcattgcaataaaatcagtgcagatggatatgaagttgaaaacctgatctcagaggacctcacaaagaggtcgcacgggtttcgtactgaatattttataaagcctcccgtctatgtgacggtttcattcccattcaatgtcgaaatttgccgaattaacatcgacttaactgccggggggggccagaacgtaactggacttgagatgtatacttccgctagcagttcgagggtcagttggaacacgccccagtgccgcacgctcggcccagctgagccaagtgtcccggacaaagaggcattcacactggtgggtaaggttctgcttaagaaccagtctcaagtcgtttttagtcacagaggcttcaaggcccggccaccctttggtgccatggaagctactcttccgtcacccgctgtggtagctcaggaactgtggaataaaggcgccctcagtctgtcccacgtggcgcacctccgcatatgcataacccacgtcaccggcggagggatcccatgtattaaacgtctggaagtgtggggtcagcccgctaagacctgctcccaggaggtgatcgactcgattttgctggttacctctgaaaacctgcctcaggacgtggccctccaggcccccgccctcccaatggagtccgattgcgacccaggcgatcaacctgaaagccaacaagccccttcctccctccagaagttagctgagatcatccaagatgtcccagaggagtttctagatccaatcacgttagaaattatgccatgtcctatgctgctaccaagcggaaaggtcatcgatcagtccaccctcgaaaagtgtaacaggtcagaggctacatggggacgagttccatcggatcccttcaccggagtggccttcaccccacacagccagccactgcctcatccttcgctcaaggcaaggatcgaccacttcctcctccaacactcaatacctggttgccacctgctaggccgtgcacaaaccgccctcgcggtcataccctcgagcatcgtgctgcccagccagaagagaaagattgaacaggccgagcatgtgcccgatagcaattttggggtgaacgctagctgtttcagcgccacctcgcccctcgtgttgcctaccacatccgagcacaccgctaaaaagatgaaagctaccaacgagccaagtttgacacacatggattgttctactggccccctgagccatgaacagaaactgagtcagtcacttgaaatcgcccttgcctccactttgggatctatgccgtcttttacagcgcgcttaactaggggtcagctgcagcacctggggaccaggggcagcaacacaagttggcgccctggcaccgggagcgagcagccaggtagcatcctcggcccggagtgcgcaagctgcaaacgggtgttttcaccttactttaagaaagagccagtctaccagttgccgtgtgggcatctgctctgccgtccttgcctgggagagaagcaacggtccttgccgatgacatgcacagcctgtcaaaggccggtagcatcacaggacgtcttacgggtgcacttctag

SEQ ID NO: 183339 - DNA, 1626 bp, Artificial Sequence
  derived and/or modified sequence
atggtgatcaacctgtgcctgccccagttccggccccgcatccactgcaacaagatctctgcagatggctatgaggtggagaacctgatcagcgaggacctgaccaagaggagccacggcttcagaacagagtacttcatcaagccccctgtgtatgtgacagtgtccttccccttcaacgtggagatctgccgcatcaacatcgacctgacagctgggggcggccagaatgtgacaggcctggagatgtacaccagcgccagcagcagccgggtgtcctggaacaccccccagtgcaggaccctgggccctgctgagcccagcgtgcctgacaaggaggccttcaccctggtgggcaaggtgctgctgaagaaccagagccaggtggtgttcagccaccggggcttcaaggcccggcccccatttggagccatggaggccaccctgcccagccctgctgtggtggcccaggagctgtggaacaagggggccctgagcctgagccacgtggcccacctgcgcatctgcatcacccacgtgactggaggcggcatcccctgcatcaagaggctggaggtgtggggccagcctgccaagacctgcagccaggaggtgattgacagcatcctgctggtgaccagcgagaacctgccccaggatgtggccctgcaggccccagccctgcccatggagagtgactgtgaccccggggaccagcctgagagccagcaggcccccagcagcctgcagaagctggccgagatcatccaggatgtgcctgaggagttcctggaccccatcaccctggagatcatgccctgccccatgctgctgcccagcggcaaggtgattgaccagagcaccctggagaagtgcaacagaagtgaggccacctggggccgggtgcccagcgaccccttcaccggggtggccttcaccccccacagccagcccctgccccaccccagcctgaaggccagaattgaccacttcctgctgcagcacagcatccctggctgccacctgctgggccgggcccagacagccctggccgtcatccccagcagcatcgtgctgcccagccagaagaggaagattgagcaggccgagcacgtgcctgacagcaactttggagtgaatgccagctgcttcagcgccaccagccccctggtgctgcccaccaccagcgagcacacagccaagaagatgaaggccaccaatgagcccagcctgacccacatggactgcagcacaggccccctgagccatgagcagaagctgagccagagcctggagatcgccctggccagcaccctgggctccatgcccagcttcaccgcccggctgacccggggccagctgcagcacctgggcacccggggcagcaacacctcctggaggcctggcaccggcagcgagcagcccggcagcatcctgggcccagaatgtgccagctgcaagagggtcttcagcccctacttcaagaaggagcctgtgtaccagctgccctgtggccacctgctgtgccggccctgcctgggggagaagcagaggagcctgcccatgacctgcacagcctgccagaggcctgtggccagccaggatgtgctgcgggtgcacttctag

SEQ ID NO: 183340 - DNA, 1626 bp, Artificial Sequence
  derived and/or modified sequence
atggtgatcaacctgtgcctgccccagttccggccccggatccactgtaacaagatcagcgccgacgggtatgaggtggagaacttgatatcagaagatctgactaagcgatcgcacggtttcagaacagagtatttcataaagcctccggtgtatgtcacagtgagctttcctttcaacgtcgaaatatgcagaattaacatcgacttaaccgccggggggggacagaacgtaaccggcctggaaatgtatacaagcgcgtctagctcacgggtatcttggaatacaccccagtgtcgcaccttagggccagccgagccaagcgtgcctgacaaagaggcattcacccttgtggggaaagttctcctgaaaaatcagtcccaggtggtgttctcgcacagaggattcaaagctagaccgccatttggggcaatggaagccactttacctagcccagctgtcgttgcacaggaattgtggaacaaaggagctttaagcctctcacacgtggcccatctcagaatttgcatcacacacgttaccggaggtggcattccctgcatcaagcgcctcgaagtgtggggacaaccagcaaaaacttgcagtcaggaggtcatcgactccattttattagtgacatctgaaaatctgccccaggatgtcgcacttcaagcacccgccctgcctatggaatcagactgtgatcctggcgaccaaccggagtctcagcaggccccctccagtctgcaaaaactcgccgagatcatacaggatgttcctgaggagtttctcgatcctataacgctcgagattatgccttgcccaatgctgcttccttccggaaaggttatcgaccagagcactcttgagaagtgcaacaggtctgaggctacttgggggcgcgtcccaagcgatcccttcactggagtcgcctttacaccccatagccagcctctgcctcatccctctctgaaagccagaattgaccacttcttgctccagcactctatacctggctgtcatctgttggggcgggctcagaccgccttggccgtcattccgtcaagcatagtactgcccagtcagaaaaggaaaattgaacaggctgagcatgtgcctgacagtaatttcggtgttaatgcttcatgcttttcagcaactagtcctctggtgcttcctaccacctctgagcatacagccaaaaagatgaaagccacaaacgaaccctccctgacacatatggactgttcgaccggcccactgagccatgaacaaaagctctcccagtctctggaaatcgcactggcctccacacttggaagcatgcccagcttcacagctaggctcacccggggccagctgcaacatctcggcactcgtggatccaatacttcctggcgacctgggaccggtagcgaacagcctgggagcattctgggaccggaatgcgcttcctgtaagagggtcttctccccttactttaagaaggaacctgtgtatcaacttccctgcggtcacctcctttgtcgcccatgccttggggagaaacagagaagtcttccgatgacgtgtacggcatgtcagcgacctgttgcatcccaggacgtactccgcgttcacttctag

SEQ ID NO: 183341 - DNA, 1626 bp, Artificial Sequence
  derived and/or modified sequence
atggtcatcaatctgtgcctgccccagttccggccaaggattcactgtaataaaattagcgctgacggctacgaggtagagaatctgataagcgaagatcttacgaaaaggagtcacggttttcgaaccgaatattttattaaaccacccgtgtacgtgacagtcagtttcccatttaacgtagagatttgtagaatcaacatcgatttgacagccggtggcggacagaatgtgactggcttggaaatgtatacgagtgcatcgtctagccgggtcagctggaataccccacagtgccgaactttggggccagccgaaccttccgtaccagacaaagaagcatttaccctcgtcggtaaagtgctcctgaagaatcagtcccaggtggtgtttagtcaccggggattcaaggcgagacctcccttcggggctatggaggccaccctcccaagcccagcagtcgtagcacaggagctgtggaataaaggagccctgtctctgtcccacgtggcccaccttcggatctgtataacccatgtcacaggcggtggaatcccctgcattaagagactggaggtttggggccagccagctaagacgtgttctcaggaggtgatcgattccattttgttggtgacatctgagaacctgcctcaggatgtggctttgcaggcaccagcgcttcctatggaatccgattgtgatcccggagatcagccagagagccagcaagctccatcttcccttcaaaagctagctgaaatcattcaagatgtgcccgaggagtttctggatccaattacattagagattatgccttgccctatgctgctgccctccggaaaagtgatagatcagtctaccctggagaagtgcaacagaagtgaagctacctgggggagagtgccttccgatccctttacaggggttgctttcacaccgcatagtcagcctttgccacatccctcactaaaggccagaattgatcactttctgctgcagcattcgataccaggctgtcacctgctgggacgcgctcagaccgcactcgctgtgatacctagttccatcgttctgcccagccagaaacgcaaaatcgaacaggccgaacacgtgccagatagcaatttcggcgtgaacgcctcatgcttttcagcaacctcacccctcgttttgcctacaacgtcagaacacaccgcaaagaagatgaaagctactaacgagccttcccttacacatatggactgctccaccggcccactcagccacgaacagaaactgtcccagtctcttgagattgccctggccagcaccttaggttctatgccatcgtttaccgcccgtctcacccggggacagctgcagcacctgggcactcggggatcgaatacctcatggcggccaggtaccggctctgagcaaccgggaagcatactgggacccgagtgtgcttcatgtaaacgtgtatttagcccctattttaagaaggaacccgtgtatcagttgccatgcgggcatctgctctgtcgcccatgcctcggcgagaaacagcggagcctccctatgacttgtacagcatgccagagacctgtagcctcccaagatgtgctgagagtccatttttag

SEQ ID NO: 183342 - DNA, 1626 bp, Artificial Sequence
  derived and/or modified sequence
atggtgatcaacctgtgcctgccccagttcagacccagaatccactgcaacaagatcagcgccgacggctacgaggtggagaacctgatcagcgaggacctgaccaagagaagccacggcttcagaaccgagtacttcatcaagccccccgtgtacgtgaccgtgagcttccccttcaacgtggagatctgcagaatcaacatcgacctgaccgccggcggcggccagaacgtgaccggcctggagatgtacaccagcgccagcagcagcagagtgagctggaacaccccccagtgcagaaccctgggccccgccgagcccagcgtgcccgacaaggaggccttcaccctggtgggcaaggtgctgctgaagaaccagagccaggtggtgttcagccacagaggcttcaaggccagaccccccttcggcgccatggaggccaccctgcccagccccgccgtggtggcccaggagctgtggaacaagggcgccctgagcctgagccacgtggcccacctgagaatctgcatcacccacgtgaccggcggcggcatcccctgcatcaagagactggaggtgtggggccagcccgccaagacctgcagccaggaggtgatcgacagcatcctgctggtgaccagcgagaacctgccccaggacgtggccctgcaggcccccgccctgcccatggagagcgactgcgaccccggcgaccagcccgagagccagcaggcccccagcagcctgcagaagctggccgagatcatccaggacgtgcccgaggagttcctggaccccatcaccctggagatcatgccctgccccatgctgctgcccagcggcaaggtgatcgaccagagcaccctggagaagtgcaacagaagcgaggccacctggggcagagtgcccagcgaccccttcaccggcgtggccttcaccccccacagccagcccctgccccaccccagcctgaaggccagaatcgaccacttcctgctgcagcacagcatccccggctgccacctgctgggcagagcccagaccgccctggccgtgatccccagcagcatcgtgctgcccagccagaagagaaagatcgagcaggccgagcacgtgcccgacagcaacttcggcgtgaacgccagctgcttcagcgccaccagccccctggtgctgcccaccaccagcgagcacaccgccaagaagatgaaggccaccaacgagcccagcctgacccacatggactgcagcaccggccccctgagccacgagcagaagctgagccagagcctggagatcgccctggccagcaccctgggcagcatgcccagcttcaccgccagactgaccagaggccagctgcagcacctgggcaccagaggcagcaacaccagctggagacccggcaccggcagcgagcagcccggcagcatcctgggccccgagtgcgccagctgcaagagagtgttcagcccctacttcaagaaggagcccgtgtaccagctgccctgcggccacctgctgtgcagaccctgcctgggcgagaagcagagaagcctgcccatgacctgcaccgcctgccagagacccgtggccagccaggacgtgctgagagtgcacttctag

SEQ ID NO: 183343 - protein, 384 aa, Artificial Sequence
  derived and/or modified sequence
MSAGSATHPGAGGRRSKWDQPAPAPLLFLPPAAPGGEVTSSGGSPGGTTAAPSGALDAAAAVAAKINAMLMAKGKLKPTQNASEKLQAPGKGLTSNKSKDDLVVAEVEINDVPLTCRNLLTRGQTQDEISRLSGAAVSTRGRFMTTEEKAKVGPGDRPLYLHVQGQTRELVDRAVNRIKEIITNGVVKAATGTSPTFNGATVTVYHQPAPIAQLSPAVSQKPPFQSGMHYVQDKLFVGLEHAVPTFNVKEKVEGPGCSYLQHIQIETGAKVFLRGKGSGCIEPASGREAFEPMYIYISHPKPEGLAAAKKLCENLLQTVHAEYSRFVNQINTAVPLPAASSTSLRSTKHSATSCFISTWSLAGITYWSPTCANTIPDNTSAASS

SEQ ID NO: 183344 - protein, 564 aa, Artificial Sequence
  derived and/or modified sequence
MSAGSATHPGAGGRRSKWDQPAPAPLLFLPPAAPGGEVTSSGGSPGGTTAAPSGALDAAAAVAAKINAMLMAKGKLKPTQNASEKLQAPGKGLTSNKSKDDLVVAEVEINDVPLTCRNLLTRGQTQDEISRLSGAAVSTRGRFMTTEEKAKVGPGDRPLYLHVQGQTRELVDRAVNRIKEIITNGVVKAATGTSPTFNGATVTVYHQPAPIAQLSPAVSQKPPFQSGMHYVQDKLFVGLEHAVPTFNVKEKVEGPGCSYLQHIQIETGAKVFLRGKGSGCIEPASGREAFEPMYIYISHPKPEGLAAAKKLCENLLQTVHAEYSRFVNQINTAVPLPGYTQPSAISSVPPQPPYYPSNGYQSGYPVVPPPQQPVQPPYGVPSIVPPAVSLAPGVLPALPTGVPPVPTQYPITQVQPPASTGQSPMGGPFIPAAPVKTALPAGPQPQPQPQPPLPSQPQAQKRRFTEELPDERESGLLGYQHGPIHMTNLGTGFSSQNEIEGAGSKPASSSGKERERDRQLMPPPAFPVTGIKTESDERNGSGTLTGSHGECDIAGGTGEWLRLV

SEQ ID NO: 183345 - protein, 614 aa, Artificial Sequence [sequence omitted]

SEQ ID NO: 183346 - DNA, 1155 bp, Artificial Sequence
  derived and/or modified sequence
atgagcgccggcagcgccacccaccccggcgccggcggcagaagaagcaagtgggaccagcccgcccccgcccccctgctgttcctgccccccgccgcccccggcggcgaggtgaccagcagcggcggcagccccggcggcaccaccgccgcccccagcggcgccctggacgccgccgccgccgtggccgccaagatcaacgccatgctgatggccaagggcaagctgaagcccacccagaacgccagcgagaagctgcaggcccccggcaagggcctgaccagcaacaagagcaaggacgacctggtggtggccgaggtggagatcaacgacgtgcccctgacctgcagaaacctgctgaccagaggccagacccaggacgagatcagcagactgagcggcgccgccgtgagcaccagaggcagattcatgaccaccgaggagaaggccaaggtgggccccggcgacagacccctgtacctgcacgtgcagggccagaccagagagctggtggacagagccgtgaacagaatcaaggagatcatcaccaacggcgtggtgaaggccgccaccggcaccagccccaccttcaacggcgccaccgtgaccgtgtaccaccagcccgcccccatcgcccagctgagccccgccgtgagccagaagccccccttccagagcggcatgcactacgtgcaggacaagctgttcgtgggcctggagcacgccgtgcccaccttcaacgtgaaggagaaggtggagggccccggctgcagctacctgcagcacatccagatcgagaccggcgccaaggtgttcctgagaggcaagggcagcggctgcatcgagcccgccagcggcagagaggccttcgagcccatgtacatctacatcagccaccccaagcccgagggcctggccgccgccaagaagctgtgcgagaacctgctgcagaccgtgcacgccgagtacagcagattcgtgaaccagatcaacaccgccgtgcccctgcccgccgccagcagcaccagcctgagaagcaccaagcacagcgccaccagctgcttcatcagcacctggagcctggccggcatcacctactggagccccacctgcgccaacaccatccccgacaacaccagcgccgccagcagctag

SEQ ID NO: 183347 - DNA, 1695 bp, Artificial Sequence
  derived and/or modified sequence
atgagcgccggcagcgccacccaccccggcgccggcggcagaagaagcaagtgggaccagcccgcccccgcccccctgctgttcctgccccccgccgcccccggcggcgaggtgaccagcagcggcggcagccccggcggcaccaccgccgcccccagcggcgccctggacgccgccgccgccgtggccgccaagatcaacgccatgctgatggccaagggcaagctgaagcccacccagaacgccagcgagaagctgcaggcccccggcaagggcctgaccagcaacaagagcaaggacgacctggtggtggccgaggtggagatcaacgacgtgcccctgacctgcagaaacctgctgaccagaggccagacccaggacgagatcagcagactgagcggcgccgccgtgagcaccagaggcagattcatgaccaccgaggagaaggccaaggtgggccccggcgacagacccctgtacctgcacgtgcagggccagaccagagagctggtggacagagccgtgaacagaatcaaggagatcatcaccaacggcgtggtgaaggccgccaccggcaccagccccaccttcaacggcgccaccgtgaccgtgtaccaccagcccgcccccatcgcccagctgagccccgccgtgagccagaagccccccttccagagcggcatgcactacgtgcaggacaagctgttcgtgggcctggagcacgccgtgcccaccttcaacgtgaaggagaaggtggagggccccggctgcagctacctgcagcacatccagatcgagaccggcgccaaggtgttcctgagaggcaagggcagcggctgcatcgagcccgccagcggcagagaggccttcgagcccatgtacatctacatcagccaccccaagcccgagggcctggccgccgccaagaagctgtgcgagaacctgctgcagaccgtgcacgccgagtacagcagattcgtgaaccagatcaacaccgccgtgcccctgcccggctacacccagcccagcgccatcagcagcgtgcccccccagcccccctactaccccagcaacggctaccagagcggctaccccgtggtgccccccccccagcagcccgtgcagcccccctacggcgtgcccagcatcgtgccccccgccgtgagcctggcccccggcgtgctgcccgccctgcccaccggcgtgccccccgtgcccacccagtaccccatcacccaggtgcagccccccgccagcaccggccagagccccatgggcggccccttcatccccgccgcccccgtgaagaccgccctgcccgccggcccccagccccagccccagccccagccccccctgcccagccagccccaggcccagaagagaagattcaccgaggagctgcccgacgagagagagagcggcctgctgggctaccagcacggccccatccacatgaccaacctgggcaccggcttcagcagccagaacgagatcgagggcgccggcagcaagcccgccagcagcagcggcaaggagagagagagagacagacagctgatgcccccccccgccttccccgtgaccggcatcaagaccgagagcgacgagagaaacggcagcggcaccctgaccggcagccacggcgagtgcgacatcgccggcggcaccggcgagtggctgagactggtgtag

SEQ ID NO: 183348 - DNA, 1845 bp, Artificial Sequence
  derived and/or modified sequence
atgagcgccggcagcgccacccaccccggcgccggcggcagaagaagcaagtgggaccagcccgcccccgcccccctgctgttcctgccccccgccgcccccggcggcgaggtgaccagcagcggcggcagccccggcggcaccaccgccgcccccagcggcgccctggacgccgccgccgccgtggccgccaagatcaacgccatgctgatggccaagggcaagctgaagcccacccagaacgccagcgagaagctgcaggcccccggcaagggcctgaccagcaacaagagcaaggacgacctggtggtggccgaggtggagatcaacgacgtgcccctgacctgcagaaacctgctgaccagaggccagacccaggacgagatcagcagactgagcggcgccgccgtgagcaccagaggcagattcatgaccaccgaggagaaggccaaggtgggccccggcgacagacccctgtacctgcacgtgcagggccagaccagagagctggtggacagagccgtgaacagaatcaaggagatcatcaccaacggcgtggtgaaggccgccaccggcaccagccccaccttcaacggcgccaccgtgaccgtgtaccaccagcccgcccccatcgcccagctgagccccgccgtgagccagaagccccccttccagagcggcatgcactacgtgcaggacaagctgttcgtgggcctggagcacgccgtgcccaccttcaacgtgaaggagaaggtggagggccccggctgcagctacctgcagcacatccagatcgagaccggcgccaaggtgttcctgagaggcaagggcagcggctgcatcgagcccgccagcggcagagaggccttcgagcccatgtacatctacatcagccaccccaagcccgagggcctggccgccgccaagaagctgtgcgagaacctgctgcagaccgtgcacgccgagtacagcagattcgtgaaccagatcaacaccgccgtgcccctgcccggctacacccagcccagcgccatcagcagcgtgcccccccagcccccctactaccccagcaacggctaccagagcggctaccccgtggtgccccccccccagcagcccgtgcagcccccctacggcgtgcccagcatcgtgccccccgccgtgagcctggcccccggcgtgctgcccgccctgcccaccggcgtgccccccgtgcccacccagtaccccatcacccaggtgcagccccccgccagcaccggccagagccccatgggcggccccttcatccccgccgcccccgtgaagaccgccctgcccgccggcccccagccccagccccagccccagccccccctgcccagccagccccaggcccagaagagaagattcaccgaggagctgcccgacgagagagagagcggcctgctgggctaccagcacggccccatccacatgaccaacctgggcaccggcttcagcagccagaacgagatcgagggcgccggcagcaagcccgccagcagcagcggcaaggagagagagagagacagacagctgatgcccccccccgccttccccgtgaccggcatcaagaccgagagcgacgagagaaacggcagcggcaccctgaccggcagccacgactaccccgccaagaagatgaagaccaccgagaagggcttcggcctggtggcctacgccgccgacagcagcgacgaggaggaggagcacggcggccacaagaacgccagcagcttcccccagggctggagcctgggctaccagtaccccagcagccagcccagagccaagcagcagatgcccttctggatggccccctag

SEQ ID NO: 183349 - DNA, 1155 bp, Artificial Sequence
  derived and/or modified sequence
atgagtgctggaagcgcgacccaccccggagccggcggccggcggtctaagtgggatcaaccagcccctgctcctcttttattcttgccgccggccgcgcccggaggcgaagtgacaagttcaggcggatccccagggggtaccacagcagctcccagcggtgccctggacgctgctgctgcagtagcagctaagatcaatgcgatgctgatggctaaaggcaaactcaaaccgactcaaaacgccagcgagaagctacaggcgcccgggaaggggcttacatccaacaaatccaaggatgatctcgtcgtggcggaggtcgagattaacgacgtgcccctgacgtgccggaacctgctgacgcggggtcaaacccaggacgagatcagcaggctgtcaggtgccgcagtgtcgactcggggtcgattcatgaccactgaggaaaaggccaaggtcggtccaggcgatcgcccgctatatctgcacgtccagggacagacaagggagctggtcgatcgggcagtaaatcgtattaaggaaattattactaacggagtagtcaaggccgccaccggtacaagccccacttttaatggagccaccgttacagtttatcaccaacctgctcccatcgcacagttatcccccgccgtcagtcagaagccaccattccagtccggcatgcactacgtccaggataagctctttgtcggccttgaacatgcagtcccgacgtttaatgtgaaagagaaggtggagggcccaggctgttcctatcttcagcatattcagatcgaaacaggggccaaggtgttcctgcgggggaaggggagcggctgtatcgagcccgcttcaggaagggaggccttcgagcccatgtacatctacatttcgcatcctaagcctgaaggtctggcagctgcaaaaaaactgtgcgaaaacctgttgcagaccgtccacgcggagtatagccgcttcgtgaaccagatcaatacagccgttcctctgcccgcagcttcctccacttcattacggagtacaaagcatagtgcgacaagctgtttcatcagtacatggtcactcgccggcatcacatattggagccccacctgcgctaacactatccccgataatacgtctgctgcctcatcttag

SEQ ID NO: 183350 - DNA, 1695 bp, Artificial Sequence
  derived and/or modified sequence
atgtcagctgggtctgcaacgcacccaggcgctggcgggcgccgcagcaagtgggaccagccagcaccagcccctctactgttcttgcctcccgctgcccccggcggggaagttaccagctcgggaggatccccaggagggacaaccgctgcccccagcggtgccctcgacgccgccgctgccgtggcagctaagattaacgccatgctgatggctaagggtaagctgaagcctacccagaacgcgagtgaaaagctgcaggccccagggaagggtctgacctctaacaaatctaaggacgacctggtggtcgctgaggtcgaaatcaacgacgttcccctgacctgtagaaacttgctgaccagggggcaaacccaagatgagattagccgtcttagcggtgctgccgtgtccacacgcggcaggttcatgacaacggaagagaaagccaaggttggaccaggcgatcggcccctgtacctccacgtgcagggccaaacaagggagttggtggatcgagccgtaaacagaatcaaggagatcattacgaacggagtggtcaaggcggctaccggaactagcccaacattcaatggtgccacagtgacagtctaccatcagcccgcccctattgctcagctctccccagccgttagtcaaaagccaccctttcaatccggcatgcattatgtgcaagataagctgttcgtggggctggaacatgcagtccctacctttaacgttaaggagaaggttgagggacctggctgttcttatttacagcatattcagattgagacaggggccaaagtctttctgcgcggcaaaggtagcggatgcatcgagcctgcaagtggacgggaggcttttgaaccaatgtacatctacattagccaccctaagcctgaagggctggcagccgccaaaaagctgtgtgagaatctcctgcagacggtgcatgccgagtactcaaggtttgtaaatcagattaatacagcagtgcctttgcccggttacacccagccatcagccatttccagcgtccccccacaacccccttactatccaagcaatggctatcagagcgggtaccctgtggtcccaccaccccaacagccagtacagccaccctatggagtgcctagtatcgtgccccccgcggtgagcctggcccccggggtgttaccagctctgcccaccggagtgcctccggtgcccacacagtaccccattacacaggtgcagcctcctgcctctaccggacaatcccccatgggtggcccatttatccctgcagcccccgtcaagacggcactgcccgctggaccacagcctcaaccacagcctcagcctccactgccgtcacaaccccaagcgcagaagcgccgtttcactgaagagctgcctgacgagagggagtccgggctcctgggctaccagcacggaccaatccatatgacaaacctgggcaccggattttcatcacagaatgaaattgaaggggctggatccaaacccgcctcctcatctggtaaggagcgagagagggaccgccagctgatgcccccacccgctttccccgtcactggcataaaaacagagagcgacgagcgcaatggaagcggcaccctgaccggcagccacggagagtgcgatatcgcgggtggaacaggcgagtggctccgcctggtgtag

SEQ ID NO: 183351 - DNA, 1845 bp, Artificial Sequence
  derived and/or modified sequence
atgagtgctggaagcgccacacatccaggcgctggtggcaggcggagtaaatgggatcagccggctccagctcctttgctgttcctgccacctgcggcccccggcggcgaagtgacttcttccggcggcagccccgggggtacgacagccgccccatccggggctctggacgctgcagccgctgtcgcagcgaagataaatgcaatgctgatggccaagggcaagctcaagcctacacaaaacgccagtgaaaagcttcaggctccggggaagggtttaacctcgaacaagtcgaaggatgacctggtggtagctgaggttgaaataaacgacgtccccctcacatgtcggaacctgctcacccgcgggcagacccaggacgaaatatcccgcctctctggagcagcagtgtccacgagaggcaggttcatgactacagaagagaaggccaaagttggccctggcgatagacctctttatctccacgtacagggccaaaccagagaactcgtagatcgcgctgtgaataggatcaaggaaataattaccaatggcgtggtgaaggccgccactgggacatctccgacttttaacggagcgacagtcacggtgtatcaccagcccgcccccatcgctcagctttctcccgctgttagccagaagcccccctttcaatccggtatgcattacgttcaggacaaactcttcgtgggcctggagcacgctgtcccgaccttcaacgtaaaggagaaggtcgaaggtcccggatgttcctacctccagcacatccagatagagacaggggcaaaggtcttcctcagaggcaaagggagcgggtgcattgagccagctagcggacgcgaggcgtttgagccgatgtatatctatatatcgcacccaaagccggagggccttgccgccgcaaagaagctgtgcgagaatctgctgcagacagttcacgcggagtactctagatttgtgaaccagatcaacacagccgtgccacttcccgggtacacgcaacccagtgcaatttcctccgttccgccacaaccaccctactatccctccaacggataccagtccggctacccagtggtccctcccccacaacagcccgtccaacctccgtacggggtgccgagcatcgtgccacctgctgtgtctctggcccctggggtactgccggctttgccgactggggtgccacccgtgcccacgcagtatcctatcacccaggtgcagcctcctgcctctacaggccagagtcctatgggggggccttttattcctgcagcaccggtgaagacagcgctccctgcgggcccccagcctcaaccgcagccccaacctcccctgccttcccagccccaggcccaaaagcgtcgcttcacagaagagttacctgacgagagagaaagcggcctgctgggataccagcacgggccaatccatatgaccaacctgggtaccggctttagttcccagaatgagattgagggcgctggctccaaacccgctagctcatcgggcaaggaacgagagagagatagacagctgatgcctccgcctgccttccccgttacaggtataaagacagaaagcgatgagcgcaacggcagcggaacgctgactgggtcacatgattacccagccaaaaaaatgaagacaaccgagaaggggtttgggttggttgcatacgccgccgactcttctgatgaagaggaggaacacggagggcacaaaaacgctagcagcttcccccagggttggagcttagggtaccagtaccccagctcccagcctagagccaaacaacagatgccattctggatggcaccgtag

SEQ ID NO: 183352 - DNA, 1155 bp, Artificial Sequence
  derived and/or modified sequence
atgtctgctggcagcgccacccaccctggagctgggggccgccgcagcaagtgggaccagcctgccccagcccccctgctcttcctgcccccagctgcccctggaggagaggtgaccagcagcggcggcagccctgggggcaccacagctgcccccagcggggccctggatgctgctgctgctgtggccgccaagatcaatgccatgctgatggccaagggcaagctgaagcccacccagaatgccagcgagaagctgcaggcccctgggaagggcctgaccagcaacaagagcaaggatgacctggtggtggccgaggtggagatcaatgatgtgcccctgacctgcaggaacctgctgacccggggccagacccaggatgagatcagccggctgtctggagctgctgtgtccacccggggccgcttcatgaccacagaggagaaggccaaggtgggccctggggaccggcccctgtacctgcacgtgcagggccagacccgggagctggtggacagagctgtgaaccgcatcaaggagatcatcaccaacggggtggtgaaggccgccaccggcaccagccccaccttcaacggggccaccgtgacagtgtaccaccagcctgcccccatcgcccagctgagccctgctgtgtcccagaagccacccttccagagcggcatgcactacgtgcaggacaagctgtttgtgggcctggagcacgctgtgcccaccttcaacgtgaaggagaaggtggagggccctggctgcagctacctgcagcacatccagattgaaacaggagccaaggtgttcctgcggggcaagggcagcggctgcattgaaccagccagcggccgggaggcctttgagcccatgtacatctacatcagccaccccaagccagagggcctggccgccgccaagaagctgtgtgagaacctgctgcagacagtgcatgctgagtacagcagatttgtgaaccagatcaacacagctgtgcccctgcctgctgccagcagcaccagcctgcggagcaccaagcacagcgccaccagctgcttcatcagcacctggagcctggccggcatcacctactggagccccacctgtgccaacaccatcccagacaacaccagcgctgccagcagctag

SEQ ID NO: 183353 - DNA, 1695 bp, Artificial Sequence
  derived and/or modified sequence
atgtctgctggcagcgccacccaccctggagctgggggccgccgcagcaagtgggaccagcctgccccagcccccctgctcttcctgcccccagctgcccctggaggagaggtgaccagcagcggcggcagccctgggggcaccacagctgcccccagcggggccctggatgctgctgctgctgtggccgccaagatcaatgccatgctgatggccaagggcaagctgaagcccacccagaatgccagcgagaagctgcaggcccctgggaagggcctgaccagcaacaagagcaaggatgacctggtggtggccgaggtggagatcaatgatgtgcccctgacctgcaggaacctgctgacccggggccagacccaggatgagatcagccggctgtctggagctgctgtgtccacccggggccgcttcatgaccacagaggagaaggccaaggtgggccctggggaccggcccctgtacctgcacgtgcagggccagacccgggagctggtggacagagctgtgaaccgcatcaaggagatcatcaccaacggggtggtgaaggccgccaccggcaccagccccaccttcaacggggccaccgtgacagtgtaccaccagcctgcccccatcgcccagctgagccctgctgtgtcccagaagccacccttccagagcggcatgcactacgtgcaggacaagctgtttgtgggcctggagcacgctgtgcccaccttcaacgtgaaggagaaggtggagggccctggctgcagctacctgcagcacatccagattgaaacaggagccaaggtgttcctgcggggcaagggcagcggctgcattgaaccagccagcggccgggaggcctttgagcccatgtacatctacatcagccaccccaagccagagggcctggccgccgccaagaagctgtgtgagaacctgctgcagacagtgcatgctgagtacagcagatttgtgaaccagatcaacacagctgtgcccctgcccggctacacccagcccagcgccatcagctctgtgcccccccagcccccctactaccccagcaatggctaccagagcggctaccctgtggtgcccccaccccagcagcctgtgcagcccccctacggcgtgcccagcatcgtgcccccagctgtgtccctggcccctggggtgctgcctgccctgcccaccggggtgccccctgtgcccacccagtaccccatcacccaggtgcagcccccagccagcacaggccagagccccatgggcggccccttcatcccagctgcccctgtgaagacagccctgcctgctggcccccagccccagccccagccccagccccccctgcccagccagccccaggcccagaagaggcgcttcacagaggagctgcctgatgagcgggagagcggcctgctgggctaccagcacggccccatccacatgaccaacctgggcaccggcttcagcagccagaatgaaattgaaggagctggcagcaagccagccagcagcagcggcaaggagcgggagcgggaccggcagctgatgcctcctccagccttccctgtgacaggcatcaagacagaaagtgatgaaagaaatggaagtggcaccctgaccggcagccacggggagtgtgacattgctgggggcactggagagtggctgcggctggtgtag

SEQ ID NO: 183354 - DNA, 1845 bp, Artificial Sequence
  derived and/or modified sequence
atgtctgctggcagcgccacccaccctggagctgggggccgccgcagcaagtgggaccagcctgccccagcccccctgctcttcctgcccccagctgcccctggaggagaggtgaccagcagcggcggcagccctgggggcaccacagctgcccccagcggggccctggatgctgctgctgctgtggccgccaagatcaatgccatgctgatggccaagggcaagctgaagcccacccagaatgccagcgagaagctgcaggcccctgggaagggcctgaccagcaacaagagcaaggatgacctggtggtggccgaggtggagatcaatgatgtgcccctgacctgcaggaacctgctgacccggggccagacccaggatgagatcagccggctgtctggagctgctgtgtccacccggggccgcttcatgaccacagaggagaaggccaaggtgggccctggggaccggcccctgtacctgcacgtgcagggccagacccgggagctggtggacagagctgtgaaccgcatcaaggagatcatcaccaacggggtggtgaaggccgccaccggcaccagccccaccttcaacggggccaccgtgacagtgtaccaccagcctgcccccatcgcccagctgagccctgctgtgtcccagaagccacccttccagagcggcatgcactacgtgcaggacaagctgtttgtgggcctggagcacgctgtgcccaccttcaacgtgaaggagaaggtggagggccctggctgcagctacctgcagcacatccagattgaaacaggagccaaggtgttcctgcggggcaagggcagcggctgcattgaaccagccagcggccgggaggcctttgagcccatgtacatctacatcagccaccccaagccagagggcctggccgccgccaagaagctgtgtgagaacctgctgcagacagtgcatgctgagtacagcagatttgtgaaccagatcaacacagctgtgcccctgcccggctacacccagcccagcgccatcagctctgtgcccccccagcccccctactaccccagcaatggctaccagagcggctaccctgtggtgcccccaccccagcagcctgtgcagcccccctacggcgtgcccagcatcgtgcccccagctgtgtccctggcccctggggtgctgcctgccctgcccaccggggtgccccctgtgcccacccagtaccccatcacccaggtgcagcccccagccagcacaggccagagccccatgggcggccccttcatcccagctgcccctgtgaagacagccctgcctgctggcccccagccccagccccagccccagccccccctgcccagccagccccaggcccagaagaggcgcttcacagaggagctgcctgatgagcgggagagcggcctgctgggctaccagcacggccccatccacatgaccaacctgggcaccggcttcagcagccagaatgaaattgaaggagctggcagcaagccagccagcagcagcggcaaggagcgggagcgggaccggcagctgatgcctcctccagccttccctgtgacaggcatcaagacagaaagtgatgaaagaaatggaagtggcaccctgaccggcagccatgactacccagccaagaagatgaagaccacagagaagggcttcggcctggtggcctatgctgctgacagcagtgatgaggaggaggagcacggcggccacaagaatgccagcagcttcccccagggctggagcctgggctaccagtaccccagcagccagccccgggccaagcagcagatgcccttctggatggccccctag

SEQ ID NO: 183355 - DNA, 1155 bp, Artificial Sequence
  derived and/or modified sequence
atgagcgccggcagcgccacccaccccggcgccggcggccggcggtctaagtgggaccagcccgcgcctgcgcccttactctttttgccgccggcagcccccggtggggaggtgacaagcagcggggggtcacctggcggcacaacggccgcccccagtggggccctggatgcggcggctgctgtcgcagctaaaattaacgcgatgctcatggcaaagggcaaactgaagccgacccagaatgcttcggagaaactgcaggcccccggcaagggcctcacctcaaacaaaagcaaggacgatctggtagtggctgaagttgaaattaacgacgtgcccctgacatgtagaaatctcttaaccagagggcagacccaagacgaaatatctaggttgagtggggcggcagtctccactaggggcaggtttatgactactgaggagaaggccaaggtgggtcctggagacagacccttatatctgcatgtgcagggccaaaccagagagctcgttgatagggcagtgaaccgcatcaaggaaattatcacgaacggcgtcgtaaaggccgcaactgggacatcgcctaccttcaacggagctactgtcacagtatatcatcagcccgcccccatcgctcaactgtctcccgcggtttcccaaaagccgccgttccagagtggaatgcattacgtccaggacaagctcttcgtcggccttgaacacgcagttcccacttttaacgtcaaggaaaaagtggagggccccggctgtagctaccttcagcatatccagatcgaaacgggcgccaaagtgttccttagaggaaaaggcagcgggtgtatcgagcccgcctccggacgggaggcatttgagcctatgtacatttatatttcacatcctaagcccgaaggcctggctgctgctaaaaagctgtgcgaaaacttactccaaacagtgcatgcagaatattccagatttgtgaaccaaatcaacacagctgtacctctgccagctgcctcatccacatcactccggagcactaaacacagtgccacatcttgttttatttctacttggtcactggccgggatcacttattggagccctacttgcgcaaacaccattcctgacaataccagcgccgccagctcgtag

SEQ ID NO: 183356 - DNA, 1695 bp, Artificial Sequence
  derived and/or modified sequence
atgagcgccggcagcgccacccaccccggcgccggcggccggcggtctaagtgggatcagcctgccccagcacccctgctattcctgccacctgctgccccaggcggggaagtgacatcaagtggagggtcacccgggggcaccaccgctgctccctctggagccctggacgctgccgcggctgtcgcagcaaaaattaatgccatgctcatggccaaaggaaagctgaagcctacgcagaacgcctctgagaagcttcaggctccggggaagggactgacaagcaataagtccaaagacgatctcgtggtggccgaggttgaaattaatgacgtgccattgacctgccggaatttgttaacaaggggccagacccaggacgagatatccagacttagtggcgcagctgtgagtacccgcggaaggttcatgaccaccgaggagaaagcaaaagtggggccgggagatagaccgctttatctgcatgtccaagggcagacaagggaactggtggacagggctgtgaaccgcatcaaggagattatcactaacggagtggttaaggcagcaaccggcacttccccaaccttcaacggcgccacagttactgtgtaccatcagcctgcacctatcgcacagctctctcctgctgtctctcaaaaacctccattccagagcggaatgcactacgtgcaggacaagctcttcgtgggcctcgagcacgccgtacctacattcaacgtgaaggagaaggtagaaggtccagggtgctcgtatttgcagcacatacagattgagactggagccaaggtcttcctccgagggaagggctccgggtgcatagagccggcctctggcagggaggccttcgaaccgatgtatatttacattagccacccaaaacctgaagggctggcagccgcgaaaaaactatgtgagaatctgctacaaaccgtgcacgccgagtattccaggttcgtcaatcagattaacaccgcggtaccactccctggttatacacagccatccgccatttcctcagttcccccacagccaccatattaccccagcaacggttaccagagcggctatccagtcgtgccacctccacagcagccagtacagccaccgtacggtgtgcctagcatcgtaccgcccgctgtcagtttggcaccaggtgtccttcccgcattacctaccggcgtgccgcctgtccctacccagtaccctattacccaagtgcaacctccagcttctacggggcagtcccccatgggaggcccatttatccccgcagccccagtaaaaaccgcccttcctgcaggccctcagccgcagcctcaacctcagccacccctaccatctcagccccaggcacagaagaggcgatttacggaagaactgcccgatgaaagggaaagtgggcttttgggatatcagcatggccctatacacatgaccaacctgggcacggggttcagttcccagaacgaaatcgaaggagccggctccaagcccgcgagctcatctgggaaggaaagggagcgtgaccggcagttaatgcctccccctgctttcccagtaactggaataaagacggaatcagacgaacggaatggatccggaactctgacagggtctcatggggagtgtgacattgcagggggaacaggtgagtggttgcgactcgtttag

SEQ ID NO: 183357 - DNA, 1845 bp, Artificial Sequence
  derived and/or modified sequence
atgagcgccggcagcgccacccaccccggcgccggcggccggcggtccaagtgggatcagccagcaccggcaccattgttgttcttgccgccggccgcccccggcggcgaggtgacttcatccggcggcagccctgggggcaccactgcagctcccagcggagcgctcgatgccgccgccgccgtagctgcaaagatcaatgcaatgctgatggctaaaggaaagctcaaacccacccaaaacgccagcgaaaaactgcaggctcccggcaaggggctgacttcaaataagtcgaaggacgatctggtagtcgctgaggtggaaatcaatgacgtgcccttaacttgtagaaatttacttactagaggacagacccaggatgagattagtagactgagcggcgcagcagtctcaacgaggggtcgatttatgacaacagaagagaaagctaaggtcggccccggcgatcggcctctctatctccacgtccagggccagacaagagagcttgttgaccgagcagtgaatcgaattaaagagattatcaccaatggggtcgtgaaggccgccaccggtacgagtcctacatttaacggggcaacagtcaccgtttatcatcagcccgcccccatagcccagctgtctccagctgtgagtcagaagcctccttttcagagcggcatgcattacgtgcaggataaactcttcgtaggattagagcacgccgtccccacatttaacgtcaaggagaaggtggaagggcccggttgtagctatcttcagcacatccagatcgagaccggcgctaaagtgttcctgagggggaaggggtcaggctgtattgagcctgctagcggaagagaggccttcgaacctatgtatatctacatttctcatccgaaacccgagggactcgctgctgccaaaaaactctgcgaaaacttactgcaaaccgttcacgcggagtactctcgctttgtcaatcaaataaacaccgccgtgcctctccccggatacacccagccgtcagctatttctagcgtccccccccagccgccctattacccaagcaacggctaccagagcgggtatccagtcgtgcccccgccccagcagccagtgcagcctccctatggagtcccttctatagtgccaccagccgtgtccctcgcacccggagtactgcccgccttgccgactggggttcccccagtccctacgcagtacccgattactcaagtgcaaccccccgcaagtactgggcaaagccctatgggaggtcccttcattcccgccgcccccgtcaagactgctcttccagcaggccctcagccacagccccagccccagcctcccctccccagccaaccccaggcccagaaaagacgttttacagaggagctgcctgacgagagggaatccggtctgctcggataccaacatggccctatacacatgacaaatctggggaccggattcagttctcagaacgagattgaaggagccgggtccaagcccgcctcttccagtgggaaggagcgcgagcgcgatcgccagctgatgcccccccccgccttccctgtgaccgggatcaaaaccgaaagtgacgagcggaacggatccggcactcttactggtagccacgactaccccgccaagaagatgaagacaaccgaaaagggctttggattggtagcatatgctgcagattccagcgatgaagaggaagagcacggtggccacaaaaatgcctcaagcttcccacagggttggtctctgggataccaatatccctcctctcagccaagagccaaacagcagatgcccttctggatggcaccgtag

SEQ ID NO: 183358 - DNA, 1155 bp, Artificial Sequence
  derived and/or modified sequence
atgtctgccggaagcgccacccatccaggggctggtggtcgcaggagcaagtgggaccaacctgcacctgccccactgctctttctgcccccagctgccccaggaggagaagtcactagcagcggtggatcacctggcggaactacagcagcgccttccggtgcgctggacgccgctgctgctgtcgccgcaaagataaatgccatgctgatggccaagggtaagctgaagccgacccagaatgcttccgaaaagctgcaggcgccaggtaaaggtcttacctcaaacaaaagcaaggacgatctcgtggtcgctgaggtagagattaatgacgtcccactcacatgtcgcaacctgctaactagaggacaaactcaagatgagattagtcgcctgagcggcgctgccgttagtacacgaggtaggtttatgacaactgaagagaaagctaaggtcggacctggcgatagaccactgtacctacacgtccaaggacagactcgtgagctggttgatcgggcagtgaacaggattaaggaaatcatcacaaacggggtcgttaaggcggcaaccggcaccagtcctacattcaatggggcaacagttactgtgtatcaccagccagcaccaattgcccagctgagccccgcagtgtcgcagaagccaccgtttcagagtgggatgcactatgtgcaggataaactctttgtggggcttgagcatgcagttcctacttttaatgtgaaggagaaggtggagggacccggttgtagttacctgcaacatattcagatagagaccggcgcaaaagtgttcctacggggtaagggcagcggctgtatcgagcccgctagtggcagagaagccttcgagcccatgtacatatatatctctcatcctaaaccagaaggattggctgctgccaagaagctgtgtgagaatctgctgcagactgtacacgcggagtattcgcggttcgtaaatcagatcaatactgcagtgcctctccccgctgcttcttcaacctctctccgatctaccaagcattccgcgacttcatgcttcatttctacctggtcgctggcgggtatcacttactggtcgcccacctgcgcgaatacaatcccggataacaccagtgctgcgagctcatag

SEQ ID NO: 183359 - DNA, 1695 bp, Artificial Sequence
  derived and/or modified sequence
atgagtgccggaagtgctactcacccaggggcaggcggtcgacggtctaaatgggaccagccagccccagctcctctgctctttttaccccctgcagccccaggaggcgaggtgacttcatcgggaggcagtcccggaggcacaactgctgccccttccggagctctggacgccgcagcggctgttgccgcaaaaattaacgccatgttgatggcaaaaggcaagttaaaaccgactcagaacgcctctgaaaagctccaggctcccggaaaaggactgacatcgaacaagtcaaaagacgacctagttgtcgctgaggtggaaatcaatgacgtgcctttgacctgtagaaatctgctgacacgtggccagacgcaagacgaaatcagcagactcagtggtgctgccgtgagcacacggggtcgctttatgaccactgaagagaaggcaaaagtgggcccaggggacagaccattgtatttgcacgtgcaggggcaaacccgcgaactcgtggatagagccgtgaatcgaatcaaagaaatcatcactaatggggtcgttaaagccgcaaccggcacaagtcccaccttcaatggcgctactgtcacagtgtatcatcagccagcccctattgcccagctgagtccagcagttagccagaagcctcccttccaatcgggtatgcattacgtacaagacaagctgtttgttggtctcgaacacgccgtgcctacattcaacgtcaaggagaaggtcgaagggcctggttgcagctacctccagcacatccagattgagacaggcgctaaggtgttcctccgcggaaagggtagcggatgcattgagccagcctctgggagagaagcgttcgagcccatgtatatttatatctcccatcccaagcctgagggcctagcggctgcaaagaaactttgtgaaaacctgctccaaactgtgcacgcagaatattctcgctttgttaaccaaattaataccgcagtaccgctgcctggttacacacagccatcggctatctcttcagttcccccacagccaccatactacccctccaacgggtatcagtcaggatatccagtcgtccctcccccacagcagcccgtccaacccccttatggcgtaccgtccattgtgcctcctgccgtgtctttagcaccgggagtactgcctgcattgcccaccggcgtgcctccagtgccaacccaataccccattacccaggttcagccacctgctagtacgggccagtcccccatgggcggaccctttatacccgcagccccagtgaagactgcccttcccgctgggccacaacctcagccacagccacaaccacccttgccaagtcagcctcaggctcagaagaggagattcactgaagagctccccgacgaacgcgaaagcggcctgctgggctatcaacatggacccattcatatgactaacctgggcacgggcttctcatcacagaacgagatcgaaggggcaggatcaaagcctgcctccagcagtgggaaagagcgggagagagacaggcagctcatgccgccaccagccttccctgtgactggtatcaaaaccgaatccgatgagcgcaatggcagcgggacacttaccgggtctcacggggaatgcgatatagccggtggcacgggcgagtggctacgactggtctag

SEQ ID NO: 183360 - DNA, 1845 bp, Artificial Sequence
  derived and/or modified sequence
atgtctgcaggctctgccacccacccaggcgcaggaggacgaaggagcaaatgggatcagccggctccggcaccactgctgttcctgcctcccgctgcacctgggggagaggtgacctcttccggtggatctcctgggggaacaacagccgctccatccggtgccctcgatgcagctgccgcagtcgccgctaaaatcaacgccatgctgatggctaaggggaagttaaagcccacacagaatgcctcagagaaactgcaggccccaggtaaaggactgacctccaacaaatcaaaagacgacctggtggtggccgaagttgagattaacgatgtgccacttacttgcaggaatctgctcacacgaggacagacgcaagacgagatctccaggctctcgggggctgccgtctccacgcgcggacggttcatgacaacagaggaaaaggcaaaggtcggcccaggggatcgcccactctacttgcatgtgcagggtcaaacccgagagctcgtcgaccgcgcagtcaaccggattaaggaaatcatcacaaacggggtggtgaaggccgcaactggcacttccccaactttcaacggtgccaccgtgaccgtataccatcaaccagcaccaatcgcccaactcagtcctgcagtgtcacagaagccaccatttcaatctggcatgcattatgtgcaagacaagctgtttgtaggacttgaacacgctgtccccacattcaatgtgaaggagaaggtggagggacctgggtgctcatatctgcagcacatccaaatagagactggagccaaagtctttctgcgcggaaaagggagcgggtgtattgagcccgcttctggaagagaagcgttcgagcctatgtatatctacatctcacatcctaaacccgaaggcctcgctgcggcaaaaaagctgtgcgagaacctgttacagactgttcacgccgagtactcgcgttttgtcaatcagatcaataccgctgtcccactgcctggctacacccaaccttccgcgattagctccgtgccacctcagccaccttactatcctagcaacgggtaccagtctggatatcccgtggtgccacccccacagcagccagttcagcccccttacggagtcccatctatagtccctcctgcggtctcactggcaccaggggttttgccagctctgcccacgggcgtgcccccagtgcccacgcaatatcctattacacaagtccagccgccagcatcaactgggcagtctccaatggggggaccttttatccccgctgccccagtgaagaccgccttacctgctgggccacagccacaaccacaaccgcagcccccactcccttcacagccacaggctcagaagcggagatttaccgaggaactccccgacgagagagagtccggtctattgggctaccaacacggtcctatccacatgacaaacttaggcactggcttcagcagccaaaacgaaattgagggtgctggaagcaagcccgcatcctcctctggtaaagagagggaaagggataggcagctcatgcctccgccagccttccctgtgactggcatcaaaacagagtcggacgagcgtaatggcagcggcactttaaccggatcacacgactaccccgcaaaaaaaatgaaaacgacagagaagggctttggcctggtggcctatgcggcagattcaagcgacgaggaggaggaacacggaggccataagaatgcctccagctttccacagggctggtctctgggctaccagtatccatcttcccagcctagagcaaaacagcagatgccattttggatggccccatag

SEQ ID NO: 183361 - DNA, 1155 bp, Artificial Sequence
  derived and/or modified sequence
atgtccgcggggagcgcgacacatcctggagctggcgggcgccgcagcaaatgggaccaaccagctccagccccacttctcttcctcccgccagcggccccaggtggggaggtcaccagcagtgggggaagtcctgggggcaccacagctgctccttcaggagccttggatgctgctgctgctgtggctgccaagattaatgccatgctcatggcaaaagggaagctgaaaccaactcagaatgcttctgagaagcttcaggctcctggcaaaggcctaactagcaataaaagcaaggatgacctggtggtagctgaagtagaaattaatgatgtgcctctcacatgtaggaacttgctgactcgaggacagactcaagacgagatcagccgacttagtggggctgcagtatcaactcgagggaggttcatgacaactgaggaaaaagccaaagtgggaccaggggatcgtccattatatcttcatgttcagggccagacacgggaattagtggacagagctgtaaaccggatcaaagaaattatcaccaatggagtggtaaaagctgccacaggaacaagtccaacttttaatggtgcaacagtaactgtctatcaccagccagcacccatcgctcagttgtctccagctgttagccagaagcctcccttccagtcagggatgcattatgttcaagataaattatttgtgggtctagaacatgctgtacccacttttaatgtcaaggagaaggtggaaggtccaggctgctcctatttgcagcacattcagattgaaacaggtgccaaagtcttcctgcggggcaaaggttcaggctgcattgagccagcatctggccgagaagcttttgaacctatgtatatttacatcagtcaccccaaaccagaaggcctggctgctgccaagaagctttgtgagaatcttttgcaaacagttcatgctgaatactctagatttgtgaatcagattaatactgctgtacctttaccagcagccagttcaacctccctacggagtaccaagcatagtgccaccagctgtttcattagcacctggagtcttgccggcattacctactggagtcccacctgtgccaacacaatacccgataacacaagtgcagcctccagctag

SEQ ID NO: 183362 - DNA, 4499 bp, Artificial Sequence
  derived and/or modified sequence
cgggtggttgagtagaagcggtcgccatgtccgcggggagcgcgacacatcctggagctggcgggcgccgcagcaaatgggaccaaccagctccagccccacttctcttcctcccgccagcggccccaggtggggaggtcaccagcagtgggggaagtcctgggggcaccacagctgctccttcaggagccttggatgctgctgctgctgtggctgccaagattaatgccatgctcatggcaaaagggaagctgaaaccaactcagaatgcttctgagaagcttcaggctcctggcaaaggcctaactagcaataaaagcaaggatgacctggtggtagctgaagtagaaattaatgatgtgcctctcacatgtaggaacttgctgactcgaggacagactcaagacgagatcagccgacttagtggggctgcagtatcaactcgagggaggttcatgacaactgaggaaaaagccaaagtgggaccaggggatcgtccattatatcttcatgttcagggccagacacgggaattagtggacagagctgtaaaccggatcaaagaaattatcaccaatggagtggtaaaagctgccacaggaacaagtccaacttttaatggtgcaacagtaactgtctatcaccagccagcacccatcgctcagttgtctccagctgttagccagaagcctcccttccagtcagggatgcattatgttcaagataaattatttgtgggtctagaacatgctgtacccacttttaatgtcaaggagaaggtggaaggtccaggctgctcctatttgcagcacattcagattgaaacaggtgccaaagtcttcctgcggggcaaaggttcaggctgcattgagccagcatctggccgagaagcttttgaacctatgtatatttacatcagtcaccccaaaccagaaggcctggctgctgccaagaagctttgtgagaatcttttgcaaacagttcatgctgaatactctagatttgtgaatcagattaatactgctgtacctttaccaggctatacacaaccctctgctataagtagtgtccctcctcaaccaccatattatccatccaatggctatcagtctggttaccctgttgttccccctcctcagcagccagttcaacctccctacggagtaccaagcatagtgccaccagctgtttcattagcacctggagtcttgccggcattacctactggagtcccacctgtgccaacacaatacccgataacacaagtgcagcctccagctagcactggacagagtccgatgggtggtccttttattcctgctgctcctgtcaaaactgccttgcctgctggcccccagccccagccccagccccagcccccactcccaagtcagccccaggcacagaagagacgattcacagaggagctaccagatgaacgggaatctggactgcttggataccagcatggacccattcatatgactaatttaggtacaggcttctccagtcagaatgagattgaaggtgcaggatcgaagccagcaagttcctcaggcaaagagagagagagggacaggcagttgatgcctccaccagcctttccagtgactggaataaaaacagagtccgatgaaaggaatgggtctgggaccttaacagggagccatggtgagtgtgatatagctgggggaacaggggagtggctaagactggtctaaagctattagttttctcagccgggcgcagtggctcacgcctgtaatcccagcactttgggaggccgaggtgggcagatcacctaaggtcaggagttcaagaccagcttggccaacatagtgaaatcccatctctactaaaaatacaaaaactagcgggcatggtggtgggcgcctgtaattccagctactcagggggttgaggcaggagaatcgcttcaacctgggaggcagaggttgcagtgagccaagatcagaccactgccctccagcctgggcaatagagcaagactccatctcataaataaataaatacataaataaagctattaattttctaacctgatgttcattcaggtgtttaatccaacctctataatctgttggccagtgaaaatacttttgggctgggcacggtggctcacgcctgtaatcccagcactttgggaggccaaggtgggcggataacctgaggtcaggagtttgagaccagcgtggctaacatggtgaaaccccgtctctactaaaaatagaaaaattaagctgggcatggtggtgcatgcctgtaattccagcggcttggaaggctgaggcaggagaatcacttgaacttgggaggtggaggttgcagtgagccaagatcacaccactgcattccagcctgggcactagagtgagactctgtctcaaaaaaaaagaaagagaaagagaaaatagtttctaaaaaattgtatacagacaaccttttatttccaacaaacgtgtgccgagagagagagagagaaaatagttttaaaaaaattgtatacagacaaccttttgtttccaaccaacgtgtatctagaaaagagttagtcgacttattttatacatagcatcagtgaatagtaatgagtggtaggtcatttcaaaatcctgttgcctatattatgtgaataccaggaggtcatctgatacggacttaataaaggttgattttgctttatattgggagctgagccacacctccccttataactctattggtcagtaatggtcagtttgtggctgttaggaaaatgttgccttttagcattccagaactctaaatcctgtagaggtacatgggatattttattctttgcctgtactcataaaaatgaacagaagaaaatacgtttttttcttttcttaacttcttttcttttaactctttaaaaggtgaaatatcagccctcaagagactcacttgctaactttcctttttttctttttttttctttttttgtgtttcttttttctttctctgttttcttacatggttctggtggattcacatttgctgatgctggtgctgtttttcgtgtgatcttcaacgtttttgggtgaccattgaccctgtgacctcaaaatggtgtccaactaaccacttaaaattaacatcttttttttaattaacgaatttatggtatttttttttttcccttggcggggatggggttggggttgttttttctctattctagattatccagccaagaagatgaaaactacagagaagggatttggcttggtggcttatgctgcagattcatctgatgaagaggaggaacatggaggtcataaaaatgcaagtagttttccacagggctggagtttgggataccaatatccttcatcacaaccacgagctaaacaacagatgccattctggatggctccctaggaaacagtggaacagagttttgaccctcagtgactcttcttagcaataatgcatgcatttgatttaacaagactctggggcctgtgctgggaaccatctggacctttgcagaagttagagattcagtgcccccctttcttaaaggggttccttaacaaccacaaaaatccttatttctgcagtggcatagaatctgttaaaatttaattagaatcacaaatttatctcagaagctttttaacagttggtgaaatgtgcttgtccaacaaagcatcctaacagggtcgttcccatacacatttgacctggtcagccttttccaggtgaatagccccagttctgacataaagaaagttttatttgtattttactactgtttggtcaattttgatatataactggttacaaacagagccttactatttattagtggggaaatgattttaagaccgtccttttcagtatttaattctgacagatctgcatccctgttttgttttggattatttctgttttggaaaatgctgtctcatttaaaactgttggatatagctggatcctggataggaaaatgaaattattttttcattgtgttttttaattggggtgatccaaagctggcaccttcaggcacattggtctcatagccattactgtttttattgcccttctaagatcctgtcttcagctgggtcagagaaaacttcttgactaaaactggtcagaactcatcacagaaatgaaatacagtggtctctctctcccagaactggttgcagctaaaacagagagatctgactgctggctataggattttggacttaatgactgaaattgcaaattgtcctttttcttggcattacagattttgccaaaataactttttgtatcaaatattgatgtgtgaaagtgaaggagctagtctgctgaaccaggaatagtttgagatattgaactgtcatttttgcacatttgaatactttgcaggctggctttgtataaacttatcctctggtttcctatatgttgtaaatatttagaccataatttcattataaataaatctataaatattc

SEQ ID NO: 183363 - DNA, 2947 bp, Artificial Sequence
  derived and/or modified sequence
ggtggttgagtagaagcggtcgccatgtccgcggggagcgcgacacatcctggagctggcgggcgccgcagcaaatgggaccaaccagctccagccccacttctcttcctcccgccagcggccccaggtggggaggtcaccagcagtgggggaagtcctgggggcaccacagctgctccttcaggagccttggatgctgctgctgctgtggctgccaagattaatgccatgctcatggcaaaagggaagctgaaaccaactcagaatgcttctgagaagcttcaggctcctggcaaaggcctaactagcaataaaagcaaggatgacctggtggtagctgaagtagaaattaatgatgtgcctctcacatgtaggaacttgctgactcgaggacagactcaagacgagatcagccgacttagtggggctgcagtatcaactcgagggaggttcatgacaactgaggaaaaagccaaagtgggaccaggggatcgtccattatatcttcatgttcagggccagacacgggaattagtggacagagctgtaaaccggatcaaagaaattatcaccaatggagtggtaaaagctgccacaggaacaagtccaacttttaatggtgcaacagtaactgtctatcaccagccagcacccatcgctcagttgtctccagctgttagccagaagcctcccttccagtcagggatgcattatgttcaagataaattatttgtgggtctagaacatgctgtacccacttttaatgtcaaggagaaggtggaaggtccaggctgctcctatttgcagcacattcagattgaaacaggtgccaaagtcttcctgcggggcaaaggttcaggctgcattgagccagcatctggccgagaagcttttgaacctatgtatatttacatcagtcaccccaaaccagaaggcctggctgctgccaagaagctttgtgagaatcttttgcaaacagttcatgctgaatactctagatttgtgaatcagattaatactgctgtacctttaccaggctatacacaaccctctgctataagtagtgtccctcctcaaccaccatattatccatccaatggctatcagtctggttaccctgttgttccccctcctcagcagccagttcaacctccctacggagtaccaagcatagtgccaccagctgtttcattagcacctggagtcttgccggcattacctactggagtcccacctgtgccaacacaatacccgataacacaagtgcagcctccagctagcactggacagagtccgatgggtggtccttttattcctgctgctcctgtcaaaactgccttgcctgctggcccccagccccagccccagccccagcccccactcccaagtcagccccaggcacagaagagacgattcacagaggagctaccagatgaacgggaatctggactgcttggataccagcatggacccattcatatgactaatttaggtacaggcttctccagtcagaatgagattgaaggtgcaggatcgaagccagcaagttcctcaggcaaagagagagagagggacaggcagttgatgcctccaccagcctttccagtgactggaataaaaacagagtccgatgaaaggaatgggtctgggaccttaacagggagccatgattatccagccaagaagatgaaaactacagagaagggatttggcttggtggcttatgctgcagattcatctgatgaagaggaggaacatggaggtcataaaaatgcaagtagttttccacagggctggagtttgggataccaatatccttcatcacaaccacgagctaaacaacagatgccattctggatggctccctaggaaacagtggaacagagttttgaccctcagtgactcttcttagcaataatgcatgcatttgatttaacaagactctggggcctgtgctgggaaccatctggacctttgcagaagttagagattcagtgcccccctttcttaaaggggttccttaacaaccacaaaaatccttatttctgcagtggcatagaatctgttaaaatttaattagaatcacaaatttatctcagaagctttttaacagttggtgaaatgtgcttgtccaacaaagcatcctaacagggtcgttcccatacacatttgacctggtcagccttttccaggtgaatagccccagttctgacataaagaaagttttatttgtattttactactgtttggtcaattttgatatataactggttacaaacagagccttactatttattagtggggaaatgattttaagaccgtccttttcagtatttaattctgacagatctgcatccctgttttgttttggattatttctgttttggaaaatgctgtctcatttaaaactgttggatatagctggatcctggataggaaaatgaaattattttttcattgtgttttttaattggggtgatccaaagctggcaccttcaggcacattggtctcatagccattactgtttttattgcccttctaagatcctgtcttcagctgggtcagagaaaacttcttgactaaaactggtcagaactcatcacagaaatgaaatacagtggtctctctctcccagaactggttgcagctaaaacagagagatctgactgctggctataggattttggacttaatgactgaaattgcaaattgtcctttttcttggcattacagattttgccaaaataactttttgtatcaaatattgatgtgtgaaagtgaaggagctagtctgctgaaccaggaatagtttgagatattgaactgtcatttttgcacatttgaatactttgcaggctggctttgtataaacttatcctctggtttcctatatgttgtaaatatttagaccataatttcattataaataaatctataaatattctg

SEQ ID NO: 183364 - DNA, 611 bp, Artificial Sequence
  derived and/or modified sequence
ctcaggaacagccttctcctgcctctctgcacctggacatctcaactcctgccaagatgtcctgccagcagaaccagaagcagtgccaacccccacccaagtgcccctcacccaagtgtcccccaaagaacccagtacagtgtctgcctccagcttcctctggctgtgccccaagctctgggggctgtggccctagctccgagggcggctgcttcctgaaccaccacaggcgccaccaccgatgccggcgccagaggtccaactcctgtgacaggggcagtggtcagcaaggcgggggctctggctgctgccacggttctgggggctgctgctgatccagatcctgatgctgagacaagcgatctttggaggaaacaagaatcccaagaggccaagaacagccccatctgacgcatgccttcccatataccctcttctgactttcacaggctgagctggaggttttcctgtgggggatctgagctctccccagaaggcacttcttgttttatgtacaggatgtcatatgtccccctacccctgtacctgccaaggattggcagtgcttgtgcccaacctcgtaaaaaagataaagttccttgtcctcatta

SEQ ID NO: 183365 - protein, 407 aa, Artificial Sequence
  derived and/or modified sequence
MQQKAFEESRYPWQESFENVAVCLPLRCPRCGDHTRFRSLSSLRAHLEFSHSYEERTLLTKCSLFPSLKDTDLVTSSELLKPGKLQSSGNVVKQKPSYVNLYSISHEHSKDRKPFEVVAERPVSYVQTYTAMDLHADSLDGTRSGPGLPTSDTKASFEAHVREKFNRMVEAVDRTIEKRIDKLTKELAQKTAELLEVRAAFVQLTQKKQEVQRRERALNRQVDVAVEMIAVLRQRLTESEEELLRKEEEVVTFNHFLEAAAEKEVQGKARLQDFIENLLQRVELAEKQLEYYQSQQASGFVRDLSGHVLTDISSNRKPKCLSRGHPHSVCNHPDLKAHFHPKGRNHLKKAKDDRASMQPAKAIHEQAESSRDLCRPPKKGELLGFGRKGNIRPKMAKKKPTAIVNII

SEQ ID NO: 183366 - DNA, 1224 bp, Artificial Sequence
  derived and/or modified sequence
atgcagcagaaggccttcgaggagagcagatacccctggcaggagagcttcgagaacgtggccgtgtgcctgcccctgagatgccccagatgcggcgaccacaccagattcagaagcctgagcagcctgagagcccacctggagttcagccacagctacgaggagagaaccctgctgaccaagtgcagcctgttccccagcctgaaggacaccgacctggtgaccagcagcgagctgctgaagcccggcaagctgcagagcagcggcaacgtggtgaagcagaagcccagctacgtgaacctgtacagcatcagccacgagcacagcaaggacagaaagcccttcgaggtggtggccgagagacccgtgagctacgtgcagacctacaccgccatggacctgcacgccgacagcctggacggcaccagaagcggccccggcctgcccaccagcgacaccaaggccagcttcgaggcccacgtgagagagaagttcaacagaatggtggaggccgtggacagaaccatcgagaagagaatcgacaagctgaccaaggagctggcccagaagaccgccgagctgctggaggtgagagccgccttcgtgcagctgacccagaagaagcaggaggtgcagagaagagagagagccctgaacagacaggtggacgtggccgtggagatgatcgccgtgctgagacagagactgaccgagagcgaggaggagctgctgagaaaggaggaggaggtggtgaccttcaaccacttcctggaggccgccgccgagaaggaggtgcagggcaaggccagactgcaggacttcatcgagaacctgctgcagagagtggagctggccgagaagcagctggagtactaccagagccagcaggccagcggcttcgtgagagacctgagcggccacgtgctgaccgacatcagcagcaacagaaagcccaagtgcctgagcagaggccacccccacagcgtgtgcaaccaccccgacctgaaggcccacttccaccccaagggcagaaaccacctgaagaaggccaaggacgacagagccagcatgcagcccgccaaggccatccacgagcaggccgagagcagcagagacctgtgcagaccccccaagaagggcgagctgctgggcttcggcagaaagggcaacatcagacccaagatggccaagaagaagcccaccgccatcgtgaacatcatctag

SEQ ID NO: 183367 - DNA, 1224 bp, Artificial Sequence
  derived and/or modified sequence
atgcagcagaaggcattcgaagaatcacggtatccttggcaggaaagcttcgaaaatgtcgccgtatgcctccctttaagatgccctaggtgcggggatcacacaagattccgttctctgagttcattacgagctcatttggagttctcgcatagctatgaggagagaacattgctcacgaagtgctctctgtttcccagtttgaaagacaccgatctggtcacaagctctgaactgctgaagcccggaaagttacaaagcagtggaaacgtggtgaagcagaagcccagctatgttaacttgtactcgattagccacgaacactccaaagatcgcaagccttttgaagttgtggcggagcgaccggtgtcttatgtgcagacgtacactgctatggatctgcacgcggactccttagacggaacaagatcggggcctggactacccaccagcgataccaaggcaagtttcgaagcccatgtgagagaaaaatttaacaggatggtggaggcagtggataggacgattgaaaagcgcattgacaaattgaccaaagagttggcacaaaaaaccgccgaacttctggaagtgcgcgcagccttcgtgcaacttactcagaaaaagcaggaggtccaaaggagagaaagagccctcaacagacaggtggatgtggctgtggaaatgattgcagttctgcggcaacggttaaccgaaagtgaggaggagttgctgaggaaggaggaggaggtggtgacgtttaatcactttttggaggccgccgccgagaaagaagttcaaggaaaggctcgtttacaagattttatagagaacctgctccagcgggtggaactggccgagaagcaactagagtactatcaaagtcagcaggcctctgggtttgtccgtgacctttccggccacgttctcacggacatatcctctaaccggaaaccaaagtgcctcagtaggggtcatccccactccgtctgcaatcaccccgatctcaaggcgcatttccacccaaaggggcgcaaccatttgaagaaagctaaagacgaccgcgcctcaatgcagccagcaaaagccatccatgagcaggccgagagttcgagagacctttgtcgcccgccaaagaagggggaattgcttggcttcggacgaaagggcaatattaggccaaaaatggcaaagaagaaaccaacagctatcgtgaacatcatctag

SEQ ID NO: 183368 - DNA, 1224 bp, Artificial Sequence
  derived and/or modified sequence
atgcagcagaaggcctttgaggagagccgctacccctggcaggagagctttgaaaatgtggccgtgtgcctgcccctgcgctgcccccgctgtggggaccacacccgcttccgcagcctgagcagcctgcgggcccacctggagttcagccacagctatgaggagaggaccctgctgaccaagtgcagcctcttccccagcctgaaggacacagacctggtgaccagcagcgagctgctgaagccaggcaagctgcagagcagtggaaatgtggtgaagcagaagcccagctatgtgaacctgtacagcatcagccatgagcacagcaaggacaggaagccctttgaggtggtggccgagaggcctgtgtcctatgtgcagacctacacagccatggacctgcacgccgacagcctggatggcaccaggagcggccctggcctgcccaccagtgacaccaaggccagctttgaggcccacgtgcgggagaagttcaacaggatggtggaggccgtggacaggaccatcgagaagagaattgacaagctgaccaaggagctggcccagaagacagctgagctgctggaggtgcgggccgcctttgtgcagctgacccagaagaagcaggaggtgcagaggcgggagcgggccctgaaccggcaggtggatgtggccgtggagatgattgctgtgctgcggcagaggctgacagaaagtgaggaggagctgctgaggaaggaggaggaggtggtgaccttcaaccacttcctggaggccgctgctgagaaggaggtgcagggcaaggcccggctgcaggacttcatcgagaacctgctgcagagggtggagctggccgagaagcagctggagtactaccagagccagcaggccagcggctttgtgcgggacctgagcggccacgtgctgacagacatcagcagcaacaggaagcccaagtgcctgagccggggccacccccacagcgtgtgcaaccacccagacctgaaggcccacttccaccccaagggcaggaaccacctgaagaaggccaaggatgaccgggcctccatgcagcctgccaaggccatccacgagcaggccgagagcagccgggacctgtgccggccccccaagaagggggagctgctgggctttggaaggaagggcaacatccggcccaagatggccaagaagaagcccacagccatcgtgaacatcatctag

SEQ ID NO: 183369 - DNA, 1224 bp, Artificial Sequence
  derived and/or modified sequence
atgcagcagaaggccttcgaggagagccggtacccctggcaggagagtttcgagaatgtcgccgtctgtttgcccctcagatgccctcgctgtggagaccatactaggtttcgctcactgtctagccttagggcgcacttggaattcagccactcctacgaggagcggactctgttgaccaaatgcagccttttccccagccttaaggatacggatctggttacctcttccgagcttctgaagcctggaaagctgcagtctagtggcaatgtcgtcaaacagaagccttcatatgtcaacctgtactctatctcacatgaacacagcaaggaccgaaagcccttcgaggttgtcgctgagagacccgtgtcatatgtgcagacctacacagccatggacctgcatgccgactcattagacggcaccaggtctggccctgggctgccaaccagcgacactaaggcctcgttcgaagcccacgtcagagagaaatttaacaggatggtggaagccgttgaccggaccatcgagaaacggatcgataagctaaccaaggagctggcccagaagaccgccgaacttcttgaggtgcgcgcggcatttgtccaattgacgcagaaaaagcaggaagttcagaggagggagagagccctcaatcgacaagttgacgtcgccgtcgagatgattgctgtcctgcgacagcgcctaacggaaagcgaagaggagctacttcgcaaagaggaggaagtggttacttttaatcattttctggaggccgccgccgagaaggaggtgcaggggaaagcacgactgcaagatttcatcgagaatcttttacagcgtgtcgagctggccgagaagcaattggagtactaccagtctcaacaggcctccggctttgtgcgggacttgagcggacacgtcttgaccgatatatcctccaatcgaaaacctaaatgtctctcccgcggccacccacattctgtgtgtaaccaccctgacctgaaagctcacttccatccgaagggacgaaaccatctgaagaaggccaaggatgacagggccagcatgcagcctgccaaagccatccacgagcaggccgaatcaagccgagatctatgccgacctcccaaaaagggcgagcttctgggcttcgggcgtaaaggcaatattcgccctaaaatggcaaaaaagaagcccaccgctatagtaaatatcatttag

SEQ ID NO: 183370 - DNA, 1224 bp, Artificial Sequence
  derived and/or modified sequence
atgcagcaaaaagccttcgaggagtctcgatacccctggcaggagtcgttcgagaacgtggctgtttgtctccctctaagatgcccacggtgtggcgaccataccagattcaggtcattgtcatccttacgtgcacatctcgaattcagccattcatacgaggagaggacactcctgactaagtgttccttgttcccgagtctgaaggacacagatttggtgacttcctcagaattattgaagcctgggaagctacagtcctcagggaatgtggtgaagcagaagccatcctatgtgaatctttacagcatcagccacgaacacagtaaggatcgcaaacctttcgaggttgtggcagagcgccctgtctcatatgttcaaacttacaccgctatggacttgcacgccgactccctcgacggcaccagatctggccctgggctaccaacctcggacaccaaagcctccttcgaagcccatgtgcgcgaaaaattcaatcggatggtggaggccgtggaccgtacgattgaaaaaagaatcgacaaactgacaaaagagctggcacagaagacggcagagctactggaagtgagagctgcttttgtccagcttacacaaaaaaaacaggaggtccagaggcgtgagcgcgctctgaaccgtcaggtcgacgtcgctgtggaaatgatcgcggtgttgcgccagcgtcttaccgagagtgaggaggaactactccgtaaagaggaggaggttgtaacattcaaccacttcctggaagctgcagcggagaaagaggtccaaggcaaggcgaggttacaggactttattgaaaatctgctccagagagtcgagctggctgaaaaacagctggaatattaccagagccaacaggcctccgggttcgttagggacctgtcaggacatgttctgaccgacatcagctccaacagaaaacctaagtgcctgtctaggggacaccctcactccgtctgcaatcacccagatctgaaggcccacttccatcctaagggcagaaaccacctgaagaaggcaaaggatgatcgagcatccatgcaaccagctaaagctatccacgaacaggcagagtcttctcgcgatctgtgcaggcccccaaagaaaggtgaactgctgggtttcggaagaaaaggaaacattcggccaaaaatggcgaagaagaaacccaccgcgatcgtcaatatcatttag

SEQ ID NO: 183371 - DNA, 4173 bp, Artificial Sequence
  derived and/or modified sequence
gttccccgcggaggtggcagccctgggccgcggcgttccggaacccccgcacccacggcgcggtgccccacggtgcccgcgagcgccgcccccgctggctagccgcgcctcgctccgccctggacgccgccggtcccggcgcggaggtgcggcggggagtgggagccggcccggctcagtctgatttacggctctgctgaaaaccgcttcgctcccgcagcatcagcaccggaggcggcggctgcagcagcagcagcaacaagtcgggacttttagagtaatgcaacagaaggcttttgaggaaagcagatatccctggcaggagtcctttgagaatgttgctgtgtgcctgccattacgctgcccgaggtgtggagaccataccagatttagaagcttgtcatccttgagggcccatctggagttcagtcacagctacgaagaaagaaccctcttgacaaaatgcagtctctttccatccctcaaagacacagacctagtcacttcctcagaactcctgaaaccgggaaaattgcagagcagtggcaacgtggtaaagcagaaaccgagctatgttaacttgtacagcatttcacatgaacattccaaggacaggaagccatttgaggtggtggcagagaggcctgtgtcctatgtgcagacctacactgccatggacctccatgcagactcgctggatgggacacggtcgggtcctggactgcccacctcagacaccaaagcttctttcgaggcacatgtcagagaaaaattcaatcgaatggttgaggctgtggataggaccattgagaagagaattgataaactcaccaaagagttggcccagaaaactgcggaactgttggaagttcgggcagcttttgtgcagctgactcagaaaaagcaggaagttcagagacgagagcgggccttaaacagacaggtggacgtggccgtggaaatgatagctgtactgaggcaacgcctgacggaatctgaggaggagcttcttaggaaagaagaagaagttgtcacattcaaccatttcctggaagcggcagctgagaaggaggttcaagggaaagcccggctccaggactttattgagaatctgttacagcgggtagaactggcggagaagcagcttgagtactatcagagccagcaggcctctggctttgtccgtgatctcagcgggcacgtgcttacagacatctcctcaaataggaagcccaaatgcctaagccgagggcacccgcattcggtatgtaaccaccctgatctcaaggcccatttccacccaaagggaaggaaccacctgaaaaaggccaaggatgacagagccagcatgcagcctgccaaggccattcacgaacaggctgagtcctcaagagacctctgcagacctccaaagaaaggggagctcctggggtttggccgcaaaggcaacatcaggcccaaaatggctaaaaaaaagccaacagccattgtgaacatcatctaaaagggtgggtggtgctggaccaatcatcgctgggctttggggaacgttgttccaggagccaacagtaatgtctttctggaaacattccatagtaagacacattggaaaagccaagggcataacacaggcaagcacctcaattaaccagagcttagcaaatgggaatcttagtgaaccagaattttattataacccccttttagaagcttgcaaattacagaaagaataaaaaaattaaatcaatcttaaagctctaacttctaaagtaactggcccagtctccagtaatcttggcatctgggcttctatgcagtggtcactaattttcaggaccaaggccacacaaaatgtcaggcctagggagaaaattcatctgtgcccactgctctccaaagtgcgaggcaaggaatggcagtgtaaagttctgttaatagcagtaaaatgaaaatatttgtgtttgtgtataaccttcccctcagctaatttgaaagcctccaaaataaggattcccattccccgagtattctggttaatcaagatttcaatttctgggttgctcaagggactcgttcagtcagacttcagttctcattccgacagggtgtctttcagttcgtttgtttgattgaggttttttggtggcctagatgcatgtttattcagattttggtacacctctgccgtcttctttggctgagtattctgcacccacagaccatgctgccagcctctatcttaatagctgcttctgtggatatggctggggagcgaagtaaaatcctcttttgattagcacccagcatgggctgggtggctaggtggttggaatgacagtggactgcacgcttggtgcatcgtgcatcgtgaccatcctggaagcactgcgggtgtcgccaagccctttcctaagacctgcttcccggccagtgtcagtggccctctctctctctgctatgggcatgactttctcttcgctggcttaacttttccactgggtggttcactttgcctcctgctgcttctgtgccctgttaagggcttcaggtatctttcaaccaagtatctggagtgttcactctatgttgcattctaaagtaatttctgaaataaacaatgcatgtaggagccagaatctgacactgtcttcccctccttccctccctaaaatggctttagtttccacaaagagctgttaagaatttcctgctgtatgattttcctcaagaatgaatttccatgttattttttccttaaatttagcaatatcatcaggtctcttgcagagtttacaagtgctgacattcttctgaaaacaggaataattttgtccacaaatatatacatatatacatatatataacacatacaaaatatatatgttaagtatattaataatttatttttaaatactcatggagaaagtgtgtgtttgtggtgggtggtttttaaactatatatgtttgttcatgtaaactgaattctcttatttaaaaaatcaaaactgtaacgtaattaacattggcagaattatgattgttactgcaataagcatcaaattagcagcgcattaaaaataggaaataaagcagttgcttaaaatgccagtcaattgaaaagtgtaacttatcattatacaaacattctgaacctaccataatgaaaatgttcttgaatcttcactttgactttcagtttatggggggggtagatcattcatgtgatatataagcagctatcaagtgggcaaaaacattgctgtgaatagcactgtttaggctaacattgtaaaaattgtaatgttataattattatttatttggagaattaacttccccctctaaagttatttattattgatgcttataccatgattgcaccttagccttttacatactaaaaacatgacttgttagttgtattgcatgctctttgtcctgtaatgtgtgtgcaatgacaacttgtttctgttttatttaaagtaactgacattttggattttcatctaacatagagggcatggcaactctctttgacagtggtaccccatgatcttcagaaagtaccataatgtcatcctactctacatttcacaagacgaattattttgagatttgtttattatattaaaatgtttttttacgttcccactaaattttgaccccatataaagaaatgtgttatgtatgttgtgcctccttagagacataaatttagtgtcaaaacatgggagatggcttactcagaagcatactccacttaacataccatggcctgagctaagtaccatgtcctgtttgtgtcttatttttaaatattttctttgtccacatgggccgttgaccttagagttaaggcggttgcttttttgaagaaatcaccaaagtttctgggaaactatgttcaaggttgaaatggagagtagatttaattttatttgtcttgtagggaagaaatcttcctttgaaccgcttttcttgctttttccctttttcccaaactaggttacaggttcttatctgcaaggttcaagttgcttagacattgttttccagtattctgcagggccagtcagttgtacagaagttggaatattctgttccagaattaaagaagtttttagattatgaaatattatgataataaagctatatttctgactaatgtgttga

SEQ ID NO: 183372 - protein, 958 aa, Artificial Sequence
  derived and/or modified sequence
MLKSKTFLKKTRAGGVMKIVREHYLRDDIGCGAPGCAACGGAHEGPALEPQPQDPASSVCPQPHYLLPDTNVLLHQIDVLEDPAIRNVIVLQTVLQEVRNRSAPVYKRIRDVTNNQEKHFYTFTNEHHRETYVEQEQGENANDRNDRAIRVAAKWYNEHLKKMSADNQLQVIFITNDRRNKEKAIEEGIPAFTCEEYVKSLTANPELIDRLACLSEEGNEIESGKIIFSEHLPLSKLQQGIKSGTYLQGTFRASRENYLEATVWIHGDNEENKEIILQGLKHLNRAVHEDIVAVELLPKSQWVAPSSVVLHDEGQNEEDVEKEEETERMLKTAVSEKMLKPTGRVVGIIKRNWRPYCGMLSKSDIKESRRHLFTPADKRIPRIRIETRQASTLEGRRIIVAIDGWPRNSRYPNGHFVRNLGDVGEKETETEVLLLEHDVPHQPFSQAVLSFLPKMPWSITEKDMKNREDLRHLCICSVDPPGCTDIDDALHCRELENGNLEVGVHIADVSHFIRPGNALDQESARRGTTVYLCEKRIDMVPELLSSNLCSLKCDVDRLAFSCIWEMNHNAEILKTKFTKSVINSKASLTYAEAQLRIDSANMNDDITTSLRGLNKLAKILKKRRIEKGALTLSSPEVRFHMDSETHDPIDLQTKELRETNSMVEEFMLLANISVAKKIHEEFSEHALLRKHPAPPPSNYEILVKAARSRNLEIKTDTAKSLAESLDQAESPTFPYLNTLLRILATRCMMQAVYFCSGMDNDFHHYGLASPIYTHFTSPIRRYADVIVHRLLAVAIGADCTYPELTDKHKLADICKNLNFRHKMAQYAQRASVAFHTQLFFKSKGIVSEEAYILFVRKNAIVVLIPKYGLEGTVFFEEKDKPNPQLIYDDEIPSLKIEDTVFHVFDKVKVKIMLDSSNLQHQKIRMSLVEPQIPGISIPTDTSNMDLNGPKKKKMKLGK

SEQ ID NO: 183373 - DNA, 2877 bp, Artificial Sequence
  derived and/or modified sequence
atgctcaagagcaaaacctttctcaagaagactcgggccgggggtgtcatgaagattgttagagagcactacctgcgtgatgacattgggtgtggggcacctgggtgcgctgcatgcggcggggcccacgaagggcctgccctggaacctcagccgcaggatcctgcttcaagtgtctgtccccagccgcattacctgctacccgacaccaatgttttgctgcaccaaattgatgttcttgaggatcctgccattaggaatgtgatcgtccttcagacagtactacaggaggtaagaaatagatccgcccctgtctacaagcgcattagagacgtcacaaacaatcaagagaaacacttttatacctttacaaatgagcaccatcgagaaacctacgttgaacaggagcagggagagaacgcgaacgaccgtaatgacagggctatccgcgtcgccgcaaagtggtacaacgagcacctgaaaaagatgtcagcagataatcagctccaggtcatctttatcacaaacgatcgccggaacaaagaaaaggcgatcgaagaaggtatcccagcctttacctgcgaagagtacgtaaagagcctgactgctaatcccgaactcattgataggctggcctgcctgtccgaggaaggcaatgagattgaatctggtaaaatcatctttagcgaacacttaccgctgtcgaaactgcagcagggcatcaagagcggcacctacctccagggcacttttagggccagccgagagaactatctagaagccactgtttggatacatggcgataacgaggagaataaagagataatcctgcaggggctgaaacacctgaatcgagccgttcatgaggacatagtggccgtcgaactcctgcccaaatcccaatgggtggcgcccagctctgtggtgctgcacgatgaaggccagaatgaggaggacgtcgagaaagaagaggaaacagaacggatgctgaaaacagcggtcagcgaaaaaatgttgaagcccacgggccgcgtcgtaggaatcattaagcggaattggcgcccatactgtgggatgctctcgaaatcagacatcaaggagtctcgcagacacctcttcactcccgccgataaacgcattcctagaattcgtattgaaactagacaagcctcaaccttggagggtcggagaataattgttgcaatagacggatggccccgcaacagtagataccccaacggccactttgtacgcaatcttggcgacgtgggtgagaaggagactgagaccgaagtattgttactagagcatgatgtgcctcatcaacccttctcccaagctgtgctaagtttccttcctaagatgccatggtctattacagagaaggacatgaagaaccgtgaagatctgcggcacctatgcatatgttctgtcgacccaccgggttgcactgacatcgacgatgcgctgcactgccgcgagctggagaatgggaatctggaggttggcgtgcacatcgcagacgtcagccactttattagacccggaaatgccttagatcaggagtcagctagaagaggcacaacagtttacctgtgtgagaaaagaattgatatggtgcctgaactattgagttctaatctgtgtagccttaaatgcgacgttgatcgtctggccttctcttgcatctgggaaatgaaccataacgctgaaatcttgaagaccaagttcacgaagagcgttatcaattcaaaggccagtctaacatacgccgaagcccaactgcgtattgacagcgctaacatgaatgatgacatcaccacgtcacttcgtggtttgaataagctggccaaaatcctgaagaagaggcggatcgagaagggggctctgactctttcgagccctgaagttcgattccacatggattcggagactcatgaccctatagacctccagaccaaagagttgcgagaaacaaactcgatggtcgaggagtttatgctgctggctaatatctccgtcgctaaaaaaatacacgaggagttctccgagcacgccctgctgcggaagcaccctgctccacctccctcgaattatgagatcttagtcaaggccgcccgcagcagaaacctggagatcaagacagacacagctaaaagcctcgctgagtctctggaccaggcggaaagtcccaccttcccctatctcaataccctcttgagaatactggccacaaggtgtatgatgcaggctgtctatttttgctctggcatggataacgattttcatcactacggcctagcaagcccgatctatacccattttactagtccaatccgtaggtacgctgacgtcatcgtacaccgtctgctggctgtggctatcggcgccgattgtacttaccccgagttgacagataagcacaagctggccgatatatgtaaaaacctgaattttcggcacaagatggctcaatacgcccaacgagcaagcgtagctttccacactcagcttttctttaagtccaagggaatagttagtgaggaggcctatattctcttcgtacggaaaaacgccatcgtcgttttaattcctaagtatggactggagggaaccgttttcttcgaggagaaagataagcccaatccacagcttatttatgacgacgagatccctagcttaaagatagaagatacagtattccatgtcttcgacaaggtcaaggttaaaattatgcttgactcgtccaatctccagcaccagaaaatcaggatgtcactcgtggaacctcagatcccaggtatcagtattccaactgatacttctaatatggacctgaacggacctaaaaagaagaaaatgaagctcggtaagtag

SEQ ID NO: 183374 - DNA, 2391 bp, Artificial Sequence
  derived and/or modified sequence
atgtccgccgataatcagctgcaggtcattttcattaccaatgatcgccgtaataaggagaaggcaatcgaggaagggattcccgcctttacatgtgaggagtacgtcaagtctctgaccgccaaccccgagctaatcgatcgactggcttgcctcagtgaggaaggcaatgagatagagtcgggcaagattatattcagcgaacacttgccgttgagtaagctgcagcagggcatcaaatccggcacctatttgcaagggacatttcgtgccagccgagaaaattacttggaagctaccgtttggatccacggagacaatgaagagaataaagaaatcattttgcagggtctgaagcatctcaaccgggccgtccacgaagacattgttgctgtcgagctgctgcctaagtctcagtgggtcgcaccctcatctgtagtgcttcacgatgaaggccagaacgaggaggatgtggaaaaagaggaagaaactgagagaatgctgaagacggcggtctccgaaaagatgctaaaaccaacaggacgcgtggttgggataataaagcgcaactggagaccctactgcggcatgctgtctaagtccgacattaaggagagcaggagacatctttttaccccggcagataagcgcatacctaggatcaggattgagacgcgccaggcatcaactcttgagggacgacgtatcatagtcgctatagacggatggccgagaaattccaggtacccaaacggacactttgtgcgcaatctgggggacgtgggggaaaaggagacggagacagaagtgctgctgctcgagcatgatgtgccccatcaacctttctcccaggccgtgctttcttttctgcctaagatgccctggagtattaccgagaaggatatgaaaaacagagaagatctgcgtcatctgtgtatatgttcagtggatccacctggctgtactgatatcgacgacgccctacactgtagggaactggagaacggtaacctggaagtcggcgtgcacattgcagatgtgtcgcactttatccgccccggaaatgcactagatcaggaatcagccaggcgtggcaccacagtgtacctttgcgaaaagcgcatcgatatggtgcccgagcttctgtcgagcaatctgtgctcattgaaatgtgacgtagacagactggctttttcctgtatctgggagatgaatcacaacgcggagattcttaaaacgaaattcaccaaatccgtgatcaattcaaaagcctctttaacctacgcagaggcccaattacggatcgacagcgcaaacatgaatgacgatatcaccacttcactgagaggtttgaacaagttggctaaaatccttaaaaaacggcgtattgagaagggtgcactgactctgtcctcccctgaggtacgcttccacatggattctgagacacatgacccaattgatctacagacaaaggagttgagggaaacgaactctatggtggaagaatttatgctgctggcaaatatatccgtcgcgaagaagatccacgaagaattcagcgaacatgccttgctaagaaaacacccagcaccacccccttccaattacgagatactggtcaaggctgcgaggtcacgaaacctggaaataaagacagatacagctaaatctctggccgaatccttggatcaggcagaaagccccaccttcccctacctcaatacactcctccgcatcctggctactagatgtatgatgcaggctgtgtatttttgctccggcatggataacgatttccatcactacggacttgcttctcccatttatacccactttacgtcccccattagaagatacgctgatgtgattgtccaccggctgctggccgtggccatcggagccgactgtacctaccccgaactgactgataagcataagttagccgacatctgtaaaaacttaaatttcagacacaaaatggcccaatatgcacagcgcgcctctgtggcgttccatactcagctattttttaaatctaagggcattgtcagtgaggaggcttatattctgtttgtgagaaagaacgctattgttgtgctaatccccaaatatggcctggaagggactgttttttttgaagagaaggataagccaaatccccaactgatttatgacgatgagattccatccctcaagatcgaggatactgtctttcatgtttttgataaggtcaaagtgaagatcatgctggactctagcaaccttcagcaccagaagatcagaatgagtctggtggagcctcaaatccctggcatctctataccaacggacacgtccaacatggatctcaacggacctaaaaaaaagaagatgaagctggggaaatag

SEQ ID NO: 183375 - DNA, 2877 bp, Artificial Sequence
  derived and/or modified sequence
atgctgaagagcaagaccttcctgaagaagaccagggctggaggagtgatgaagatcgtgcgggagcactacctgagagatgacatcggctgtggggcccctggctgtgccgcctgtggcggggcccacgagggccctgccctggagccccagccccaggaccctgccagctctgtgtgcccccagccccactacctgctgcctgacaccaacgtgctgctgcaccagattgatgtgctggaggaccctgccatcagaaatgtgattgtgctgcagacagtgctgcaggaggtgaggaacagaagtgcccctgtgtacaagaggatcagagatgtgaccaacaaccaggagaagcacttctacaccttcaccaatgagcaccaccgggagacctacgtggagcaggagcagggagaaaatgccaatgacagaaatgaccgggccatccgggtggccgccaagtggtacaatgagcacctgaagaagatgtctgctgacaaccagctgcaggtgatcttcatcaccaatgacagaagaaacaaggagaaggccatcgaggagggcatcccagccttcacctgtgaggagtatgtgaagagcctgacagccaaccctgagctgattgaccggctggcctgcctgtctgaggagggcaatgaaattgaaagtggcaagatcatcttcagcgagcacctgcccctgagcaagctgcagcagggcatcaagagcggcacctacctgcagggcaccttccgggccagccgggagaactacctggaggccaccgtgtggatccacggggacaatgaggagaacaaggagatcatcctgcagggcctgaagcacctgaacagagctgtgcatgaagatattgtggccgtggagctgctgcccaagagccagtgggtggcccccagctctgtggtgctgcatgatgagggccagaatgaggaggatgtggagaaggaggaggagacagagaggatgctgaagacagctgtgtctgagaagatgctgaagcccaccggccgggtggtgggcatcatcaagaggaactggaggccctactgcggcatgctgagcaagagtgacatcaaggagagcagaagacacctgttcaccccagctgacaagaggatcccccgcatcagaattgagacccggcaggccagcaccctggagggccgccgcatcatcgtggccattgatggctggcccaggaacagccgctacccaaatggccactttgtgaggaacctgggagatgtgggggagaaggagacagaaacagaggtgctgctgctggagcatgatgtgccccaccagcccttcagccaggccgtgctgtccttcctgcccaagatgccctggagcatcacagagaaggacatgaagaaccgggaggacctgcggcacctgtgcatctgcagcgtggaccccccaggctgcacagacattgatgatgccctgcactgccgggagctggagaatggaaacctggaggtgggcgtgcacatcgcagatgtgagccacttcatccggcctggaaatgccctggaccaggagagcgcccggcggggcaccaccgtgtacctgtgtgagaagagaattgacatggtgcctgagctgctgagcagcaacctgtgcagcctgaagtgtgatgtggaccggctggccttcagctgcatctgggagatgaaccacaatgctgagatcctgaagaccaagttcaccaagagcgtcatcaacagcaaggccagcctgacctatgcagaggcccagctgagaattgattctgccaacatgaatgatgacatcaccaccagcctgcggggcctgaacaagctggccaagatcctgaagaagagaagaattgaaaaaggagccctgaccctgagcagccctgaggtgcgcttccacatggattctgagacccatgaccccatcgacctgcagaccaaggagctgcgggagaccaacagcatggtggaggagttcatgctgctggccaacatctctgtggccaagaagatccacgaggagttcagcgagcacgccctgctgaggaagcacccagcccccccacccagcaactatgagatcctggtgaaggccgcccggagcaggaacctggagatcaagacagacacagccaagagcctggccgagagcctggaccaggccgagagccccaccttcccctacctgaacaccctgctgcgcatcctggccacccgctgcatgatgcaggccgtgtacttctgcagcggcatggacaatgacttccaccactacggcctggccagccccatctacacccacttcaccagccccatccgccgctatgcagatgtgattgtgcaccggctgctggccgtggccatcggggctgactgcacctacccagagctgacagacaagcacaagctggccgacatctgcaagaacctgaacttccgccacaagatggcccagtatgcccagagggcctctgtggccttccacacccagctgttcttcaagagcaaaggaattgtgtctgaggaggcctacatcctgtttgtgaggaagaatgccatcgtggtgctgatccccaagtatggcctggagggcaccgtcttctttgaggagaaggacaagcccaacccccagctgatctatgatgatgagatccccagcctgaagattgaagatactgtgttccacgtgtttgacaaggtgaaggtgaagatcatgctggacagcagcaacctgcagcaccagaagatccgcatgagcctggtggagccccagatccctggcatcagcatccccacagacaccagcaacatggacctgaatggccccaagaagaagaagatgaagctgggcaagtag

SEQ ID NO: 183376 - DNA, 2391 bp, Artificial Sequence
  derived and/or modified sequence
atgtctgctgacaaccagctgcaggtgatcttcatcaccaatgacagaagaaacaaggagaaggccatcgaggagggcatcccagccttcacctgtgaggagtatgtgaagagcctgacagccaaccctgagctgattgaccggctggcctgcctgtctgaggagggcaatgaaattgaaagtggcaagatcatcttcagcgagcacctgcccctgagcaagctgcagcagggcatcaagagcggcacctacctgcagggcaccttccgggccagccgggagaactacctggaggccaccgtgtggatccacggggacaatgaggagaacaaggagatcatcctgcagggcctgaagcacctgaacagagctgtgcatgaagatattgtggccgtggagctgctgcccaagagccagtgggtggcccccagctctgtggtgctgcatgatgagggccagaatgaggaggatgtggagaaggaggaggagacagagaggatgctgaagacagctgtgtctgagaagatgctgaagcccaccggccgggtggtgggcatcatcaagaggaactggaggccctactgcggcatgctgagcaagagtgacatcaaggagagcagaagacacctgttcaccccagctgacaagaggatcccccgcatcagaattgagacccggcaggccagcaccctggagggccgccgcatcatcgtggccattgatggctggcccaggaacagccgctacccaaatggccactttgtgaggaacctgggagatgtgggggagaaggagacagaaacagaggtgctgctgctggagcatgatgtgccccaccagcccttcagccaggccgtgctgtccttcctgcccaagatgccctggagcatcacagagaaggacatgaagaaccgggaggacctgcggcacctgtgcatctgcagcgtggaccccccaggctgcacagacattgatgatgccctgcactgccgggagctggagaatggaaacctggaggtgggcgtgcacatcgcagatgtgagccacttcatccggcctggaaatgccctggaccaggagagcgcccggcggggcaccaccgtgtacctgtgtgagaagagaattgacatggtgcctgagctgctgagcagcaacctgtgcagcctgaagtgtgatgtggaccggctggccttcagctgcatctgggagatgaaccacaatgctgagatcctgaagaccaagttcaccaagagcgtcatcaacagcaaggccagcctgacctatgcagaggcccagctgagaattgattctgccaacatgaatgatgacatcaccaccagcctgcggggcctgaacaagctggccaagatcctgaagaagagaagaattgaaaaaggagccctgaccctgagcagccctgaggtgcgcttccacatggattctgagacccatgaccccatcgacctgcagaccaaggagctgcgggagaccaacagcatggtggaggagttcatgctgctggccaacatctctgtggccaagaagatccacgaggagttcagcgagcacgccctgctgaggaagcacccagcccccccacccagcaactatgagatcctggtgaaggccgcccggagcaggaacctggagatcaagacagacacagccaagagcctggccgagagcctggaccaggccgagagccccaccttcccctacctgaacaccctgctgcgcatcctggccacccgctgcatgatgcaggccgtgtacttctgcagcggcatggacaatgacttccaccactacggcctggccagccccatctacacccacttcaccagccccatccgccgctatgcagatgtgattgtgcaccggctgctggccgtggccatcggggctgactgcacctacccagagctgacagacaagcacaagctggccgacatctgcaagaacctgaacttccgccacaagatggcccagtatgcccagagggcctctgtggccttccacacccagctgttcttcaagagcaaaggaattgtgtctgaggaggcctacatcctgtttgtgaggaagaatgccatcgtggtgctgatccccaagtatggcctggagggcaccgtcttctttgaggagaaggacaagcccaacccccagctgatctatgatgatgagatccccagcctgaagattgaagatactgtgttccacgtgtttgacaaggtgaaggtgaagatcatgctggacagcagcaacctgcagcaccagaagatccgcatgagcctggtggagccccagatccctggcatcagcatccccacagacaccagcaacatggacctgaatggccccaagaagaagaagatgaagctgggcaagtag

SEQ ID NO: 183377 - DNA, 2877 bp, Artificial Sequence
  derived and/or modified sequence
atgctgaagagcaagaccttcctgaagaagacccgggccggcggcgtaatgaagattgtgcgggaacattacctccgggacgatattgggtgcggggcccccgggtgtgccgcatgcggaggcgcccatgaaggtccagccctggagccacagccgcaggacccggcctcctcggtctgtccccagccgcattacctccttcctgacactaatgtgctgctgcaccagattgacgtcttagaggatcctgcgatccgcaacgtgatagtcttgcagaccgtactgcaagaagtgcggaacaggagcgctcctgtctataaacggatacgtgatgtcacaaataaccaggaaaagcacttttatacatttactaatgagcaccatcgcgagacctacgtcgaacaggagcaaggcgagaatgctaatgatcgaaacgaccgcgccatccgcgtggcggctaagtggtataacgaacacttaaaaaaaatgtcggcggacaaccagctccaggtcatattcatcacgaacgaccggaggaataaagagaaagctatagaggaaggtattcctgcatttacatgcgaagagtacgtgaaatcactgacggctaatccggaactcattgacagactggcatgcctctctgaggaaggaaatgagatagagtctggcaagatcattttctccgaacatttgccgctctccaagctacagcagggtatcaaatccgggacttacttacagggaacgtttcgagctagccgggagaattaccttgaggctacagtttggatacatggggacaacgaggaaaacaaagagatcattcttcagggcctgaagcacttaaatagagccgttcatgaggatattgtggccgtggaactacttcctaaaagccagtgggtggcaccaagttcagttgtgctgcacgacgaaggtcaaaatgaggaagacgtggagaaagaggaggaaaccgagaggatgctgaagaccgccgtgtcagagaaaatgttaaaacctactgggagggtggtaggtattattaagaggaattggcgaccctattgcggaatgttgtcaaagtctgacatcaaagagagcagaagacacctgtttacaccagcagacaaacgaattccccggatcaggattgaaactcggcaagcatcgaccctcgaagggcggcgtatcattgttgctattgacggctggccgagaaactcacgctaccctaatgggcatttcgtgaggaacctgggtgatgtgggggaaaaagagactgagactgaggttttgcttctggagcacgacgtcccccaccagccatttagccaagctgtcctgtcgttcttgcccaaaatgccttggagtattaccgagaaagatatgaaaaatagggaggatctgagacacctttgtatctgcagtgtagacccaccaggatgtaccgacatagacgacgcccttcactgccgggagctcgagaatggcaatctagaggttggcgtacacatcgctgacgtgtctcactttatccgcccggggaacgcgcttgatcaagaaagtgcccgccgggggaccacggtgtatttgtgcgagaaacgcattgatatggtccccgaactcttgtcttcaaatctgtgctcgctgaagtgcgatgtcgatagactggcctttagctgcatctgggagatgaatcacaatgccgagatccttaaaaccaagtttaccaagtccgtgataaatagtaaggctagcctcacatatgccgaagcccagctacgaatcgattcagctaacatgaatgatgacataacgacctccttacgcggactgaacaagttggcgaagattctgaagaaaaggcggatcgagaaaggggcactcacactgagctctcctgaagtccgcttccacatggattccgagacgcatgaccctattgatctccaaactaaagagctaagggagacaaattctatggtggaggagttcatgctgctggccaacatcagcgtggctaagaaaatccacgaagagtttagcgagcatgctcttctgcggaagcatccagctccccccccaagtaactacgagattcttgtgaaagcagctcgctcacgaaatctggagattaaaaccgacactgctaaatccctcgccgagagcctcgatcaggccgagtcccccacgttcccctacctgaacaccctgcttcgtatacttgccacacgctgcatgatgcaggccgtttatttttgttccggtatggataacgatttccatcattacggccttgcctcacccatctacacacatttcacctcgcctattcggagatacgctgacgtgatcgttcaccgcctattagccgttgccattggggccgattgcacttatcctgaactcacggacaagcacaagcttgcagatatttgcaaaaatctaaatttcaggcataagatggcccagtacgcccaacgggcctccgtcgcgttccatacccagttattctttaagtctaaaggaatagtgagcgaggaggcctacatcctgtttgtgcggaagaacgccatcgtcgttctgatccccaagtacgggctggaaggcaccgtgttctttgaagagaaggataaacctaacccacagctgatttacgacgacgagatacccagcttaaaaatagaggacaccgttttccatgtgtttgataaggttaaagtgaaaatcatgctcgactcatcaaatttgcagcatcagaagatcagaatgagcctggtcgaacctcagatccctggaattagcatacccacagacacttccaacatggatctgaacgggccgaaaaagaaaaagatgaaactgggtaaatag

SEQ ID NO: 183378 - DNA, 2391 bp, Artificial Sequence
  derived and/or modified sequence
atgagcgccgacaaccagctgcaggtgatcttcatcaccaacgaccggcgcaataaagaaaaggcgattgaggagggaattccagcctttacctgtgaagaatacgtaaagtctctgacagccaacccagaactgatcgatcggttggcatgcctaagtgaagagggcaatgagatagagagcgggaagatcatcttttccgagcacctccccctgtcaaagctgcaacagggcatcaagagcggaacgtacttgcaaggcacttttcgggcgagccgggagaattacctggaggctacagtttggattcacggcgacaatgaggaaaacaaggagattatcctgcagggcctgaagcatttgaacagagcagttcacgaggacatcgtcgcagtggaactgctgcctaaaagccagtgggtggctccatcaagcgtcgtgctccatgacgaggggcagaacgaagaagatgtggagaaagaggaggagactgagcggatgctcaagacagctgtttctgaaaagatgttaaaacctacaggcagggtagtggggatcattaagcgaaactggcggccttattgcggaatgctgtccaagtctgacataaaagaatccagaaggcatctattcactcctgcagacaaacgcattccacgcatcaggatcgagacacggcaggcaagtacattggagggccggaggatcatcgtcgccatcgacgggtggccccgcaacagccggtatccaaatggccatttcgtacgcaacctgggggacgtgggggaaaaggaaacggagaccgaggtgctccttctcgagcacgatgtgcctcaccagccattctcccaggctgtcttgagcttcttgccaaagatgccatggtctatcacagagaaggacatgaagaacagagaagacttaaggcacctgtgtatctgctccgtagatcctcctggctgtaccgacattgatgatgctctgcactgtcgggagctcgagaacggcaacctcgaagtgggcgtgcatatcgctgatgtttctcatttcatccgacccggcaacgcgttggaccaggagagcgcccggagaggcactacagtgtatctgtgtgagaagcgaatcgacatggtgccagagcttctgagctcaaacctgtgctctttaaaatgtgacgttgaccggctcgcctttagctgcatatgggaaatgaatcacaatgctgagatattgaaaactaagttcactaaatcagttattaattccaaggctagtctcacctatgcagaagcacagcttagaattgacagcgccaatatgaacgatgatatcacgacatccctgagaggcttgaacaagctggccaagattctcaagaaacgccgcatcgagaaaggggctctgacactgtcatcaccggaagtgagatttcacatggacagtgaaacacacgacccaatcgacctgcagacaaaggagctgcgggaaaccaactctatggtcgaagagtttatgttgctggctaatatttcggttgccaaaaagattcatgaggaattctctgagcacgcattactgagaaaacaccccgccccccctccttccaactatgagattctggttaaggctgccaggtctcgaaacttggagataaagacagacacggcaaagtccctggccgaatccttggaccaagccgaatctccaacgtttccttatctgaacacactgcttaggatcttggcaacccggtgcatgatgcaagccgtgtacttttgtagcggaatggataacgattttcaccactacggcctagctagtccaatttatacccattttacctctcccatacggaggtatgctgatgttattgtgcaccgcctgctggcagtggccataggggctgactgcacatatccggagctaaccgacaagcataaacttgccgatatctgtaagaatcttaatttcagacacaaaatggcacagtacgctcagagggcgtccgtggcatttcacacacagttattcttcaaaagtaagggtatcgtgtcagaagaagcctatattctgtttgtgcggaagaacgcgatcgtggttttaattccaaagtacggtctcgaagggacagtgtttttcgaggagaaagacaagccgaacccccaattaatctatgacgacgagattccctctctaaaaatcgaggataccgtgtttcacgtttttgacaaagtcaaggtcaaaatcatgctggacagcagtaacctgcagcaccagaagatccgcatgagtttggtggaaccgcagattcctggaattagtataccaactgatacgtctaatatggatctcaatggccctaaaaaaaagaagatgaagctgggcaagtag

SEQ ID NO: 183379 - DNA, 2877 bp, Artificial Sequence
  derived and/or modified sequence
atgctcaagtccaaaaccttcctgaaaaaaacgcgtgcaggtggggtgatgaaaatcgtccgggagcattacctcagggacgacatcggatgcggcgcacccggatgcgcggcatgcggtggagcccacgaaggccctgccttggaaccccagccccaggacccggcaagcagtgtgtgccctcagccacactatcttctgccagatacaaacgtgttgcttcaccagattgatgtgttggaagatcctgccattcgcaacgtgatcgtacttcaaaccgttttgcaagaggtccgaaatagatctgcacccgtttataagagaatacgggatgttaccaataaccaggaaaagcacttctacacatttactaatgagcaccatcgggaaacctacgttgaacaggagcagggggaaaatgccaacgaccgtaatgatagggcgatcagagtggcagcaaagtggtataacgagcacctgaagaagatgagtgcagataaccagcttcaagtaattttcatcacaaatgaccggcgaaacaaagagaaggccatcgaagaagggattccggcattcacctgtgaagaatacgtgaagtcgcttaccgccaatcccgaactgattgatcgtctggcttgtctgtccgaagaaggtaatgaaattgaaagtggaaagataatcttttcagaacatttacctcttagtaagctgcagcaaggaattaagtccggtacctatctccagggcacatttcgagcgtccagagaaaactaccttgaggctacagtttggatccatggtgacaatgaggagaacaaggagattattttgcaaggactgaaacacctcaacagggcagtgcacgaggatattgtggcggtcgagctgctaccaaagtcccaatgggttgccccaagctcggtggtgctccatgatgagggccagaacgaagaggatgtggagaaagaggaagagacagaaagaatgctgaaaaccgccgtgtcagagaagatgctcaaacccacggggcgtgttgttgggatcattaaacgcaattggcggccttattgcggcatgttgagcaagagtgatattaaggagagccgcagacatctctttactccggctgacaagcgaattcccagaataagaatcgaaaccagacaggcttccactcttgagggtcgaaggataatcgtggctattgacggttggccccgaaattcaagatatcccaacggccattttgtcagaaacctgggcgatgtcggggaaaaagagactgagaccgaggtgctcctgcttgagcacgatgtgccacaccagcccttttctcaggccgtgttaagcttccttcccaaaatgccatggagtatcaccgagaaggacatgaaaaacagagaggatctgaggcacctttgtatttgctcagtggaccctcccggatgtactgacatcgatgacgcactgcactgtagagagctagagaatggtaacctggaagtgggggtccacattgccgacgtatcgcattttatcaggcccggaaacgctctcgatcaggagtcagctaggagaggcactactgtatatctatgtgagaaacgtatcgacatggtacctgagctgcttagcagcaacctgtgttcccttaaatgtgacgtggataggctcgcattctcctgtatttgggaaatgaaccacaatgccgagattctgaaaacgaagttcacaaaatcggtcatcaactccaaggcttcattgacctatgcggaggcacagctgcggatcgactccgccaacatgaatgacgacatcaccacatcgctacgagggttgaataagctggccaagattctaaagaagcgacggatagagaaaggagccctcaccctgtcaagtccggaggtgcgattccacatggacagtgaaactcatgatcctatcgacctacagacaaaggaattgcgagaaactaattctatggtggaagaattcatgctgctcgctaatataagtgtcgccaagaagatacatgaggaattcagcgagcacgccctcttgcgcaaacacccagcgcctccaccatctaattacgaaattctcgtgaaagcagcaaggagtcgcaacctggaaatcaaaaccgatacagctaaatccctggcggagtccttagaccaggccgaaagccccacatttccttatctgaataccctgctgcgaatcttagctaccaggtgtatgatgcaggccgtgtacttttgctcgggaatggataacgactttcaccattacggcctggcctcccctatctatacacattttacgtctcctatccggcgatatgctgatgtaattgtccatcggctgctcgcggtggcaattggcgctgactgtacataccccgaacttaccgataaacacaaactcgctgacatttgcaagaatctgaacttcagacacaagatggcacagtatgctcagcgagcatctgtggcattccatactcagctgttttttaagtctaaaggaattgtgagtgaggaggcctatatactgttcgtccggaaaaatgctattgtagtgttgatacctaaatatggactagaagggaccgtctttttcgaggaaaaagacaagccgaacccgcagctcatctacgatgacgaaattccaagcctcaaaattgaggatacagtgtttcatgtgtttgataaggttaaggtgaagattatgcttgattcatcgaatctgcagcaccagaagattaggatgagccttgtcgagcctcaaattcctggtataagcatcccgactgacacttcaaatatggaccttaatgggcctaagaagaaaaagatgaaactagggaagtag

SEQ ID NO: 183380 - DNA, 2391 bp, Artificial Sequence
  derived and/or modified sequence
atgagtgcagataatcagttgcaagtcatctttatcacgaacgatcgcaggaataaggagaaggctatcgaggaaggaataccggctttcacatgcgaagagtatgtaaagtcattaacagcaaacccggagcttatagataggttggcttgcctatcagaggagggtaatgaaattgagagcgggaaaattatttttagcgagcatcttcccctatccaaactacagcaaggcatcaagtccgggacatatcttcagggaacctttagggccagtagagagaactacctggaggctactgtgtggattcacggcgacaatgaggaaaataaggagatcatcctgcaggggttaaagcacctgaaccgggcagtgcacgaggacatagttgccgtcgagctgttgcccaaatcacaatgggtcgccccaagcagcgtcgttctccatgacgagggccagaacgaggaagacgtggaaaaagaggaggagaccgagcgaatgctgaagactgctgtgtcagaaaagatgttgaaaccgacaggacgagtggtcggcattatcaaaaggaactggcgcccatactgtggtatgctgtcgaaatctgatataaaggagagccgaaggcatttgttcacccctgccgacaaaagaataccgcgaattcggattgagactcgacaggcatcaacgttagaggggaggcgaatcattgtggctatcgatgggtggcctcgtaattcacgctatcccaatgggcattttgtaagaaaccttggcgacgtcggagaaaaagaaactgagaccgaggtgctgctgctagagcatgacgttccccatcagcccttcagccaggccgtgctttctttcctccccaagatgccatggtccatcacagaaaaagatatgaagaatcgtgaggatttgaggcacttgtgtatatgctccgtagacccaccaggctgtactgacatagacgacgccttgcattgcagagaacttgagaacggcaatctagaggtgggcgtgcacatagctgatgtgagccacttcattagacctggtaacgccctggatcaagagtccgccagaagggggacgactgtttacttgtgtgaaaaaagaatcgacatggtgccagaactcctgtcgtctaacctgtgcagtctgaagtgtgatgtagatcgcctggccttctcctgcatctgggaaatgaatcacaacgccgagatactgaaaactaaattcacaaaatcggttatcaactctaaggcaagtctgacctacgccgaggcccagcttaggatcgattctgcaaacatgaacgacgacattactacatctctgagaggactgaataaactcgccaaaattctgaagaaacgacgaattgagaagggagccctgaccctttcttctcctgaggtgcgatttcacatggattcagagacgcatgaccccattgatctccaaactaaagaactgcgggagacaaatagcatggtcgaagaatttatgttgttggctaatatctccgtcgccaaaaaaattcatgaggagttcagcgaacacgcgctgctgcgcaaacatcctgccccaccaccttcaaattacgagatattagtaaaagctgccaggagccgcaacttagagatcaaaactgatacagcaaaaagtctcgccgaatcgttagatcaggccgagtcccccaccttcccctatcttaatacacttctgaggattctggcaacccggtgcatgatgcaagcagtgtatttctgcagcggaatggacaacgactttcatcactacggtctagctagtcccatctatactcattttacctcacctatccgtcggtatgccgatgtgatcgtgcatcgactgctcgctgttgctatcggtgccgattgtacgtaccctgaactgacagataagcataaactggccgatatctgcaaaaatctcaatttcagacacaaaatggcacagtatgcgcagagggcatccgtagccttccacacacaattattctttaagtcaaagggaattgtttctgaggaggcttatatcctatttgtgaggaagaacgctattgtggtgctgatccccaaatatgggctggaaggtacagttttcttcgaggaaaaggacaaacccaatccgcaactgatctatgacgacgagatcccgagcttgaaaatcgaggacacagtgtttcacgtcttcgataaagtcaaagtgaagattatgcttgacagctctaatctgcagcatcaaaaaattagaatgtcgctggtggaacctcagattcccggaatcagcatacccaccgatacaagcaacatggatctcaatggccctaagaagaaaaagatgaagcttggcaaatag

SEQ ID NO: 183381 - DNA, 2877 bp, Artificial Sequence
  derived and/or modified sequence
atgctgaagagcaagaccttcctgaagaagaccagagccggcggcgtgatgaagatcgtgagagagcactacctgagagacgacatcggctgcggcgcccccggctgcgccgcctgcggcggcgcccacgagggccccgccctggagccccagccccaggaccccgccagcagcgtgtgcccccagccccactacctgctgcccgacaccaacgtgctgctgcaccagatcgacgtgctggaggaccccgccatcagaaacgtgatcgtgctgcagaccgtgctgcaggaggtgagaaacagaagcgcccccgtgtacaagagaatcagagacgtgaccaacaaccaggagaagcacttctacaccttcaccaacgagcaccacagagagacctacgtggagcaggagcagggcgagaacgccaacgacagaaacgacagagccatcagagtggccgccaagtggtacaacgagcacctgaagaagatgagcgccgacaaccagctgcaggtgatcttcatcaccaacgacagaagaaacaaggagaaggccatcgaggagggcatccccgccttcacctgcgaggagtacgtgaagagcctgaccgccaaccccgagctgatcgacagactggcctgcctgagcgaggagggcaacgagatcgagagcggcaagatcatcttcagcgagcacctgcccctgagcaagctgcagcagggcatcaagagcggcacctacctgcagggcaccttcagagccagcagagagaactacctggaggccaccgtgtggatccacggcgacaacgaggagaacaaggagatcatcctgcagggcctgaagcacctgaacagagccgtgcacgaggacatcgtggccgtggagctgctgcccaagagccagtgggtggcccccagcagcgtggtgctgcacgacgagggccagaacgaggaggacgtggagaaggaggaggagaccgagagaatgctgaagaccgccgtgagcgagaagatgctgaagcccaccggcagagtggtgggcatcatcaagagaaactggagaccctactgcggcatgctgagcaagagcgacatcaaggagagcagaagacacctgttcacccccgccgacaagagaatccccagaatcagaatcgagaccagacaggccagcaccctggagggcagaagaatcatcgtggccatcgacggctggcccagaaacagcagataccccaacggccacttcgtgagaaacctgggcgacgtgggcgagaaggagaccgagaccgaggtgctgctgctggagcacgacgtgccccaccagcccttcagccaggccgtgctgagcttcctgcccaagatgccctggagcatcaccgagaaggacatgaagaacagagaggacctgagacacctgtgcatctgcagcgtggacccccccggctgcaccgacatcgacgacgccctgcactgcagagagctggagaacggcaacctggaggtgggcgtgcacatcgccgacgtgagccacttcatcagacccggcaacgccctggaccaggagagcgccagaagaggcaccaccgtgtacctgtgcgagaagagaatcgacatggtgcccgagctgctgagcagcaacctgtgcagcctgaagtgcgacgtggacagactggccttcagctgcatctgggagatgaaccacaacgccgagatcctgaagaccaagttcaccaagagcgtgatcaacagcaaggccagcctgacctacgccgaggcccagctgagaatcgacagcgccaacatgaacgacgacatcaccaccagcctgagaggcctgaacaagctggccaagatcctgaagaagagaagaatcgagaagggcgccctgaccctgagcagccccgaggtgagattccacatggacagcgagacccacgaccccatcgacctgcagaccaaggagctgagagagaccaacagcatggtggaggagttcatgctgctggccaacatcagcgtggccaagaagatccacgaggagttcagcgagcacgccctgctgagaaagcaccccgcccccccccccagcaactacgagatcctggtgaaggccgccagaagcagaaacctggagatcaagaccgacaccgccaagagcctggccgagagcctggaccaggccgagagccccaccttcccctacctgaacaccctgctgagaatcctggccaccagatgcatgatgcaggccgtgtacttctgcagcggcatggacaacgacttccaccactacggcctggccagccccatctacacccacttcaccagccccatcagaagatacgccgacgtgatcgtgcacagactgctggccgtggccatcggcgccgactgcacctaccccgagctgaccgacaagcacaagctggccgacatctgcaagaacctgaacttcagacacaagatggcccagtacgcccagagagccagcgtggccttccacacccagctgttcttcaagagcaagggcatcgtgagcgaggaggcctacatcctgttcgtgagaaagaacgccatcgtggtgctgatccccaagtacggcctggagggcaccgtgttcttcgaggagaaggacaagcccaacccccagctgatctacgacgacgagatccccagcctgaagatcgaggacaccgtgttccacgtgttcgacaaggtgaaggtgaagatcatgctggacagcagcaacctgcagcaccagaagatcagaatgagcctggtggagccccagatccccggcatcagcatccccaccgacaccagcaacatggacctgaacggccccaagaagaagaagatgaagctgggcaagtag

SEQ ID NO: 183382 - DNA, 2391 bp, Artificial Sequence
  derived and/or modified sequence
atgagcgccgacaaccagctgcaggtgatcttcatcaccaacgacagaagaaacaaggagaaggccatcgaggagggcatccccgccttcacctgcgaggagtacgtgaagagcctgaccgccaaccccgagctgatcgacagactggcctgcctgagcgaggagggcaacgagatcgagagcggcaagatcatcttcagcgagcacctgcccctgagcaagctgcagcagggcatcaagagcggcacctacctgcagggcaccttcagagccagcagagagaactacctggaggccaccgtgtggatccacggcgacaacgaggagaacaaggagatcatcctgcagggcctgaagcacctgaacagagccgtgcacgaggacatcgtggccgtggagctgctgcccaagagccagtgggtggcccccagcagcgtggtgctgcacgacgagggccagaacgaggaggacgtggagaaggaggaggagaccgagagaatgctgaagaccgccgtgagcgagaagatgctgaagcccaccggcagagtggtgggcatcatcaagagaaactggagaccctactgcggcatgctgagcaagagcgacatcaaggagagcagaagacacctgttcacccccgccgacaagagaatccccagaatcagaatcgagaccagacaggccagcaccctggagggcagaagaatcatcgtggccatcgacggctggcccagaaacagcagataccccaacggccacttcgtgagaaacctgggcgacgtgggcgagaaggagaccgagaccgaggtgctgctgctggagcacgacgtgccccaccagcccttcagccaggccgtgctgagcttcctgcccaagatgccctggagcatcaccgagaaggacatgaagaacagagaggacctgagacacctgtgcatctgcagcgtggacccccccggctgcaccgacatcgacgacgccctgcactgcagagagctggagaacggcaacctggaggtgggcgtgcacatcgccgacgtgagccacttcatcagacccggcaacgccctggaccaggagagcgccagaagaggcaccaccgtgtacctgtgcgagaagagaatcgacatggtgcccgagctgctgagcagcaacctgtgcagcctgaagtgcgacgtggacagactggccttcagctgcatctgggagatgaaccacaacgccgagatcctgaagaccaagttcaccaagagcgtgatcaacagcaaggccagcctgacctacgccgaggcccagctgagaatcgacagcgccaacatgaacgacgacatcaccaccagcctgagaggcctgaacaagctggccaagatcctgaagaagagaagaatcgagaagggcgccctgaccctgagcagccccgaggtgagattccacatggacagcgagacccacgaccccatcgacctgcagaccaaggagctgagagagaccaacagcatggtggaggagttcatgctgctggccaacatcagcgtggccaagaagatccacgaggagttcagcgagcacgccctgctgagaaagcaccccgcccccccccccagcaactacgagatcctggtgaaggccgccagaagcagaaacctggagatcaagaccgacaccgccaagagcctggccgagagcctggaccaggccgagagccccaccttcccctacctgaacaccctgctgagaatcctggccaccagatgcatgatgcaggccgtgtacttctgcagcggcatggacaacgacttccaccactacggcctggccagccccatctacacccacttcaccagccccatcagaagatacgccgacgtgatcgtgcacagactgctggccgtggccatcggcgccgactgcacctaccccgagctgaccgacaagcacaagctggccgacatctgcaagaacctgaacttcagacacaagatggcccagtacgcccagagagccagcgtggccttccacacccagctgttcttcaagagcaagggcatcgtgagcgaggaggcctacatcctgttcgtgagaaagaacgccatcgtggtgctgatccccaagtacggcctggagggcaccgtgttcttcgaggagaaggacaagcccaacccccagctgatctacgacgacgagatccccagcctgaagatcgaggacaccgtgttccacgtgttcgacaaggtgaaggtgaagatcatgctggacagcagcaacctgcagcaccagaagatcagaatgagcctggtggagccccagatccccggcatcagcatccccaccgacaccagcaacatggacctgaacggccccaagaagaagaagatgaagctgggcaagtag

SEQ ID NO: 183383 - DNA, 7371 bp, Artificial Sequence
  derived and/or modified sequence
ggaatggaaagggaagaacctccggggttaggcgtattctagattgacgccttttgctggaagagcgctgctggggttaggattctgcgcggcgaggcaagatgctcaagtccaagacgttcttaaaaaagacccgggcgggcggcgtgatgaagatcgtgcgcgagcactacctgcgagacgacatcggctgcggtgcgcccgggtgcgcagcgtgtggaggggcgcacgaggggccggccctggagccgcagccccaggacccggcgagcagcgtctgcccgcaaccgcactacttgctgcccgacactaatgtgttactgcaccagattgatgttcttgaggaccctgccatcaggaatgtaattgtgctacaaacagttcttcaagaagtgagaaatcgcagtgcccccgtatataaacgcatccgagatgtgactaataaccaagagaagcatttctatactttcactaatgagcaccatagagaaacctatgtagaacaagaacagggagaaaatgctaatgacaggaatgatagagcgattcgagtagcagcaaaatggtacaatgaacatttgaaaaaaatgtcagcagacaaccagctgcaagttatcttcataacaaatgacaggagaaacaaagagaaagccatagaagaaggaataccagctttcacttgtgaagaatatgtaaagagcctaactgctaaccccgaactcatagatcgtcttgcttgtttgtctgaagaagggaatgaaatagaaagtggaaaaataatattttcagagcatcttcccttaagtaagctacagcaaggcataaaatctggtacataccttcaaggaacatttagagctagcagggaaaattacttggaagctacagtatggattcatggcgacaatgaagaaaataaagagataatcttacagggacttaaacatttaaacagagctgttcacgaagatattgtggctgtggagcttctccccaagagtcagtgggtagcaccatcttctgtggttttacatgatgaaggtcaaaatgaagaagatgtggagaaagaagaagagacagaacgaatgcttaagactgctgtaagcgagaaaatgttgaagcctacaggtagagttgtaggaataataaaaaggaattggagaccatattgtggcatgctttccaagtctgacattaaggagtcaagaagacatctctttacacctgctgataagagaatccctcgaattcgcatagaaaccagacaggcttccacattagaaggacggagaattattgttgctattgatggttggcccagaaattccagatatccaaatggacactttgtgagaaatttaggtgatgttggagagaaagagactgaaacagaagttttgttacttgaacacgatgttccccatcagcctttttcacaggctgttcttagttttctgccaaagatgccctggagcattactgaaaaggacatgaaaaaccgagaagacctgaggcatctgtgtatttgtagtgtagacccaccaggatgtactgatatagacgatgctctacattgtcgagaactcgaaaatggaaatttggaggttggtgttcatattgctgatgtgagccattttattaggccaggaaatgccttggatcaagaatcagccagaagaggaacaactgtgtatctttgtgaaaagaggattgacatggttccagagttgcttagctctaacttgtgttccttaaaatgtgacgtggacaggctggcattttcatgtatttgggaaatgaatcacaatgctgaaatcttaaaaacgaagtttaccaaaagtgttattaattcaaaggcatctctgacgtatgctgaagctcagttgagaattgattcagcaaacatgaatgatgatattaccactagtctccgtggactgaataaactagccaaaattctgaagaaaagaaggattgaaaaaggggctttgactctatcctctcctgaagttcgattccacatggacagtgaaactcacgatcctatagatctgcagaccaaggaacttagggaaacaaattccatggttgaagaatttatgttacttgccaatatttctgttgcaaaaaaaattcatgaggaattttctgaacatgctctgcttcgaaaacatcctgctccacctccatcaaattatgaaattcttgttaaggcagccaggtcaaggaatttggaaattaagactgatacagccaagtctttggctgagtctttggatcaggccgaatctcctacttttccatatctaaacactctgttgagaatattagccactcgctgtatgatgcaagctgtgtacttctgttctggaatggataatgattttcatcactatggcttagcgtctccaatatacacacattttacttcacccattagaagatacgcagatgtcattgttcatcggcttttggctgtggctattggggctgactgtacttatccagagttgacagacaaacacaagcttgcagatatatgtaaaaatctaaatttccggcacaaaatggctcaatatgcccaacgtgcatcagtggcttttcatacccagttattcttcaaaagcaaaggaatagtaagtgaagaagcctatattttatttgtaagaaagaatgccattgtggtattaattccaaagtatggtttagaagggacagtcttttttgaagaaaaggacaaaccaaacccacagcttatttatgatgatgagataccctcacttaaaatagaagatacagtgttccatgtatttgataaagttaaagtgaaaatcatgttagactcatctaatcttcaacatcagaagatccgaatgtccctggtagaaccacagataccaggaataagcattcctactgatacttcaaacatggaccttaatggaccaaagaaaaagaagatgaagcttggaaaatagctatattcaacaaaaatcttcaaagactggtttcttttttaaaagaaaaaacttgaaagaacacttctaagcctaagtgtgtgatacagtttgttacttttaagtacattttaataatttcagacatctgcatttttattgaacagttgactgtatctgacccatcatactactatacttctgggttgaacagaattatttatgcagaataattcaattgaatatccatcacttaaatacagtgacaggacagcaacttcagggatctgtaaagatcatttaaatggagtgctcatctcattgaggagcagattaattttgcgtaagtactttgattatttaatatttgtaagaaaaaactttcattttcctacagaggaaaatagaacaattttagaagcaaggaacaatctcttttctaagtcttggaagctgtcagtgttgaggatgtaatctcctttgccatctttaattcacctaacttacactaggtgttctcttactgtctttaaaagcttcctgtattttattagtggtccttgaaaaactgtgaatgtttgggaattggtagaaaggcaaaaagtaggatattttgacctgactggaaagatggttgtgtttttattgccaggtaataagtgtgatcattgttgaacttcagctccagtgtctctccagaataagacattggcattcaaatgtctatatcttgttacttacaaaataaaaaacagattaattagtggcttttaaattgtagttatatcagtgtatatacacgaggggaactgtataaagacatactaaagggaacagattaaaataagtattattaataaaatttggtgtgccagactgactacttcccttgctaatcacagagattagtaatgattaaattaatatcttcaggaatattttgggatagggttgccttaaaacattttacttggcttattcaatttctaaagcacttacgttgtgccaggttccactcaagtaaattatctctgccttcaaggagcttgcagtatagtgagaaaagcctgccaagtaaatcagcaggtatactaaataggtagtcatttaggcactcaataaatgttgactaatttttccagtttcctattactgaggaaaacctccatacactgaggcagaaacttgtgtcagttggaggaaaatagacttgagtagtctttggtccaggtaaaatgggtcagtgacactgaaacagtagagtaggagtcaaaaaaccttttctgtgaagtgctagaacattttagactttgttggctatggtctgtattgcaactatagtacacaactctgccgttgatagtgtgtaaggagccatatacaatatgtaaacaaatcaacatgactgtgtttcaacaaggcctgatttgttaagtttcatatatagtcatatgtcacttaatgacagggatatgttctgagacatgtcacttggcaatttcatcattgtgtgaaaatcatgatgtagttacacaaacctagatggtataccctatggtatcctatatgggatagcctattgctcctaacctacaaacctgtatggcatattactgtactgattactgtaggcggttgtaacacagtgctaagtatttgtgtatctaaacatatctaaacatagaaaaggtacagtaaaaatatatatatagatatatataagatataaaatggtacacctatttaggacatttaccatgaacaagttggcaggactggaagctggctctgggtgagtcagtaagtggttagtgaatgtgaaggccatgatattactgtgcactactgtagacttttataaacactatatacttaggctacataaagtaatttcactatgatgttaccatggctgtgtccccaggcaataggaatttttcagctccattgtaatcttacgggatcatcatcgtatatttggccattgttgaccaaaagttatgcagcacatcattataattttgatgtgtcacaaaacattactcatttgatttcccccacccccgccaaccatttaaaaaagtttgccggctaggtgcggtggctcatgcctgtaatcctagcattttgggaggacgaggcgggtggatcactcgatgtcaggagtttgagaccagcctggccaacatggtaaaacgccgtctctactaaaaatacaaaaacttagctgggtgtaacggcggatgcctgtaatcccagctacttgggaggctgaggcaggagaatcgcttgaacctgggaggcggaagttgcagtgagccgagattgcaccactgcagttcagcctggatgatgagagtgagactccatcgcaaaaaaaaaaaaaaaaaaagaaaagaaaattagccaggtgtggtggcaagtgcctttaatcccacctcaggaggctgaggcaggagaatcgcttgaacctgggaggcagaggttgcagtgagccaagatcgcgccactgcactccagcctgggtgacagaacaagactgtctcaaaaaaaaaaaaagagaagaaaaactgcctacaggccatagttaacctgcaatagagaagaaagggaagtagggcagtgcatgactggccttaggttttttctttccaagtttattttcttgtgcttcagctactagaaaggtttaattcagggataagtcccaattgagtagttcaagatgatcagagactttgctattttcccctaagttctattccataatctaaaatgttctgtttctagtgccagttcttatgctaagcaggttacgtggaatatatcacttaactcaaaaagccctgttaagccaggactgttatctccatttaacagatgagaaaatggaggtttatggtctgttctcacactgctacgaagaaataccccaaactgggtaattattataaaggaaagaggtttaatggactcagttccgcattgctggtgaggcctcaggacacttacacaatcatggcagaaaaaggagaagcaggcacctttttcacagggcggcaggatgaaaatgactgccagcagtggaaatgccagacgcttataaaaccttcagatctcatgagaccggctcactatcacaggaacagcatggaggaaaccgcccccatgatccagttacctccacctggtcccacccttgacacgtggggattgctacaattcaaggttagatttgggtgaggacacagagccataccatatcagcccagatcaagtagtgacagagtagggatttgaatacaggttatagtcactattgtgttatttcttgacttttgtactattaaaaaactgtagccagtgaggcttctacccttagtacccagaactccttttaggtatagcaattgtttttaggtaaatttatattgagtttaacacctgtgtgattaaagacaactttccaatgtagtatctgtagccatgtcccctaatggctattagtgttcatggttagtgtgttgaagatgagccaggtacataacgcggcacattttctgcaggtcagcagtaaggtttcaaggtacagttatggaggaaagaagaaaatgacacattgataacacaggtctttattcccttttgaatgagacagtttttaaaagttgatttataaatacaaaaatacattctccaaagatagtatttccaaactgttatatacccatctactcccaacatggatataagttttttaaaaaaatagttgtatataacatacatatctgccccagtgttacttcacaggcctatgccctacgggaactccactctcccagccccactttttctcttggttctcccacattcttattctcccacatccctacccacgtttgagctggaaaggatgtccctaccctaggcatgaggtatattttattctgggcaccacacatttgccccatagataacaatacacgtgatgatgtcactagtactacctttctagtatttacatacttaaaagtagtaactagaacagttatcactggaactaagaattttccccacagaggtgaacagaccaagaactaaaatttcaggaaacctgtttaatttcttttgtatctttgaaaagttagttttatatctaagatttcttcacataggttataattcatctgtatgttcaagcttttatgtaaaaatatatagtgccttcagttttaacatagtttcacatgttctcagaactgctaaattcagtgctaccagtaaggcttaataagtagttcattgaccctgtaagataggagcactcagctctgtcacaatttgttgttaaacacatcactcaatgtaagtataaaaatatttattgataaaaaataaacttataattcagcaa

SEQ ID NO: 183384 - DNA, 3651 bp, Artificial Sequence
  derived and/or modified sequence
gtgaggtggcgtccagaaggaagccccgcctaggccacgggcggaaatggctcctcgccttgctttgccgcccctccccactctcgcccaatccccgcggccgtcagagagccaaccaatgtttatctcggcattttcccgcgagaagtgttactaatatccgggaatggaaagggaagaacctccggggttaggcgtattctagattgacgccttttgctggaagagcgctgctggggttaggattctgcgcggcgaggcaagatgctcaagtccaagacgttcttaaaaaagacccgggcgggcggcgtgatgaagatcgtgcgcgagcactacctgcgagacgacatcggctgcggtgcgcccgggtgcgcagcgtgtggaggggcgcacgaggggccggccctggagccgcagccccaggacccggcgagcagcgtctgcccgcaaccgcactacttgctgcccgacactaatgtgttactgcaccagattgtaagtgcctggaggccggggacctgggcttctgtggcctccagcctgcgactcccaggcagcttattgatgttcttgaggaccctgccatcaggaatgtaattgtgctacaaacagttcttcaagaagtgagaaatcgcagtgcccccgtatataaacgcatccgagatgtgactaataaccaagagaagcatttctatactttcactaatgagcaccatagagaaacctatgtagaacaagaacagggagaaaatgctaatgacaggaatgatagagcgattcgagtagcagcaaaatggtacaatgaacatttgaaaaaaatgtcagcagacaaccagctgcaagttatcttcataacaaatgacaggagaaacaaagagaaagccatagaagaaggaataccagctttcacttgtgaagaatatgtaaagagcctaactgctaaccccgaactcatagatcgtcttgcttgtttgtctgaagaagggaatgaaatagaaagtggaaaaataatattttcagagcatcttcccttaagtaagctacagcaaggcataaaatctggtacataccttcaaggaacatttagagctagcagggaaaattacttggaagctacagtatggattcatggcgacaatgaagaaaataaagagataatcttacagggacttaaacatttaaacagagctgttcacgaagatattgtggctgtggagcttctccccaagagtcagtgggtagcaccatcttctgtggttttacatgatgaaggtcaaaatgaagaagatgtggagaaagaagaagagacagaacgaatgcttaagactgctgtaagcgagaaaatgttgaagcctacaggtagagttgtaggaataataaaaaggaattggagaccatattgtggcatgctttccaagtctgacattaaggagtcaagaagacatctctttacacctgctgataagagaatccctcgaattcgcatagaaaccagacaggcttccacattagaaggacggagaattattgttgctattgatggttggcccagaaattccagatatccaaatggacactttgtgagaaatttaggtgatgttggagagaaagagactgaaacagaagttttgttacttgaacacgatgttccccatcagcctttttcacaggctgttcttagttttctgccaaagatgccctggagcattactgaaaaggacatgaaaaaccgagaagacctgaggcatctgtgtatttgtagtgtagacccaccaggatgtactgatatagacgatgctctacattgtcgagaactcgaaaatggaaatttggaggttggtgttcatattgctgatgtgagccattttattaggccaggaaatgccttggatcaagaatcagccagaagaggaacaactgtgtatctttgtgaaaagaggattgacatggttccagagttgcttagctctaacttgtgttccttaaaatgtgacgtggacaggctggcattttcatgtatttgggaaatgaatcacaatgctgaaatcttaaaaacgaagtttaccaaaagtgttattaattcaaaggcatctctgacgtatgctgaagctcagttgagaattgattcagcaaacatgaatgatgatattaccactagtctccgtggactgaataaactagccaaaattctgaagaaaagaaggattgaaaaaggggctttgactctatcctctcctgaagttcgattccacatggacagtgaaactcacgatcctatagatctgcagaccaaggaacttagggaaacaaattccatggttgaagaatttatgttacttgccaatatttctgttgcaaaaaaaattcatgaggaattttctgaacatgctctgcttcgaaaacatcctgctccacctccatcaaattatgaaattcttgttaaggcagccaggtcaaggaatttggaaattaagactgatacagccaagtctttggctgagtctttggatcaggccgaatctcctacttttccatatctaaacactctgttgagaatattagccactcgctgtatgatgcaagctgtgtacttctgttctggaatggataatgattttcatcactatggcttagcgtctccaatatacacacattttacttcacccattagaagatacgcagatgtcattgttcatcggcttttggctgtggctattggggctgactgtacttatccagagttgacagacaaacacaagcttgcagatatatgtaaaaatctaaatttccggcacaaaatggctcaatatgcccaacgtgcatcagtggcttttcatacccagttattcttcaaaagcaaaggaatagtaagtgaagaagcctatattttatttgtaagaaagaatgccattgtggtattaattccaaagtatggtttagaagggacagtcttttttgaagaaaaggacaaaccaaacccacagcttatttatgatgatgagataccctcacttaaaatagaagatacagtgttccatgtatttgataaagttaaagtgaaaatcatgttagactcatctaatcttcaacatcagaagatccgaatgtccctggtagaaccacagataccaggaataagcattcctactgatacttcaaacatggaccttaatggaccaaagaaaaagaagatgaagcttggaaaatagctatattcaacaaaaatcttcaaagactggtttcttttttaaaagaaaaaacttgaaagaacacttctaagcctaagtgtgtgatacagtttgttacttttaagtacattttaataatttcagacatctgcatttttattgaacagttgactgtatctgacccatcatactactatacttctgggttgaacagaattatttatgcagaataattcaattgaatatccatcacttaaatacagtgacaggacagcaacttcagggatctgtaaagatcatttaaatggagtgctcatctcattgaggagcagattaattttgcgtaataagtgtgatcattgttgaacttcagctccagtgtctctccagaataagacattggcattcaaatgtctatatcttgttacttacaaaataaaaaacagattaattagtggctttt

SEQ ID NO: 183385 - protein, 645 aa, Artificial Sequence
  derived and/or modified sequence
MTDTVFSNSSNRWMYPSDRPLQSKLKDRRLVDRLENMRKNVAGDGVNRCILCGEQLGMLGSACVVCEDCKKNVCTKCGVETNNRLHSVWLCKICIEQREVWKRSGAWFFKGFPKQVLPQPMPIKKTKPQQPVSEPAAPEQPAPEPKHPARAPARGDSEDRRGPGQKTGPDPASAPGRGNYGPPVRRASEARMSSSSRDSESWDHSGGAGDSSRSPAGLRRANSVQASRPAPGSVQSPAPPQPGQPGTPGGSRPGPGPAGRFPDQKPEVAPSDPGTTAPPREERTGGVGGYPAVGAREDRMSHPSGPYSQASAAAPQPAAARQPPPPEEEEEEANSYDSDEATTLGALEFSLLYDQDNSSLQCTIIKAKGLKPMDSNGLADPYVKLHLLPGASKSNKLRTKTLRNTRNPIWNETLVYHGITDEDMQRKTLRISVCDEDKFGHNEFIGETRFSLKKLKPNQRKNFNICLERVIPMKRAGTTGSARGMALYEEEQVERVGDIEERGKILVSLMYSTQQGGLIVGIIRCVHLAAMDANGYSDPFVKLWLKPDMGKKAKHKTQIKKKTLNPEFNEEFFYDIKHSDLAKKSLDISVWDYDIGKSNDYIGGCQLGISAKGERLKHWYECLKNKDKKIERWHQLQNENHVSSD

SEQ ID NO: 183386 - protein, 690 aa, Artificial Sequence
  derived and/or modified sequence
MTDTVFSNSSNRWMYPSDRPLQSKLQAGWSVHPGGQPDRQRKQEELTDEEKEIINRVIARAEKMEEMEQERIGRLVDRLENMRKNVAGDGVNRCILCGEQLGMLGSACVVCEDCKKNVCTKCGVETNNRLHSVWLCKICIEQREVWKRSGAWFFKGFPKQVLPQPMPIKKTKPQQPVSEPAAPEQPAPEPKHPARAPARGDSEDRRGPGQKTGPDPASAPGRGNYGPPVRRASEARMSSSSRDSESWDHSGGAGDSSRSPAGLRRANSVQASRPAPGSVQSPAPPQPGQPGTPGGSRPGPGPAGRFPDQKPEVAPSDPGTTAPPREERTGGVGGYPAVGAREDRMSHPSGPYSQASAAAPQPAAARQPPPPEEEEEEANSYDSDEATTLGALEFSLLYDQDNSSLQCTIIKAKGLKPMDSNGLADPYVKLHLLPGASKSNKLRTKTLRNTRNPIWNETLVYHGITDEDMQRKTLRISVCDEDKFGHNEFIGETRFSLKKLKPNQRKNFNICLERVIPMKRAGTTGSARGMALYEEEQVERVGDIEERGKILVSLMYSTQQGGLIVGIIRCVHLAAMDANGYSDPFVKLWLKPDMGKKAKHKTQIKKKTLNPEFNEEFFYDIKHSDLAKKSLDISVWDYDIGKSNDYIGGCQLGISAKGERLKHWYECLKNKDKKIERWHQLQNENHVSSD

SEQ ID NO: 183387 - DNA, 1938 bp, Artificial Sequence
  derived and/or modified sequence
atgactgataccgtgttcagtaattcctccaataggtggatgtaccccagcgataggcccctacagagtaagctaaaggaccggaggttagtggatcgtcttgaaaatatgaggaagaacgttgcaggagatggcgtgaaccgttgcatcctgtgtggtgagcagctcgggatgttggggtcagcttgcgtggtttgcgaagattgtaagaaaaatgtgtgtacaaagtgtggtgtggagaccaataataggctgcactcagtttggctctgtaaaatctgtatcgaacagcgggaagtctggaaaagatctggtgcctggtttttcaaggggtttccaaaacaggtcctgccccagccgatgcccatcaaaaagaccaagccacagcaaccagtgtcagaaccagcggctcccgagcagcctgcaccagagcccaagcatccggcccgagctcccgctagaggggattctgaagatcggaggggtcccgggcagaaaacaggtcccgaccctgcctcagcccctggacgcgggaactatggccccccagtgagacgcgcatccgaagctaggatgtcatcctctagcagggacagcgaatcttgggaccacagcgggggggccggagattcgtcgcgcagtcctgccggattaagaagagcaaactccgttcaggcctccagacccgctccaggttctgtccagtcacccgccccaccccagcccggccagccaggcacaccagggggcagccgcccgggacccgggcccgcgggaaggttcccagatcaaaaacccgaggttgccccgtccgaccccggcaccaccgctcctccaagggaggaacggacaggaggcgtcgggggataccccgccgtcggcgcccgggaggacagaatgagccatccatccggcccatattcccaagccagcgctgctgctccccagccagccgcagctcggcagcctcctccccccgaggaggaagaagaggaggcgaactcatacgacagtgatgaagcaaccaccctgggagctctggagttctctttgctctatgaccaagacaactcctctttgcagtgtactattatcaaagctaagggactcaaaccaatggactccaacgggcttgccgatccctacgtgaagttgcacctactccctggcgcatcaaagtccaacaaactgagaaccaaaactttgagaaacactagaaatccgatttggaacgaaaccctagtgtaccacgggattacagatgaggacatgcaaagaaagaccttaagaataagtgtgtgcgatgaggacaagtttggacacaacgagtttatcggtgagaccaggttttctctgaagaaactgaagccaaatcaacgtaagaactttaacatttgcctggagcgggtcatacctatgaagcgggcaggtacgactggcagcgcccgggggatggcgctgtatgaggaagaacaggtggaaagggtgggggatattgaagagcgcgggaaaatcctggtgtctttaatgtattcaactcagcagggcggacttattgtcggaattatcagatgcgtccatctagcggctatggacgctaatgggtattcagacccattcgttaaactctggctgaaaccagatatggggaaaaaggcgaagcataagacccaaatcaagaagaaaacgcttaaccccgaattcaacgaggagttcttttatgacataaagcactctgatttggcgaagaaaagtctggatatatccgtatgggactacgacatcggcaagtccaatgattacatcggcggctgtcagctgggcatttctgcaaaaggcgaacggctcaagcattggtacgagtgtctgaagaacaaggataagaaaatcgagagatggcatcagctgcagaatgaaaaccacgtttcttctgactag

SEQ ID NO: 183388 - DNA, 2073 bp, Artificial Sequence
  derived and/or modified sequence
atgacagacactgtgttctctaacagctctaaccgctggatgtatccttctgatcgcccccttcaatcaaagctgcaggcaggctggagcgtgcacccaggcggtcagcccgacagacagagaaaacaggaagagctgacagacgaagaaaaggaaatcattaaccgcgtcatcgcccgcgcagagaaaatggaagaaatggagcaggaaagaataggcaggctggtggaccggctggagaacatgagaaagaacgtggcaggcgatggggtgaacaggtgtatcctatgcggagagcaactgggcatgctcggcagtgcctgcgtagtatgtgaagattgtaagaaaaatgtgtgcactaagtgcggagtggaaacaaacaaccgactccattccgtctggctgtgtaaaatttgcatcgaacagagagaggtttggaaacgatccggagcctggttttttaagggcttcccaaagcaggtcctcccccagccgatgcccattaagaagactaaaccccagcagcctgtgtcggagcctgccgcgccagagcaacctgctccggagcccaagcatccggccagggcaccggcaagaggggattctgaggatcggcgcgggcccggccagaagactggtcctgaccccgcttctgcaccgggcagaggaaattacggacctcccgtgagaagggcaagtgaagcccggatgtcaagcagctctcgcgattcagagtcatgggaccactccggcggcgcgggcgacagtagccgttctcccgccggcctccggcgcgcaaattctgtgcaggcaagtcgcccagcccctggttctgtgcagtctccagctccgccccagcctggccagccgggtacacctggtggatcacgccccggaccagggcctgctgggcggttcccggaccaaaagccagaagttgcaccatcggaccctggtacaacggctcctccgcgagaggagagaaccggcggggtcggcggttatccggcggttggtgcaagggaggaccggatgagccatccttcagggccttatagccaggcgtccgccgctgccccacagccagccgcggcccgccagcctccccctccagaggaggaagaggaagaggcaaacagttacgactcagacgaggctactaccctgggcgctctcgagttcagcctgctctacgatcaagacaacagctctcttcaatgtactattattaaggcaaagggattaaagccaatggacagtaatgggctggctgacccatacgttaagctgcacttgctgccaggggccagtaagtccaataaacttcgaacaaagaccctgaggaacacacggaatcctatttggaacgagacactggtctatcatggaatcactgatgaagacatgcagcggaaaacattgcggattagcgtttgcgatgaggataagttcggccacaacgagttcatcggtgagacccgcttcagtctgaagaagctgaaacctaaccagaggaaaaattttaacatctgcctcgaaagagttatccccatgaagcgagcagggactaccggttcagcacgcggtatggctttatatgaagaggagcaggtcgaaagggtgggtgacatcgaagagagagggaagattctggtcagtctaatgtatagcacccagcagggtggtctgattgtgggaatcatcaggtgtgtacatttagccgcgatggatgctaacggctattccgatccctttgtcaagctgtggttgaagcccgacatgggaaagaaggctaagcacaagactcagattaagaaaaaaacactcaaccccgaattcaacgaagaatttttttacgacataaagcactcagaccttgccaaaaagagcctggacatctccgtctgggactatgacataggcaaaagcaatgactacattgggggctgccaacttggcatcagcgcgaagggggaacggctgaaacactggtacgagtgcctgaagaacaaggataagaaaattgaacgctggcatcagttacagaatgagaatcatgtgtcatcggattag

SEQ ID NO: 183389 - DNA, 1938 bp, Artificial Sequence
  derived and/or modified sequence
atgacagacaccgtcttcagcaacagcagcaaccgctggatgtaccccagcgaccggcccctgcagagcaagctgaaggaccggcggctggtggaccggctggagaacatgaggaagaatgtggccggagatggagtgaaccgctgcatcctgtgtggggagcagctgggcatgctgggcagcgcctgtgtggtgtgtgaggactgcaagaagaatgtgtgcaccaagtgtggggtggagaccaacaaccggctgcacagcgtgtggctgtgcaagatctgcatcgagcagcgggaggtgtggaagaggtctggggcctggttcttcaagggcttccccaagcaggtgctgccccagcccatgcccatcaagaagaccaagccccagcagcctgtgtctgagcctgctgcccctgagcagcctgcccctgagcccaagcacccagcccgggccccagcccggggggacagcgaggaccggcggggccctggccagaagacaggccctgaccctgccagcgcccctggccggggcaactacggcccccctgtgagaagagccagcgaggccaggatgagcagcagcagccgggacagcgagagctgggaccacagcggcggggccggggacagcagccgcagccctgctggcctgcggcgggccaacagcgtgcaggccagcaggcctgcccctggctctgtgcagagccctgccccaccccagcccggccagcccggcacccctgggggcagcaggcctggccctggccctgctggccgcttcccagaccagaagccagaggtggcccccagcgaccccggcaccacagccccaccccgggaggagaggactggaggagtgggcggctacccagctgtgggcgcccgggaggacaggatgagccaccccagcggcccctacagccaggccagcgctgctgccccccagcctgctgctgcccggcagcccccacctcctgaggaggaggaggaggaggccaacagctatgacagtgatgaggccaccaccctgggcgccctggagttcagcctgctgtatgaccaggacaacagcagcctgcagtgcaccatcatcaaggccaagggcctgaagcccatggacagcaatggcctggccgacccctacgtgaagctgcacctgctgcccggggccagcaagagcaacaagctgcggaccaagaccctgaggaacaccaggaaccccatctggaatgagaccctggtgtaccacggcatcacagatgaggacatgcagaggaagaccctgcgcatctctgtgtgtgatgaggacaagtttggccacaatgagttcatcggggagacccgcttcagcctgaagaagctgaagcccaaccagaggaagaacttcaacatctgcctggagagggtcatccccatgaagagagctggcaccactggaagtgcccggggcatggccctgtatgaggaggagcaggtggagcgggtgggggacatcgaggagcggggcaagatcctggtgtccctgatgtacagcacccagcagggcggcctgattgtgggcatcatccgctgtgtgcacctggccgccatggatgccaacggctacagcgacccctttgtgaagctgtggctgaagccagacatgggcaagaaggccaagcacaagacccagatcaagaagaagaccctgaaccctgagttcaatgaggagttcttctatgacatcaagcacagcgacctggccaagaagagcctggacatctctgtgtgggactatgacatcggcaagagcaatgactacatcggcggctgccagctgggcatcagcgccaagggggagcggctgaagcactggtatgaatgtctgaagaacaaggacaagaagattgagcgctggcaccagctgcagaatgaaaatcatgtgtccagtgactag

SEQ ID NO: 183390 - DNA, 2073 bp, Artificial Sequence
  derived and/or modified sequence
atgacagacaccgtcttcagcaacagcagcaaccgctggatgtaccccagcgaccggcccctgcagagcaagctgcaggccggctggagcgtgcaccctgggggccagcctgaccggcagaggaagcaggaggagctgacagatgaggagaaggagatcatcaacagagtcatcgcccgggcagagaagatggaggagatggagcaggagcgcatcggccgcctggtggaccggctggagaacatgaggaagaatgtggccggagatggagtgaaccgctgcatcctgtgtggggagcagctgggcatgctgggcagcgcctgtgtggtgtgtgaggactgcaagaagaatgtgtgcaccaagtgtggggtggagaccaacaaccggctgcacagcgtgtggctgtgcaagatctgcatcgagcagcgggaggtgtggaagaggtctggggcctggttcttcaagggcttccccaagcaggtgctgccccagcccatgcccatcaagaagaccaagccccagcagcctgtgtctgagcctgctgcccctgagcagcctgcccctgagcccaagcacccagcccgggccccagcccggggggacagtgaagatagaagaggccctggccagaagacaggccctgaccctgccagcgcccctggccggggcaactacggcccccctgtgcggcgggccagcgaggccaggatgagcagcagcagccgggacagcgagagctgggaccacagcggcggggccggggacagcagccgcagccctgctggcctgcggcgggccaacagcgtgcaggccagcaggcctgcccctggctctgtgcagagccctgccccaccccagcccggccagcccggcaccccaggcggcagccggcccggccctggccctgctggccgcttcccagaccagaagccagaggtggcccccagcgaccccggcaccacagccccaccccgggaggagaggactggaggagtgggcggctacccagctgtgggcgcccgggaggacaggatgagccaccccagcggcccctacagccaggccagcgctgctgccccccagcctgctgctgcccggcagcccccacctcctgaggaggaggaggaggaggccaacagctatgacagtgatgaggccaccaccctgggcgccctggagttcagcctgctgtatgaccaggacaacagcagcctgcagtgcaccatcatcaaggccaagggcctgaagcccatggacagcaatggcctggccgacccctacgtgaagctgcacctgctgcccggggccagcaagagcaacaagctgcggaccaagaccctgaggaacaccaggaaccccatctggaatgagaccctggtgtaccacggcatcacagatgaggacatgcagaggaagaccctgcgcatctctgtgtgtgatgaggacaagtttggccacaatgagttcatcggggagacccgcttcagcctgaagaagctgaagcccaaccagaggaagaacttcaacatctgcctggagagggtcatccccatgaagagagctggcaccaccggcagcgcccggggcatggccctgtatgaggaggagcaggtggagcgggtgggggacatcgaggagcggggcaagatcctggtgtccctgatgtacagcacccagcagggcggcctcatcgtgggcatcatccgctgtgtgcacctggccgccatggatgccaacggctacagcgacccctttgtgaagctgtggctgaagccagacatgggcaagaaggccaagcacaagacccagatcaagaagaagaccctgaaccctgagttcaatgaggagttcttctatgacatcaagcacagcgacctggccaagaagagcctggacatctctgtgtgggactatgacatcggcaagagcaatgactacatcggcggctgccagctgggcatcagcgccaagggggagcggctgaagcactggtatgagtgcctgaagaacaaggacaagaagattgagcgctggcaccagctgcagaatgaaaaccacgtgtccagtgactag

SEQ ID NO: 183391 - DNA, 1938 bp, Artificial Sequence
  derived and/or modified sequence
atgaccgacaccgtgttcagcaacagcagcaaccggtggatgtacccaagcgaccgccctctgcaaagcaagctaaaggaccggcggttggtggaccgattggaaaatatgcggaagaacgtcgcaggtgatggagtgaatcgttgtatcctctgcggcgagcagctaggaatgctggggagcgcttgcgtggtctgtgaggattgtaagaagaacgtgtgtacaaagtgcggagtggagaccaacaacagactgcactcggtttggctctgtaagatttgcattgaacagcgggaagtctggaagaggagcggagcgtggttcttcaaaggctttcctaagcaagtactacctcagcctatgcctataaaaaagacaaaaccccagcagcccgtctctgagcctgctgcccctgagcagcctgctccagaaccgaaacatccagcccgagctccagcccgcggcgactcagaggaccgccgcggacctggtcagaagactggccccgatcctgctagtgccccaggtcgcgggaactacggcccacctgtccgacgcgcaagcgaggcccgtatgagttccagcagtagggattccgagtcatgggatcatagcggcggagctggggatagctccagaagtccagcgggactcagacgagcaaatagtgttcaagcctcacgcccagcacctggctcagtgcagtccccggcaccccctcagcctggccagcccggcactcccgggggatcccgccccggtccaggccctgctggccgcttcccagatcagaaaccagaggtggccccctctgacccaggtacaaccgctccccctagagaagagcgaactggaggcgtcggggggtaccctgccgtgggcgcacgggaggacaggatgagtcacccatccggaccctattcacaggcttcggccgccgcgccgcagcctgccgctgcaagacagccgccacctcccgaggaggaggaggaagaagctaattcctacgattctgacgaggccactactctaggcgcgctggagttctctttactttacgaccaagacaactccagcttacagtgtactattataaaggccaaaggtctaaagcctatggatagtaatggccttgcagacccttatgtgaagctccatctgctgcccggagcaagcaaaagtaataaactccgcacaaagactcttaggaacacccgcaatcctatttggaatgagacactggtgtaccacggaattaccgacgaagacatgcagaggaaaaccctgcggatcagtgtctgcgacgaagacaagttcggccacaacgagttcatcggagagacgaggttctcgctcaagaaactcaaaccgaaccagagaaaaaattttaatatatgtctggagagggtcatccctatgaaacgcgccggaactactggatccgccagggggatggcactctatgaggaggaacaggtggaacgtgtgggcgatatcgaggagaggggcaaaatccttgttagcctcatgtatagcactcagcaagggggattaatcgtgggaattatcagatgcgtgcacctcgcggcaatggacgccaacggatactctgacccctttgtaaagctttggttgaagccggacatgggtaagaaagcaaaacacaagactcaaatcaaaaaaaagacattgaatccagaatttaatgaggagtttttctatgatattaaacattccgacctagccaagaagagtctggacattagtgtctgggattacgacatcgggaagagcaacgactatataggggggtgccaactggggatctcagctaagggtgagagacttaagcattggtacgagtgcttgaagaacaaagacaagaaaattgagcggtggcaccaactgcagaacgagaatcacgtgagcagtgactag

SEQ ID NO: 183392 - DNA, 2073 bp, Artificial Sequence
  derived and/or modified sequence
atgaccgacaccgtgttcagcaacagcagcaaccggtggatgtacccgtccgacagaccactccagtcgaaactgcaggcgggttggagtgttcatccaggcgggcagccagaccggcagcgtaaacaggaggaactcactgacgaggagaaggagattattaacagggtgattgcccgcgcagagaagatggaagaaatggagcaggaacgaattggacggttagtggatcggctggaaaatatgcgaaaaaatgttgccggagacggggtaaatcgttgtatactgtgcggcgagcaactgggtatgctcgggagcgcttgcgtggtatgtgaggactgtaagaaaaatgtgtgtacaaagtgtggcgtcgagacaaataacaggctccattctgtttggctctgtaagatttgcatcgagcagagagaggtgtggaagaggagtggagcatggttctttaagggattcccaaagcaagtgctgccacagcccatgcccatcaaaaaaacgaaaccccagcagcctgtgtcagaacctgctgccccagagcagccagctccggagccaaaacacccagcaagagcccctgccaggggggattctgaggaccgtcggggacctggacagaagacgggtcctgatccagcaagcgctcccggaagggggaattacggcccccctgtgcgtagggcttcagaggctcggatgagcagctcatcacgcgatagcgagtcttgggatcactctggcggggctggtgatagtagtcgctctcctgcggggttgcgaagagcgaactccgtacaggccagcagaccggctccaggctcagtgcagagccccgcaccacctcaaccagggcagccaggaacccccggaggcagccgccccggacccggaccagccggacgattccccgatcaaaagcctgaggtcgccccgtctgatcctgggactaccgcaccccctagggaggagagaacaggaggagtcggggggtaccccgcggttggcgcaagagaagaccgcatgagccacccttctgggccctactcgcaggcctcagccgctgccccccagcctgctgctgcacgccaaccgcctccgcccgaggaggaggaagaagaggcgaactcatatgactcagatgaggcaaccaccctgggagcactggaattttccctactctacgatcaagataattcttcactgcagtgcaccattatcaaagccaagggattgaaacccatggactccaacggtctggccgacccctatgtcaaacttcatctgctccccggtgcgagcaaatcaaataaattgcgcaccaaaacgctccggaataccagaaatccaatatggaacgaaaccctcgtctaccacggtataactgacgaagacatgcaacgtaaaactctgagaatctcagtgtgtgatgaagataagtttggccacaatgagttcattggggaaacacgcttttcccttaaaaaactcaagccgaatcagagaaagaatttcaatatttgcctagagcgcgtaattccgatgaagcgagctggcacaactggtagcgcccggggcatggccctttacgaggaggagcaggtggaaagggtgggcgatatcgaggagaggggcaaaatcttagtctcactgatgtattcaacacagcagggaggtctcatcgttggtattattaggtgcgttcatctagcggcaatggacgctaacggatatagtgatccctttgtcaaactctggttaaaacccgatatgggaaagaaggcaaaacataagacccagatcaaaaagaaaacgctgaatccggagtttaatgaagagtttttttacgacatcaagcacagcgatctggccaaaaaatcactggacatatccgtatgggactacgacatagggaaaagtaatgactatattggcggctgtcagttaggtatatccgctaaaggtgagcgcctgaaacattggtatgagtgtttgaaaaataaagacaagaagatcgagagatggcaccaactgcaaaacgagaatcacgtgagctcagactag

SEQ ID NO: 183393 - DNA, 1938 bp, Artificial Sequence
  derived and/or modified sequence
atgactgatactgtcttttccaattccagtaacagatggatgtatccgagcgaccgaccactgcagtccaaactgaaggaccgccgtctggtggatcggctcgagaacatgcggaagaacgtcgccggagacggcgtgaaccggtgcatactgtgcggcgagcagttgggcatgttaggctcagcatgtgtagtctgtgaagactgtaagaaaaacgtctgtactaagtgcggcgtagaaacaaataacagactccatagcgtttggctgtgcaaaatctgcatagagcagcgcgaagtgtggaaacggtccggcgcatggttttttaagggctttcctaaacaggtgctccctcagccgatgcccataaaaaaaaccaagccacagcaaccagtgtctgaaccagccgcaccggagcaaccagccccagagcccaagcacccggctagggcgccagctagaggagatagcgaggaccggagagggcctggtcagaagactggccctgaccccgctagtgccccaggcagagggaactatgggccaccggtgcgtcgggcatcggaagcccgtatgtcctccagttcgcgggatagcgaaagctgggatcattctgggggtgctggtgacagtagccggtctcccgctgggctgcgacgggctaatagcgtacaggccagtcgacccgcacccggatctgttcagtctcctgccccaccgcaacccggacagccgggaacacccggagggtctcgcccaggaccaggccctgctggtagatttccagatcagaaacccgaggttgcgccttccgaccctggcacgactgctcctcccagggaagagaggaccgggggtgtcggaggctacccagctgttggagccagagaagaccgcatgtctcacccgagtggcccttatagtcaggcgagtgcagcagcgccacagccagctgccgcaaggcagccccctcctccggaagaggaagaggaagaggccaacagctatgactcagacgaagctactacgctgggcgcactcgagtttagcctgctgtatgaccaggacaatagttcccttcagtgtactatcattaaagccaagggcctgaaaccaatggatagcaacggcctggcggatccctacgtgaagcttcatctgctgcccggagctagcaagagcaataaactaagaacgaaaacactgagaaatacccgaaatcctatctggaacgaaacattggtctatcacgggattactgacgaggacatgcaaagaaaaacacttcgtatctcggtatgcgacgaagacaagtttggacataacgagtttatcggggaaaccaggttctccttgaaaaagctcaagcccaaccagcgaaagaattttaacatttgccttgaaagggtaatcccaatgaaaagagcgggtacaaccggtagcgccaggggcatggcactttacgaagaggagcaagtcgagagagtgggcgacatagaagagaggggcaagattctggttagcctaatgtacagcacccagcaaggtggtctgatcgtgggtattataaggtgcgtgcacctggcagccatggacgccaatgggtacagtgaccctttcgtgaagctgtggttaaagcccgacatggggaagaaggctaaacacaaaacccagattaagaagaagactctaaaccctgaattcaacgaagagttcttttacgacattaaacactccgacctagccaagaaatccctagacatcagtgtgtgggattatgacatcggtaagagtaacgactatatcggcggatgtcaattaggaatcagtgccaaaggcgagagattgaagcactggtatgaatgtctcaaaaataaggacaaaaagatcgagcggtggcatcagctgcagaacgagaatcatgtgtcctctgactag

SEQ ID NO: 183394 - DNA, 2073 bp, Artificial Sequence
  derived and/or modified sequence
atgaccgatactgtcttttcgaatagcagtaacaggtggatgtatcccagcgatcggcctctgcaatctaagcttcaagcaggatggagtgtgcatccgggtggccagccagaccggcaacggaagcaggaagagcttactgatgaagagaaggaaatcataaacagggtgatagcccgtgccgaaaagatggaagagatggagcaggagaggataggcagactcgttgatcggcttgagaacatgcggaagaacgtagcaggagatggagtcaacaggtgcatactgtgcggcgagcaactagggatgctggggagcgcgtgtgtggtgtgcgaggactgtaaaaagaacgtgtgcacaaagtgcggcgtggagacaaacaaccgcttgcatagcgtgtggctgtgtaagatctgtattgaacaacgcgaggtgtggaagcgttctggagcttggttcttcaaagggtttccaaaacaggtgctgccacaaccaatgcctatcaagaaaacaaagcctcaacagccggtctccgagcccgcagcaccagagcagcctgctccagaacccaagcaccccgctagagccccagcacggggagacagcgaggatcgcagaggacccggtcagaagaccggacccgaccctgcatctgctccgggtcgtggcaactatgggcctcccgtgcgtagagcttccgaggccaggatgtcctcttcttcacgggatagtgaaagctgggatcattctggaggtgccggtgactccagccgcagcccagccggtttgcgacgcgcaaacagcgtacaggccagtaggccagcacctggatcggtccagagtcctgccccaccccagccaggacagccaggcactccaggcggatctcgacccggaccaggtcccgcagggagattccccgatcagaaacccgaagtggctcctagtgatcccggtaccacagcccctcctcgcgaggagagaactggcggagtaggcggatacccagctgtgggtgccagagaggatcgaatgtctcacccatccggcccatattctcaagcatcagcggcagcaccacagcctgcagccgctagacagccgccaccccctgaggaggaggaagaggaagcaaattcttatgactcagacgaagcaactaccttgggagcactggagttcagcctcttgtacgaccaggacaattcttctcttcaatgtacaattataaaagctaaggggttaaaacccatggattccaatggactggctgacccttacgtgaaactccacctgctcccaggcgcttcaaagagcaacaagcttcgcacgaaaacccttagaaacacccggaaccccatctggaatgagactctcgtctaccatggaattaccgatgaggatatgcagcgcaagaccctacggatctcggtttgtgacgaagacaaattcggacacaatgaattcatcggagagaccagatttagtttaaagaagcttaagcctaaccagcgaaagaactttaacatctgtctagaaagagtgatccccatgaaacgcgcagggaccaccggatctgctcgaggaatggctctgtacgaagaggagcaggtagagcgggttggagacatcgaggagcgtggtaagatcctggtatccttgatgtactccacgcagcagggtggcctgattgtcggaatcattcgatgcgtgcacctcgctgccatggacgcaaatggctattcagaccccttcgtgaaactttggttgaagcctgatatgggtaaaaaagctaaacacaagacacaaattaagaagaaaacactcaatccagagttcaacgaagagttcttctacgatatcaagcactctgatctcgcaaagaaatctcttgacatctccgtttgggactacgacattggaaaatccaacgactacataggcggttgtcagcttggaataagtgcgaaaggggagcgcctgaagcactggtacgaatgccttaagaacaaagataagaagattgagcgttggcatcagctccaaaacgaaaatcatgtttcttccgattag

SEQ ID NO: 183395 - DNA, 4440 bp, Artificial Sequence
  derived and/or modified sequence
gctcacacagggctttgcagtagtggtggcagccgcggcagaaactggctctggggaagcaattgattcgtctactgccagcagcccggagttgcctacgcggactggaaaggaagggagaagggagagagagagagagagagagagagagagagagagagactcacagagctaaaaccttcatccatgtggaggacagtctgagggagccactgtcccttgtccactgactcactggctggtccgagttttctccgcttctggcagtggcacctccgctgagcttttaaaccaagtcattgggacttagcgtctttctacccggcagggaagggaggagttggcaagaatttggctcacccattccccctgcaagcctccagcgtcgcggagcactagacatctactatgactgacaccgtgttcagcaacagttctaaccgttggatgtaccccagtgaccggccccttcaatcaaagttgaaagatagacgcctggtggaccgcctagaaaacatgaggaagaacgtggctggagatggggtgaaccgctgcatactgtgtggagaacagctggggatgctgggctctgcctgtgtagtatgtgaggactgtaagaagaacgtctgcaccaagtgcggagtggagaccaacaaccgcctgcattctgtgtggctctgcaaaatctgcattgagcagagggaggtgtggaagcgttctggagcgtggttcttcaaaggcttccccaaacaggtcctcccacagcctatgcctataaagaagaccaagccccagcagcctgtcagtgagcctgctgcccctgaacagcctgctcctgagcccaagcaccctgcccgggctccagctcgaggtgacagtgaagataggaggggcccgggtcagaagacaggccctgacccagcctctgctcccgggcgaggaaactatgggcctcccgtgcgcagggcctccgaggcacgaatgagctcatctagccgagattcagagagctgggaccacagtgggggtgctggagactccagccggagcccagcaggtttgagacgggccaactcagtccaggcctccagacctgccccaggctcggtgcagagcccagcgccacctcagcctgggcagccagggaccccaggaggaagcagaccgggtcctgggccagcaggacgctttccagatcagaagccagaggtggctccgagcgaccctgggaccactgccccaccccgagaggagagaacagggggagtcgggggctacccagcagttggagccagagaggaccgaatgagccacccctccggaccctattcccaagcatctgcagctgccccccagcctgctgcagcccgccagccaccacccccagaggaggaggaagaggaagccaacagctacgattcggatgaagcaaccaccctgggtgccctggaattcagccttctctacgaccaggacaacagctccctgcagtgcaccatcattaaggccaagggcctgaagcccatggattcaaacggcttggctgatccctacgttaagctgcacctcctgccgggagccagcaagtccaacaagcttcgtacaaaaactctgcggaatacccggaaccccatctggaatgagaccctcgtgtatcacggcatcaccgatgaggacatgcaaaggaagaccctcaggatctccgtctgtgatgaggacaaatttggccacaatgaatttattggtgagaccagattctccctcaagaaactgaagcccaaccagaggaagaatttcaacatctgcctggagcgagtgattcctatgaaacgtgctgggaccaccgggtcagcccgaggcatggccctttatgaggaagagcaggtggagcgtgttggtgacatcgaggagcgtggcaagatcctggtctccctcatgtacagcacacagcagggaggcctcattgtgggcatcatacgctgcgtgcacctggctgccatggacgctaatggctactcagacccattcgtcaagctctggctgaaaccggacatgggaaagaaggccaaacacaagactcaaattaaaaagaaaaccttgaatcccgaattcaatgaggagtttttctatgacatcaaacacagtgacctggcaaagaagtcactggacatttcagtctgggactatgacatcggcaagtccaatgattacatcggaggctgccagctggggatctctgccaagggagagcgcttaaaacactggtacgagtgtctgaaaaataaagacaagaagatagagcgctggcaccagctacagaatgagaaccacgtgtcaagtgattaggctagtgcccaggtccccatctccatgtcccgggtcccccccagcctgctctagctgcccaccgcaccctgatctctcttctctatgcctacctccccccataccctgctgatctccctgagcctgcctttgagcccccgtcacgttgggcactgctgccaaagactccctcctccctgatgctgggatgtgggctctgaatacagcccctctctcatccctgggatggagcaatggggatggggttggggagacgtttacaaagaggttgatcatttaataacctctcagtttgggtaaattacaaaggttcttcatcatttaggactgtttttagaccctcctagccttgaacacacacatgtacacacacacacacacacacacacacacaccctttcattccctgtgttgtgtctctgtatatccccagttgtcagcagacccggacaatgctgtgagagaagcattggggcacaaatagagcctccgggctcccactgccccctgagatgtacaccctgattgccaggaaaacagactgctgtgttcagtaacacaccctccctgctccaagtgcaccaggatgcaaatgcacagaattcaccaggggcttggacgctctcctctttccgaatgtcacctgtgtgcttcctagcaaaacaaaaacaaacgacaacaacaaaaaacccttcctctgtcaccttttctcctcctccctcttctttcccttccatgatagtagattctctctttctcagcctctcccctctcctttctctccctgcctttcttccctttgcctttctctctctctaaagcagtaacaccgcaaaaacaacagcaaaaaaagtgtatgttaacctagcctcacccccttgctctcaccagcctgaccaggaaactgagaaactggcccaaacctgagattccacttgggcccacgcttcttaactgacccactcctcccgttggcagaaccagacattcccagggcttgggccaatggctggcactgccctgagtgcatggcagcatccctcaagctgtgtagatgccccatagaggactctctcatccgtgggctccccgggtgggcacggaggcatttagaagaccagggccatgggtctgaggaagcctcagccaaagcctccagcctttctcctttctccgctcttaggtaaatgaacaagctaccctcctccccaatgcccttgactctgtttcattgactcttttgcatcccatctctcactcagaaccccctccagtctctctgtctctctttgtctgtctctctgtctcctgcactctcgttactaagcttcctgggagaatcaaataatatcatggctatggaacagtagagagagacaggcctgatgccaaaggctttgggctcatcatcaatctttcactttcttcctataaaaaaaattattttataaaggaggaaaaggcaatgtgggcaaacattacaaatttgaggttgaagtcaggcaatcttcaatgccctgtgagaaaggttcgattttcccaattttgatgaagtcttccctcatgaaaatcactcccagtcatcccaaacccctgacattctctacagaagcatcagacagatactcaaactctcactttccccaaatcacatctcttaacttttcaacgccctccaccctcagctccctgcacaattcatgggaggactcatttcttgccttgaataaccattttctaaacatcgagctcttcaccttccccaaggtggccaacagcttcctggctgccatctttccttttgaccttatctttccccattagtccctggtggcacctactctcagcccacctccctcaccacagtttccccttaggagacagcatgctggctgtgtcgcccaagcctgatgctggtgtaggcgctggaatcagcatgcagcaagctcacagtgcccctagtctgggtgcccgctgtccccgacaaatgtaaccacctccctgcctagaatacacacacgtcctccggtgcatgcacaaccacccagcatctttctttgtgatgatgtagccaaaaataaagtaggagcatcc

SEQ ID NO: 183396 - DNA, 2961 bp, Artificial Sequence
  derived and/or modified sequence
ggacagtctgagggagccactgtcccttgtccactgactcactggctggtccgagttttctccgcttctggcagtggcacctccgctgagcttttaaaccaagtcattgggacttagcgtctttctacccggcagggaagggaggagttggcaagaatttggctcacccattccccctgcaagcctccagcgtcgcggagcactagacatctactatgactgacaccgtgttcagcaacagttctaaccgttggatgtaccccagtgaccggccccttcaatcaaagctccaggcaggctggtccgtccaccccggtggtcagcctgacaggcagaggaagcaggaagagctgactgatgaggagaaagaaatcatcaacagggtgattgctcgagctgagaaaatggaagagatggagcaggagcgaatcggacgcctggtggaccgcctagaaaacatgaggaagaacgtggctggagatggggtgaaccgctgcatactgtgtggagaacagctggggatgctgggctctgcctgtgtagtatgtgaggactgtaagaagaacgtctgcaccaagtgcggagtggagaccaacaaccgcctgcattctgtgtggctctgcaaaatctgcattgagcagagggaggtgtggaagcgttctggagcgtggttcttcaaaggcttccccaaacaggtcctcccacagcctatgcctataaagaagaccaagccccagcagcctgtcagtgagcctgctgcccctgaacagcctgctcctgagcccaagcaccctgcccgggctccagctcgaggtgacagtgaagataggaggggcccgggtcagaagacaggccctgacccagcctctgctcccgggcgaggaaactatgggcctcccgtgcgcagggcctccgaggcacgaatgagctcatctagccgagattcagagagctgggaccacagtgggggtgctggagactccagccggagcccagcaggtttgagacgggccaactcagtccaggcctccagacctgccccaggctcggtgcagagcccagcgccacctcagcctgggcagccagggaccccaggaggaagcagaccgggtcctgggccagcaggacgctttccagatcagaagccagaggtggctccgagcgaccctgggaccactgccccaccccgagaggagagaacagggggagtcgggggctacccagcagttggagccagagaggaccgaatgagccacccctccggaccctattcccaagcatctgcagctgccccccagcctgctgcagcccgccagccaccacccccagaggaggaggaagaggaagccaacagctacgattcggatgaagcaaccaccctgggtgccctggaattcagccttctctacgaccaggacaacagctccctgcagtgcaccatcattaaggccaagggcctgaagcccatggattcaaacggcttggctgatccctacgttaagctgcacctcctgccgggagccagcaagtccaacaagcttcgtacaaaaactctgcggaatacccggaaccccatctggaatgagaccctcgtgtatcacggcatcaccgatgaggacatgcaaaggaagaccctcaggatctccgtctgtgatgaggacaaatttggccacaatgaatttattggtgagaccagattctccctcaagaaactgaagcccaaccagaggaagaatttcaacatctgcctggagcgagtgattcctatgaaacgtgctgggaccaccgggtcagcccgaggcatggccctttatgaggaagagcaggtggagcgtgttggtgacatcgaggagcgtggcaagatcctggtctccctcatgtacagcacacagcagggaggcctcattgtgggcatcatacgctgcgtgcacctggctgccatggacgctaatggctactcagacccattcgtcaagctctggctgaaaccggacatgggaaagaaggccaaacacaagactcaaattaaaaagaaaaccttgaatcccgaattcaatgaggagtttttctatgacatcaaacacagtgacctggcaaagaagtcactggacatttcagtctgggactatgacatcggcaagtccaatgattacatcggaggctgccagctggggatctctgccaagggagagcgcttaaaacactggtacgagtgtctgaaaaataaagacaagaagatagagcgctggcaccagctacagaatgagaaccacgtgtcaagtgattaggctagtgcccaggtccccatctccatgtcccgggtcccccccagcctgctctagctgcccaccgcaccctgatctctcttctctatgcctacctccccccataccctgctgatctccctgagcctgcctttgagcccccgtcacgttgggcactgctgccaaagactccctcctccctgatgctgggatgtgggctctgaatacagcccctctctcatccctgggatggagcaatggggatggggttggggagacgtttacaaagaggttgatcatttaataacctctcagtttgggtaaattacaaaggttcttcatcatttaggactgtttttagaccctcctagccttgaacacacacatgtacacacacacacacacacacacacacacaccctttcattccctgtgttgtgtctctgtatatccccagttgtcagcagacccggacaatgctgtgagagaagcattggggcacaaatagagcctccgggctcccactgccccctgagatgtacaccctgattgccaggaaaacagactgctgtgttcagtaacacaccctccctgctccaagtgcaccaggatgcaaatgcacagaattcaccaggggcttggacgctctcctctttccgaatgtcacctgtgtgcttcctagcaaaacaaaaacaaa

SEQ ID NO: 183397 - DNA, 1938 bp, Artificial Sequence
  derived and/or modified sequence
atgaccgacaccgtgttcagcaacagcagcaacagatggatgtaccccagcgacagacccctgcagagcaagctgaaggacagaagactggtggacagactggagaacatgagaaagaacgtggccggcgacggcgtgaacagatgcatcctgtgcggcgagcagctgggcatgctgggcagcgcctgcgtggtgtgcgaggactgcaagaagaacgtgtgcaccaagtgcggcgtggagaccaacaacagactgcacagcgtgtggctgtgcaagatctgcatcgagcagagagaggtgtggaagagaagcggcgcctggttcttcaagggcttccccaagcaggtgctgccccagcccatgcccatcaagaagaccaagccccagcagcccgtgagcgagcccgccgcccccgagcagcccgcccccgagcccaagcaccccgccagagcccccgccagaggcgacagcgaggacagaagaggccccggccagaagaccggccccgaccccgccagcgcccccggcagaggcaactacggcccccccgtgagaagagccagcgaggccagaatgagcagcagcagcagagacagcgagagctgggaccacagcggcggcgccggcgacagcagcagaagccccgccggcctgagaagagccaacagcgtgcaggccagcagacccgcccccggcagcgtgcagagccccgcccccccccagcccggccagcccggcacccccggcggcagcagacccggccccggccccgccggcagattccccgaccagaagcccgaggtggcccccagcgaccccggcaccaccgccccccccagagaggagagaaccggcggcgtgggcggctaccccgccgtgggcgccagagaggacagaatgagccaccccagcggcccctacagccaggccagcgccgccgccccccagcccgccgccgccagacagccccccccccccgaggaggaggaggaggaggccaacagctacgacagcgacgaggccaccaccctgggcgccctggagttcagcctgctgtacgaccaggacaacagcagcctgcagtgcaccatcatcaaggccaagggcctgaagcccatggacagcaacggcctggccgacccctacgtgaagctgcacctgctgcccggcgccagcaagagcaacaagctgagaaccaagaccctgagaaacaccagaaaccccatctggaacgagaccctggtgtaccacggcatcaccgacgaggacatgcagagaaagaccctgagaatcagcgtgtgcgacgaggacaagttcggccacaacgagttcatcggcgagaccagattcagcctgaagaagctgaagcccaaccagagaaagaacttcaacatctgcctggagagagtgatccccatgaagagagccggcaccaccggcagcgccagaggcatggccctgtacgaggaggagcaggtggagagagtgggcgacatcgaggagagaggcaagatcctggtgagcctgatgtacagcacccagcagggcggcctgatcgtgggcatcatcagatgcgtgcacctggccgccatggacgccaacggctacagcgaccccttcgtgaagctgtggctgaagcccgacatgggcaagaaggccaagcacaagacccagatcaagaagaagaccctgaaccccgagttcaacgaggagttcttctacgacatcaagcacagcgacctggccaagaagagcctggacatcagcgtgtgggactacgacatcggcaagagcaacgactacatcggcggctgccagctgggcatcagcgccaagggcgagagactgaagcactggtacgagtgcctgaagaacaaggacaagaagatcgagagatggcaccagctgcagaacgagaaccacgtgagcagcgactag

SEQ ID NO: 183398 - DNA, 2073 bp, Artificial Sequence
  derived and/or modified sequence
atgaccgacaccgtgttcagcaacagcagcaacagatggatgtaccccagcgacagacccctgcagagcaagctgcaggccggctggagcgtgcaccccggcggccagcccgacagacagagaaagcaggaggagctgaccgacgaggagaaggagatcatcaacagagtgatcgccagagccgagaagatggaggagatggagcaggagagaatcggcagactggtggacagactggagaacatgagaaagaacgtggccggcgacggcgtgaacagatgcatcctgtgcggcgagcagctgggcatgctgggcagcgcctgcgtggtgtgcgaggactgcaagaagaacgtgtgcaccaagtgcggcgtggagaccaacaacagactgcacagcgtgtggctgtgcaagatctgcatcgagcagagagaggtgtggaagagaagcggcgcctggttcttcaagggcttccccaagcaggtgctgccccagcccatgcccatcaagaagaccaagccccagcagcccgtgagcgagcccgccgcccccgagcagcccgcccccgagcccaagcaccccgccagagcccccgccagaggcgacagcgaggacagaagaggccccggccagaagaccggccccgaccccgccagcgcccccggcagaggcaactacggcccccccgtgagaagagccagcgaggccagaatgagcagcagcagcagagacagcgagagctgggaccacagcggcggcgccggcgacagcagcagaagccccgccggcctgagaagagccaacagcgtgcaggccagcagacccgcccccggcagcgtgcagagccccgcccccccccagcccggccagcccggcacccccggcggcagcagacccggccccggccccgccggcagattccccgaccagaagcccgaggtggcccccagcgaccccggcaccaccgccccccccagagaggagagaaccggcggcgtgggcggctaccccgccgtgggcgccagagaggacagaatgagccaccccagcggcccctacagccaggccagcgccgccgccccccagcccgccgccgccagacagccccccccccccgaggaggaggaggaggaggccaacagctacgacagcgacgaggccaccaccctgggcgccctggagttcagcctgctgtacgaccaggacaacagcagcctgcagtgcaccatcatcaaggccaagggcctgaagcccatggacagcaacggcctggccgacccctacgtgaagctgcacctgctgcccggcgccagcaagagcaacaagctgagaaccaagaccctgagaaacaccagaaaccccatctggaacgagaccctggtgtaccacggcatcaccgacgaggacatgcagagaaagaccctgagaatcagcgtgtgcgacgaggacaagttcggccacaacgagttcatcggcgagaccagattcagcctgaagaagctgaagcccaaccagagaaagaacttcaacatctgcctggagagagtgatccccatgaagagagccggcaccaccggcagcgccagaggcatggccctgtacgaggaggagcaggtggagagagtgggcgacatcgaggagagaggcaagatcctggtgagcctgatgtacagcacccagcagggcggcctgatcgtgggcatcatcagatgcgtgcacctggccgccatggacgccaacggctacagcgaccccttcgtgaagctgtggctgaagcccgacatgggcaagaaggccaagcacaagacccagatcaagaagaagaccctgaaccccgagttcaacgaggagttcttctacgacatcaagcacagcgacctggccaagaagagcctggacatcagcgtgtgggactacgacatcggcaagagcaacgactacatcggcggctgccagctgggcatcagcgccaagggcgagagactgaagcactggtacgagtgcctgaagaacaaggacaagaagatcgagagatggcaccagctgcagaacgagaaccacgtgagcagcgactag

SEQ ID NO: 183399 - protein, 1460 aa, Artificial Sequence
  derived and/or modified sequence
MAGRPLRIGDQLVLEEDYDETYIPSEQEILEFAREIGIDPIKEPELMWLAREGIVAPLPGEWKPCQDITGDIYYFNFANGQSMWDHPCDEHYRSLVIQERAKLSTSGAIKKKKKKKEKKDKKDRDPPKSSLALGSSLAPVHVPLGGLAPLRGLVDTPPSALRGSQSVSLGSSVESGRQLGELMLPSQGLKTSAYTKGLLGSIYEDKTALSLLGLGEETNEEDEEESDNQSVHSSSEPLRNLHLDIGALGGDFEYEESLRTSQPEEKKDVSLDSDAAGPPTPCKPSSPGADSSLSSAVGKGRQGSGARPGLPEKEENEKSEPKICRNLVTPKADPTGSEPAKASEKEAPEDTVDAGEEGSRREEAAKEPKKKASALEEGSSDASQELEISEHMKEPQLSDSIASDPKSFHGLDFGFRSRISEHLLDVDVLSPVLGGACRQAQQPLGIEDKDDSQSSQDELQSKQSKGLEERLSPPLPHEERAQSPPRSLATEEEPPQGPEGQPEWKEAEELGEDSAASLSLQLSLQREQAPSPPAACEKGKEQHSQAEELGPGQEEAEDPEEKVAVSPTPPVSPEVRSTEPVAPPEQLSEAALKAMEEAVAQVLEQDQRHLLESKQEKMQQLREKLCQEEEEEILRLHQQKEQSLSSLRERLQKAIEEEEARMREEESQRLSWLRAQVQSSTQADEDQIRAEQEASLQKLREELESQQKAERASLEQKNRQMLEQLKEEIEASEKSEQAALNAAKEKALQQLREQLEGERKEAVATLEKEHSAELERLCSSLEAKHREVVSSLQKKIQEAQQKEEAQLQKCLGQVEHRVHQKSYHVAGYEHELSSLLREKRQEVEGEHERRLDKMKEEHQQVMAKAREQYEAEERKQRAELLGHLTGELERLQRAHERELETVRQEQHKRLEDLRRRHREQERKLQDLELDLETRAKDVKARLALLEVQEETARREKQQLLDVQRQVALKSEEATATHQQLEEAQKEHTHLLQSNQQLREILDELQARKLKLESQVDLLQAQSQQLQKHFSSLEAEAQKKQHLLREVTVEENNASPHFEPDLHIEDLRKSLGTNQTKEVSSSLSQSKEDLYLDSLSSHNVWHLLSAEGVALRSAKEFLVQQTRSMRRRQTALKAAQQHWRHELASAQEVAKDPPGIKALEDMRKNLEKETRHLDEMKSAMRKGHNLLKKKEEKLNQLESSLWEEASDEGTLGGSPTKKAVTFDLSDMDSLSSESSESFSPPHREWWRQQRIDSTPSLTSRKIHGLSHSLRQISSQLSSVLSILDSLNPQSPPPLLASMPAQLPPRDPKSTPTPTYYGSLARFSALSSATPTSTQWAWDSGQGPRLPSSVAQTVDDFLLEKWRKYFPSGIPLLSNSPTPLESRLGYMSASEQLRLLQHSHSQVPEAGSTTFQGIIEANRRWLERVKNDPRLPLFSSTPKPKATLSLLQLGLDEHNRVKVYRF

SEQ ID NO: 183400 - DNA, 4383 bp, Artificial Sequence
  derived and/or modified sequence
atggccggacgacctctgcgaatcggggatcagctggttctcgaggaggattacgacgaaacctatattccctcagagcaggaaatcctggagtttgcacgcgaaatcgggatcgatcctattaaggagcctgaactgatgtggctcgctagagagggtatcgttgcccctctgcccggcgaatggaaaccctgccaggatattactggcgatatctactattttaactttgccaatggccaaagcatgtgggaccacccttgtgacgagcattaccggagtttggtaattcaggagcgggccaaactgagtacctcgggggcaattaaaaagaagaaaaaaaagaaggagaagaaggacaaaaaagatcgcgatcctcctaaatcatctcttgccctgggctcttcacttgctcctgtgcacgtgccactgggtggcctggctcccctaagagggctggtagacacacccccttctgctctcagggggagtcagagcgtcagcctgggatcaagtgtggaatctggccggcaactcggggagctcatgctaccttcccagggcttgaagacatcagcttatacaaaggggctgctaggctccatctacgaagataagacagccctgagcctgctcgggctgggcgaggagaccaacgaagaggacgaagaagaatctgacaatcagtcagttcactcctccagcgagccccttcggaaccttcacctggatatcggcgcactgggaggagactttgaatacgaggagtctctacgaacctcacaaccagaggagaagaaggatgtgtccttggactctgatgcggccggacccccaaccccgtgcaagccctcttcacccggggccgactcatcactctctagcgcagttggaaaagggcgacagggtagtggcgctagaccggggttgccagaaaaagaggaaaacgagaaatctgagcccaagatctgtaggaatttggtgactcccaaagccgaccctaccgggtctgagccggcaaaagcctcggaaaaggaagcccccgaggataccgtggatgctggagaggaagggagtcgtagagaagaagccgccaaggaacctaagaaaaaagcctccgccttagaagagggaagcagtgacgcgtctcaggagcttgaaataagtgagcatatgaaagaaccgcaattgagcgattccattgcaagtgaccccaagtcttttcatgggctagacttcggttttaggagtcgcatcagcgaacaccttctggacgtggacgtgctgtcacctgtgctcggcggagcatgccggcaggcacaacaacccctgggcatagaagacaaagacgattctcagtcatcccaggacgaacttcaatctaaacaaagcaaagggcttgaggaaagactctccccccctctgccacatgaagagagagcccagagcccccctcggagcctggctactgaggaggagccaccccaaggaccagagggacaaccagagtggaaggaggcagaagaactgggagaggatagcgctgcctccctgtcccttcagttatcgctgcagcgcgaacaggccccatcaccccccgccgcatgcgaaaagggcaaggaacagcattcccaagctgaagagctcgggccaggccaggaggaggcggaggatcctgaggagaaagtggcggtctcccctactccaccagtgtcccccgaggtgcgctccacagaacctgtggccccaccagagcagttgtctgaagcggctctaaaagctatggaggaagccgtggcgcaggtgctggaacaggaccagcgccacctgcttgaaagtaaacaagagaagatgcagcagctgcgggaaaagctgtgccaggaagaggaggaggagattttgagactgcaccaacagaaggagcagtctctctcgtctctgagggaaaggctgcagaaggccatcgaagaagaggaagctcggatgagagaggaggagtcgcagaggctttcttggttgcgagcccaggtccagtctagcacccaggctgacgaagaccagattcgagcagaacaggaggcatccctccagaaactccgggaagaactcgagtcccagcagaaggccgaaagagcctcattagagcagaagaacagacagatgctggaacagctcaaggaagaaatcgaggctagcgaaaagtcagaacaggctgctttgaacgccgcaaaggagaaggcactgcaacaactcagggaacagttagagggggagagaaaagaagccgtggcaacactcgaaaaggaacacagtgcggaactggaaagactgtgctcttctctcgaagccaagcatcgcgaggttgttagttccctccagaaaaaaatccaggaagcgcagcagaaagaagaggcccagttacaaaagtgtttggggcaagtcgaacatagggtgcaccaaaaaagttatcacgtcgccgggtacgaacacgagctgagctcactcctccgagagaagcggcaggaggttgagggggaacatgaaaggagactcgataagatgaaagaggagcaccagcaagtgatggccaaggctagagagcagtatgaggccgaggaacgtaagcagagagcagagttgctgggccatctgaccggcgaactggaacgactccaacgcgctcatgagcgggagctggagaccgtcaggcaggagcagcacaagcgtctggaggacctccggcgccggcacagggagcaggagcgaaaacttcaggacctggagctggatctggaaactcgcgcaaaggatgtgaaggctaggctcgctctgctggaagttcaggaggagactgccaggagggagaagcaacagctcctagatgtgcagcgccaagtcgctttgaagagcgaggaggcaacggcaacgcatcagcagctggaggaggcccagaaagagcacacccatctgctgcagagcaatcagcagcttcgtgagatccttgacgagctacaggccagaaagttgaaattagaaagtcaagtggatctgttgcaagcccagtcccaacaacttcaaaagcatttctcttcgcttgaagcggaggcgcagaaaaaacagcatctgctgcgcgaggtcaccgttgaggaaaataacgcatcaccacactttgagccagacctgcacattgaggacctcagaaagtccctcggtaccaatcaaaccaaggaagtgagttcatcattgagtcagtcaaaagaggacctatatctcgactcgctgtcaagccacaatgtgtggcatttgctttccgccgaaggtgtggccctacgctcagcaaaagagtttctagtgcagcagaccagaagcatgcggcgacgccagacggctcttaaagccgcccagcaacactggagacatgagcttgccagcgcccaggaggtggccaaagatccaccagggattaaggccttggaggacatgcggaagaacttagaaaaggagactaggcatcttgatgagatgaaatcagctatgagaaaggggcacaacctactgaagaaaaaagaggaaaaacttaatcagctcgaaagcagcctgtgggaggaggcttccgatgagggcaccctaggcgggtcgcccactaagaaggccgtgacttttgatctgtcggacatggatagtctaagcagcgagagctccgaatctttttcccccccccaccgagaatggtggcgacagcagagaattgatagcactccttcgctgacctctcgaaaaatccacgggctcagtcattcgctgcggcagatcagttctcagctgagttctgtcctctctatcctagatagtttgaaccctcagtcccccccccctctcttggcttctatgccagcccagttacctccacgggaccctaaatcaactcctactccaacctattatggaagcctggcccggttctctgcgctgtcctctgccacaccaacttctacgcagtgggcatgggactctggacaaggcccacgtttgccctcgtcagtggcacaaaccgtggatgacttccttctcgagaaatggagaaaatactttccatcaggcatccctcttttgtccaactctcctactcctctggagtctaggctcggttacatgtccgcctccgaacagcttaggctgctccagcactcccattcacaagtgccagaagccgggtctactacttttcagggtataattgaggctaatagaagatggctggagagagtcaaaaacgacccgagactgccactcttctctagcacccccaaacccaaggccacactttctcttttgcagctaggcctggatgaacataatagagtgaaggtctaccgcttttag

SEQ ID NO: 183401 - DNA, 4383 bp, Artificial Sequence
  derived and/or modified sequence
atggccggccggcccctgcgcatcggggaccagctggtgctggaggaggactatgatgagacctacatccccagcgagcaggagatcctggagtttgcccgggagatcggcatcgaccccatcaaggagcctgagctgatgtggctggcccgggagggcatcgtggcccccctgcctggagagtggaagccctgccaggacatcactggagacatctactacttcaactttgccaacggccagagcatgtgggaccacccctgtgatgagcactaccgcagcctggtgatccaggagcgggccaagctgagcaccagcggggccatcaagaagaagaagaagaagaaggagaagaaggacaagaaggaccgggacccccccaagagcagcctggccctgggcagcagcctggcccctgtgcacgtgcccctgggcggcctggcccccctgcggggcctggtggacaccccaccttctgccctgcggggcagccagagcgtgtccctgggcagctctgtggagagcggccggcagctgggggagctgatgctgcccagccagggcctgaagaccagcgcctacaccaagggcctgctgggcagcatctatgaggacaagacagccctgagcctgctgggcctgggggaggagaccaatgaagaagatgaggaggagagtgacaaccagagcgtgcacagcagcagcgagcccctgaggaacctgcacctggacattggagccctgggcggggactttgaatatgaggagagcctgcggaccagccagcctgaggagaagaaggatgtgtccctggacagtgatgctgctggcccccccaccccctgcaagcccagcagccctggagctgacagcagcctgagcagcgctgtgggcaagggccggcagggcagcggggcccggcccggcctgcctgagaaggaggagaatgagaagtctgagcccaagatctgcaggaacctggtgacccccaaggctgaccccactggaagtgagcccgccaaggccagcgagaaggaggccccagaagatactgtggatgctggggaggagggcagccggcgggaggaggccgccaaggagcccaagaagaaggccagcgccctggaggagggcagcagtgatgccagccaggagctggagatcagcgagcacatgaaggagccccagctgagtgacagcatcgccagtgaccccaagagcttccacggcctggactttggcttccgcagccgcatcagcgagcacctgctggatgtggatgtgctgagccctgtgctgggcggggcctgccggcaggcccagcagcccctgggcatcgaggacaaggatgacagccagagcagccaggatgagctgcagagcaagcagagcaagggcctggaggagcggctgagcccccccctgccccatgaggagcgggcccagagcccccccaggagcctggccacagaggaggagcccccccagggccctgagggccagcctgagtggaaggaggccgaggagctgggggaggacagcgctgccagcctgagcctgcagctgagcctgcagcgggagcaggcccccagccccccagctgcctgtgagaagggcaaggagcagcacagccaggccgaggagctgggccctggccaggaggaggctgaagatcctgaggagaaggtggccgtgagccccaccccacctgtgtccccagaggtgcgcagcacagagcctgtggcccctcctgagcagctgtctgaggccgccctgaaggccatggaggaggccgtggcccaggtgctggagcaggaccagaggcacctgctggagagcaagcaggagaagatgcagcagctgcgggagaagctgtgccaggaggaggaggaggagatcctgcggctgcaccagcagaaggagcagagcctgagcagcctgcgggagcggctgcagaaggccatcgaggaggaggaggccaggatgagggaggaggagagccagaggctgtcctggctgcgggcccaggtgcagagcagcacccaggctgatgaggaccagatccgggcagagcaggaggccagcctgcagaagctgcgggaggagctggagagccagcagaaggccgagcgggccagcctggagcagaagaaccggcagatgctggagcagctgaaggaggagattgaggccagcgagaagtctgagcaggccgccctgaatgctgccaaggagaaggccctgcagcagctgcgggagcagctggagggggagaggaaggaggccgtggccaccctggagaaggagcacagcgctgagctggagcggctgtgcagcagcctggaggccaagcaccgggaggtggtgagcagcctgcagaagaagatccaggaggcccagcagaaggaggaggcccagctgcagaagtgcctgggccaggtggagcaccgggtgcaccagaagagctaccacgtggccggctatgagcacgagctgagcagcctgctgcgggagaagaggcaggaggtggagggggagcatgaaagaaggctggacaagatgaaggaggagcaccagcaggtgatggccaaggcccgggagcagtatgaagctgaggagaggaagcagagagctgagctgctgggccacctgactggagagctggagcggctgcagagggcccacgagcgggagctggagaccgtgcggcaggagcagcacaagaggctggaggacctgcggcggcggcaccgggagcaggagaggaagctgcaggacctggagctggacctggagacccgggccaaggatgtgaaggcccggctggccctgctggaggtgcaggaggagacagcccggcgggagaagcagcagctgctggatgtgcagaggcaggtggccctgaagtctgaggaggccacagccacccaccagcagctggaggaggcccagaaggagcacacccacctgctgcagagcaaccagcagctgcgggagatcctggatgagctgcaggccaggaagctgaagctggagagccaggtggacctgctgcaggcccagagccagcagctgcagaagcacttcagcagcctggaggccgaggcccagaagaagcagcacctgctgcgggaggtgacagtggaggagaacaatgccagcccccactttgagccagacctgcacatcgaggacctgaggaagagcctgggcaccaaccagaccaaggaggtgagcagcagcctgagccagagcaaagaagatctctacctggacagcctgagcagccacaacgtgtggcacctgctgtctgctgagggcgtggccctgcggagcgccaaggagttcctggtgcagcagaccaggtccatgagaagacggcagacagccctgaaggccgcccagcagcactggaggcatgagctggccagcgcccaggaggtggccaaggaccccccaggcatcaaggccctggaggacatgaggaagaacctggagaaggagaccaggcacctggatgagatgaagagcgccatgaggaagggccacaacctgctgaagaagaaggaggagaagctgaaccagctggagagcagcctgtgggaggaggccagtgatgagggcaccctgggcggcagccccaccaagaaggctgtgacctttgacctgagtgacatggacagcctgagcagcgagagcagcgagagcttcagccccccccaccgggagtggtggaggcagcagagaattgacagcacccccagcctgaccagcaggaagatccacggcctgagccacagcctgcggcagatcagcagccagctgagctctgtgctgagcatcctggacagcctgaacccccagagccccccacccctgctggcctccatgcctgcccagctgcccccccgggaccccaagagcacccccacccccacctactacggcagcctggcccgcttcagcgccctgagcagcgccacccccaccagcacccagtgggcctgggacagcggccagggcccccggctgcccagctctgtggcccagacagtggatgacttcctgctggagaagtggaggaagtacttccccagcggcatccccctgctgagcaacagccccacccccctggagagccggctgggctacatgtctgccagcgagcagctgcggctgctgcagcacagccacagccaggtgcctgaggccggcagcaccaccttccagggcatcatcgaggccaacagacgctggctggagcgggtgaagaatgacccccggctgcccctcttcagcagcacccccaagcccaaggccaccctgagcctgctgcagctgggcctggatgagcacaacagagtgaaggtgtaccgcttctag

SEQ ID NO: 183402 - DNA, 4383 bp, Artificial Sequence
  derived and/or modified sequence
atggccggccggcccctgcggatcggcgaccagctggtgctggaggaggactacgacgagacctatattccttctgagcaggagatactggaatttgccagagagattggaattgatccgattaaggaaccagagcttatgtggctggccagggagggtattgtcgcacccctgcctggcgagtggaaaccgtgtcaggatatcactggagatatttattatttcaactttgcgaacggtcagagcatgtgggatcatccctgtgacgaacattaccgctccttagtcatccaggagcgcgcaaaattgagcacttccggcgccatcaagaaaaaaaaaaaaaagaaagagaagaaggacaagaaagacagagatcctcctaaatcgagcttagctcttggctcatccctggcccctgtccacgtccctcttggcggactggcccctctgcgagggctggtggacactccaccaagcgcgttgcgcggctcccagtcggtctctttgggaagttctgttgaaagcggtaggcaactcggcgaactgatgctgccttcacagggcttaaagaccagcgcttatacaaaagggctgctgggatcgatatacgaggacaagaccgcactgagcttgctcgggctcggggaggagaccaatgaggaggatgaggaggagtccgacaatcagtctgttcatagctccagtgagccactacgcaatctgcaccttgatatcggcgcactgggaggggactttgagtacgaggaatccctacgtacatcccagccagaagaaaagaaggatgttagcctggacagtgacgccgctggacctcccacaccctgtaagccctcctcacccggcgccgattccagcctctcgtccgccgtgggcaagggtcgtcaaggcagcggcgctagacctgggctgccagagaaggaggagaatgaaaagagcgagcctaaaatctgtcggaacttggtgacacctaaagccgatccgaccggaagcgaaccagctaaggcctctgagaaagaggcacccgaggacaccgtggatgccggagaggagggctcacgaagagaggaggcagctaaagagcctaaaaaaaaggcaagcgccctggaagaagggtctagcgacgcgagtcaggaactggaaatctccgaacatatgaaagaaccccaattaagtgattcaattgcatccgaccctaagagctttcacgggcttgatttcgggttcaggagccgaatctcagagcatctcctggacgtcgacgtgcttagccctgtcttagggggagcttgtcgacaggcgcaacagccactggggattgaggataaagatgactcccaatccagtcaggacgaactgcagtccaagcagagcaaaggactggaggagcgtctgtctcccccgttaccccacgaggagcgggcccagtctccacctaggagcctggccacagaagaggagcccccacagggccctgaaggtcagccggaatggaaggaggcagaagagttgggtgaagactcagccgcttctctgtccctccagttgtctttgcaaagggaacaggcgcccagcccacccgctgcctgtgagaagggcaaggagcagcactctcaggccgaagagctaggcccgggccaggaggaggccgaagaccccgaggagaaagtcgccgtctctccaacaccgcccgtgagcccagaggtgagaagcaccgaaccagtcgcacccccggaacagctatctgaagccgcacttaaggcgatggaggaggcagtggcgcaagttctggaacaggaccagcgtcacctcctggaaagcaaacaggagaaaatgcagcaacttcgtgagaaattgtgtcaggaagaagaggaggagatcctgcggctccaccagcagaaagagcagagtctgtcaagcctgcgcgagaggcttcagaaagccatcgaggaggaggaggcacgaatgcgggaagaggaatcacaaagattgtcctggctcagggcccaggtacagagctctacgcaggccgatgaagaccagatacgtgccgagcaagaggcatccttgcagaagttgcgcgaagaactagagtcgcagcagaaagccgaacgcgcatctttggaacagaagaataggcagatgctcgaacagctgaaagaagagatcgaagcctctgagaagagtgagcaggcagctctgaatgccgccaaagagaaggccctgcagcagctgagagaacagctggaaggtgagcgcaaggaggctgtggcaactctggagaaagaacattcagccgagctggagcggctgtgttcaagcctcgaagctaagcaccgggaggtcgtgtcttcgttacaaaagaagatacaggaagcccaacagaaggaggaggctcaattgcaaaaatgtttgggccaggtcgagcatcgtgtgcaccagaagagctatcacgtggccggatacgagcatgagctaagttcccttctgcgggagaaacggcaggaagtggaaggagagcatgagcgacgtctggacaaaatgaaggaggaacatcagcaagtcatggcaaaggccagggagcaatacgaggctgaagaaagaaaacagagagccgaattgcttggccacctgaccggggaactggagcggctccagcgtgcccatgagcgcgagctggaaacagtacggcaggaacagcacaaaaggttagaagatcttcgcagacggcacagggaacaggagcgcaaattacaggatctggagctggatttggaaactcgggccaaggatgtgaaagcgcgccttgccctcttagaggtgcaggaggagacagcccgacgagagaagcaacaattgctagacgtacagcggcaagttgcactgaagagcgaggaagccaccgccacacaccagcagctggaagaagcccagaaggagcacacgcacttactgcagagtaaccagcagctacgcgagatcttggacgaattgcaggctaggaaattgaagctcgagtcacaggtagacctgttgcaggcgcagtctcaacagcttcagaaacatttcagcagcctggaagccgaagcccagaagaagcagcaccttctgcgcgaggtaacagtcgaagagaataatgcctctccccacttcgaacccgatcttcatattgaagacctccggaagagtcttggtactaatcaaacgaaagaggtgtcctcctcattgtcacagtctaaagaggatctatatctggattctctctctagccacaatgtctggcatcttctgagcgctgagggagtagccctgcgttcagccaaagaattcttggttcagcaaactcggtctatgcggagaagacagaccgctttgaaggcggcccagcagcactggagacacgagctagcttccgcccaggaggtggctaaggatccacccggaattaaggccctagaagacatgcgaaagaatctggagaaagagacgaggcacttagatgagatgaaaagcgccatgagaaagggtcataaccttctgaagaaaaaagaagaaaaactcaaccagcttgaatcttcactctgggaggaggcctctgacgagggaactttaggcgggtctcccacaaaaaaggctgtcaccttcgacctatccgatatggattctctgtcctcggagtcctcggagagtttcagcccacctcatagggagtggtggcggcaacaacgcattgacagcacacccagcctgacatcacgcaagatacacggcctatcccacagtttgcgccaaatcagctctcagttatcctctgttctgagcattctggatagtctgaacccacagtctccgcctcctctactcgcatccatgccagctcagctgccacctagggacccgaagtctactccaacaccaacctactatggctcactggcgaggttttcagctctcagcagtgcgacacctaccagtacgcagtgggcttgggattccgggcaaggccctcgactgccctcctcagtggcccagaccgtagatgactttcttctcgaaaagtggcggaagtactttcccagcggcatcccacttctgtctaattcgccgactcctttagagtctagacttggatacatgtcagccagcgagcaactccgcttgctccagcattcccattcccaggtacccgaggctggcagcaccacctttcagggtatcattgaagccaatcgtcgctggctggagagggttaagaacgatcctaggctaccactgttctcttccacaccaaagcccaaagcaaccctgtcgctactccaactgggcctcgatgagcacaatcgcgtgaaggtgtaccggttctag

SEQ ID NO: 183403 - DNA, 4383 bp, Artificial Sequence
  derived and/or modified sequence
atggctgggagacctctcagaattggagaccagttggtcctcgaggaggactacgatgagacctatattccatccgagcaggaaatcctcgagtttgcgcgagagattggtatcgaccctattaaggagcctgagcttatgtggctggctagagagggaatcgtggcaccgctgcccggagaatggaagccttgccaggacattactggcgatatttactactttaatttcgccaacggtcagtctatgtgggatcacccctgtgacgaacattataggtccctcgtgatccaagagcgcgctaagctctccacctctggcgcaatcaagaaaaagaagaagaagaaagagaagaaggacaaaaaagatcgagacccgccaaagtcttcccttgcccttggctcatcccttgccccagtccatgtgcctctggggggactagccccactccggggattggtggacaccccaccttcagcactcaggggtagtcaatctgtctctctcggttcgtcggtcgaatctgggcgacaattgggtgaactgatgcttcctagtcagggattgaagaccagcgcctacacaaaaggtctactgggttccatatacgaagataagaccgcgttatcattgctaggcctgggtgaagagacaaacgaagaagatgaggaagagtctgacaaccagtccgtgcacagctcttctgagccgttacgcaatctccacctggatattggcgcacttggaggagactttgaatacgaggaaagtctacgcaccagccagcctgaggaaaagaaggatgtctcccttgattccgatgcagccggaccaccgaccccctgtaagccgtctagtcctggtgcggacagttctctttctagcgctgtaggcaagggacggcaggggtcaggtgccagacccggactaccggaaaaggaagaaaatgagaagagtgagccaaagatctgccgaaacctcgtgactcctaaggccgaccctactggatcagaaccagccaaggcctctgagaaagaggcgcctgaggacaccgtagatgcaggcgaagaggggtccagacgggaagaggccgcaaaggagccaaaaaaaaaggcatcagcccttgaggaaggctcatctgatgcatctcaggaactcgagatctcagaacacatgaaagaaccccagctgtctgattccatcgcctccgatccaaaatctttccatgggctggacttcggcttccggagccgaatctctgagcacctgctcgacgtagacgtgttgtcccctgttctgggcggtgcctgccggcaggctcaacaacccctaggtatcgaggacaaggacgactcacaatcctctcaggatgaactccagtcaaaacaatcaaaggggttagaagagcgcttatcccccccattgcctcacgaagagcgggcacagagtccccctcggtcactcgccaccgaagaggaacctccacaaggccctgagggccagccagagtggaaggaagcagaggagctcggggaggactccgctgccagtcttagtttgcagctgagcctgcagagagaacaggcccctagccccccagccgcatgtgagaaaggcaaggagcaacactctcaggccgaagagttaggccctggccaggaggaagcagaagacccagaggagaaggtggccgtctcccctacaccgcctgtctctccggaagtgcggagcacagaacccgttgcaccacccgagcaactgtcggaagccgcactcaaagcgatggaggaagcagtagcccaggtcctagaacaggatcagagacacctcctcgaaagcaaacaagaaaaaatgcagcagctcagagagaagctgtgccaggaggaggaagaggagattctccgtctacaccaacagaaggagcagtcactctcttctctgagggagcgcctccagaaggctatagaagaagaggaggcgcgtatgcgcgaggaggaatcccagcgtctgagttggctcagggcccaggtacagagctccacccaggctgatgaagaccaaatacgtgccgagcaggaggcttctttgcagaaactgagggaggaactggaatcccagcagaaagccgaacgggctagcctcgaacagaagaataggcagatgctcgaacaattgaaggaagagatcgaggcctccgagaagagcgagcaagccgcactaaacgccgcaaaagagaaagcactgcaacaattaagagaacaattggaaggcgaaaggaaggaagctgttgctaccttagaaaaggaacactctgcggagctggagagactctgttcgagtcttgaggccaagcatagagaggtggtcagttctcttcagaaaaagattcaggaggcgcagcagaaggaagaggctcaattgcaaaagtgcctgggacaggtcgaacatagagtccatcaaaagtcttaccacgtggctggctacgagcacgagctctcaagtctgctgagggagaagcgccaagaagtggaaggggaacatgagagacgcttagataagatgaaggaagagcaccaacaggtcatggcgaaggccagagagcagtatgaggctgaagagcgcaaacagagggctgagctgctcggtcacctaactggcgaactggagcgccttcagagagctcatgagcgggagctggagaccgtaagacaggagcagcataagcgcttggaggacctgcgcaggagacatcgagagcaggaacggaaattgcaggacctcgaactggatttggagaccagggccaaagacgttaaagctcgccttgccttattagaagtccaggaagagactgccagacgagaaaagcagcagctgctggatgttcaacgacaggtagctctgaagtccgaagaggctacagctacccatcagcagctagaggaggcacaaaaggagcacacccatctgttgcagtccaaccagcagctacgagagatactggacgagcttcaagcacggaagttgaagttagagagtcaagtggatctgctacaagcacagtcacagcagctccaaaagcatttcagtagccttgaggccgaggcccagaaaaaacagcaccttttaagggaggtgacagtagaagaaaacaacgcatcacctcatttcgagccagacctccacattgaggacctgcgcaagagtctcgggacaaatcaaactaaagaagtttcctcatcgctgtcccagtcaaaagaggacctgtacctggacagtctgtctagccataacgtatggcacctcctttctgccgagggggtcgccttgcgttccgccaaggagttcctggtccagcagacacgctctatgcgccgaagacagactgctttgaaggccgcacagcaacattggcggcacgagctggcgtccgcccaggaggtggccaaagatcctccagggatcaaggcactggaggatatgagaaaaaacttggagaaggagaccaggcacctcgacgaaatgaagagtgcaatgcgaaaaggccacaacctcctaaagaaaaaagaagagaagctcaaccagcttgaaagttccctgtgggaagaggcaagtgatgagggtacactgggaggctcccctacaaaaaaggccgtgacatttgacctgagtgatatggattccctctcatccgagtcctcagaatcctttagtccccctcaccgagagtggtggcgccaacagagaatagatagtaccccatccctgacaagtaggaaaattcatggccttagccactcattgagacaaattagctcccaactgtcctctgtgttgagtatccttgactcactgaatccgcagagtccccctccactgttggcatccatgcccgctcaattacctccccgagatcccaaaagcacgcctaccccaacgtactacggatctctggctcggttcagcgctctatcctcggctacacccacctcaacgcagtgggcatgggactcaggccaaggcccacggctcccttcaagcgttgcccagactgtcgatgatttcttactggagaagtggcgcaaatattttccaagcggcattcctctgttgagtaactcaccaacccctctcgagtcaagacttggctacatgagcgcctcagaacagctccggctgctacagcatagccactctcaggtcccagaggccggttcgaccacattccagggtatcattgaggctaatcgacgatggttggaaagagtgaaaaatgatccaaggcttcccctgttctcctcgacccccaagcccaaagccacattaagcctgctgcagctggggctcgatgagcacaatagggttaaagtctatcgattctag

SEQ ID NO: 183404 - DNA, 5630 bp, Artificial Sequence
  derived and/or modified sequence
ttgcgcgctgcagggcaacaccccggcgtccctggaagctgggggagcgggagaaataactttatttggactgagagctggagaatgagaataggacctgagagtatattgggctaaggaggagaggtgtttgagcccagatgagtcatggctggacgacccctccgcataggagatcagctggttctggaagaagattatgatgagacctacattcctagtgagcaagaaattcttgaatttgcccgggagattggtattgatcccatcaaggaaccagaactgatgtggctggcgcgagagggcatcgtggccccactgcctggagagtggaaaccatgccaggacatcacaggtgacatttactatttcaacttcgccaacgggcagtctatgtgggaccatccatgtgacgaacactatcggagcttggtgatccaagagcgggcaaagctgtcaacttctggggccattaagaagaagaaaaaaaaaaaggaaaagaaagacaagaaggacagagacccccccaaaagttcgctggccttgggttcctcattagccccagttcatgttcctcttgggggcctggctcctttacgaggtcttgtggataccccaccctctgctcttcgtggatctcaaagcgtgagcctggggagctcagtggagtctggacgtcagcttggagaactcatgctgccttcacagggtctcaagacctctgcttatacaaagggtctcttgggctccatatatgaggacaagactgctctcagcctcttgggtttaggagaagaaaccaatgaggaggatgaggaggaaagtgacaaccagagtgtccacagctcaagtgagcctcttaggaacctacacctggacattggggcactggggggtgactttgagtatgaggagtctctgagaacaagccagccagaggagaagaaggatgtttctctggattcagatgctgccggtccccctactccctgcaagccctccagcccaggtgcagacagcagtctgagcagtgctgttggcaaagggcgacagggaagtggagcaagacctggtcttccagaaaaagaggaaaatgagaagagtgaacctaagatttgcaggaatctggtgacccccaaggcagaccctacaggcagtgagcctgccaaagcctctgaaaaggaagcaccagaggacacagtagatgcaggagaggagggttccaggagggaagaggcagccaaggagccaaagaagaaggcttctgctctggaagagggcagttcagacgccagccaagaactggaaattagtgaacacatgaaggaaccacagctctcagactccatagcttctgaccccaagtccttccatggcctggacttcggttttcgcagccggatctcggagcacctgctggatgttgatgtgctttccccagtcctgggtggagcttgtcggcaggcccagcaaccactgggaatagaagacaaggatgacagccagtccagccaagatgagctgcagagcaagcagtccaaaggcctggaggagaggttatctcctccacttccacacgaggagcgggcccagagtccccctcgcagcctggccactgaagaagagcctccccagggccccgaggggcagcccgagtggaaggaggcagaggagcttggggaggactctgcagccagcctcagcctgcagctgtccctccagagggagcaggccccaagcccacctgctgcctgtgagaagggcaaggagcagcattcccaggccgaggagctgggccctgggcaggaagaggcagaggatcctgaggagaaggtggcggtcagccccaccccgccagtctctccagaggtgcgatccacagagcctgtggctcccccagagcagctctcagaggctgcactaaaggccatggaagaggcagtggcccaagtactcgagcaagaccagaggcacctgctggaatccaagcaagagaagatgcagcaactgcgggagaagctgtgccaagaggaggaagaggagatcctccggcttcaccagcagaaagagcaatctctcagttccttgagggagcggctgcagaaagccattgaggaggaggaggcccggatgagagaggaggaaagccagaggctatcctggctccgagctcaggtccagtccagcacacaagcagatgaggaccaaatcagggctgagcaagaggcttccctgcagaaactgagagaagagttggagtctcaacagaaggctgagagggccagcttggaacagaaaaataggcaaatgctggagcagctcaaggaagagatagaggcttcggagaagagcgagcaggctgccctgaatgctgcaaaggagaaggctctgcagcagctgagggagcagctggaaggggagaggaaagaagctgtggcaacgctggagaaggagcacagtgctgagctggagcggctctgctcctcattggaggccaagcaccgggaggtggtctccagcctccagaagaagatacaggaagctcaacagaaagaggaggcccagctgcagaagtgccttgggcaagtggagcacagagttcaccagaagtcttatcacgtggctgggtatgagcacgagctcagcagtctcctgcgagagaagcgccaggaagtggaaggggagcatgagaggaggttggacaagatgaaggaggagcaccagcaagtgatggctaaggccagagagcagtatgaagctgaggagaggaagcagcgggctgagcttctggggcacctgaccggagagctggagcgcctgcagagggcccatgaacgagaactggagactgtgaggcaggagcaacacaagcgtcttgaggacttgcggcgccggcacagggagcaggaaaggaagctccaggatttagagttggaccttgaaaccagagctaaagatgtcaaggccagattggctctgctggaggtccaggaggagaccgcccggagggagaagcagcagctgcttgatgtgcagaggcaggttgctctgaagagtgaggaagccacagccacccatcagcagctggaggaggcacagaaggagcacacccacctgttgcagtcaaaccagcagctccgagaaattcttgatgagctgcaggcccgcaagctgaagctggagtcccaagtggatctgctgcaggctcagagccagcaactgcagaaacacttcagcagcctggaggctgaagctcaaaagaagcagcacctgttgagagaagtgacagttgaggaaaataatgcttccccacattttgagccagatctccatattgaggacctgaggaaatcccttggaacaaaccagaccaaagaggtgtcttcttctctctcccagagcaaggaggacttatacttggacagcctgtcctcccacaatgtctggcacctcctctctgctgagggggtagccctccgtagtgccaaggagttccttgtgcagcagacacgctccatgcggaggcggcagacagctctgaaagctgcccagcagcattggcgccatgagctggccagtgcgcaggaggtggccaaagacccaccaggcatcaaggccctggaagatatgcgcaagaacctggagaaggagaccaggcacctggatgagatgaagtcggccatgcggaaaggccacaacctgctgaagaagaaagaggagaagctgaatcagttggagtcctctctttgggaagaggcctcagatgagggcactctgggaggatcccccaccaagaaggcagtaaccttcgacctcagtgacatggacagcctgagcagtgaaagttctgaatctttttccccgcctcaccgtgagtggtggcggcagcagaggatcgactcaaccccgagtctcacctcccgcaagatccacgggcttagccactccctccggcagatcagcagccagctgagcagtgtcctcagcatcctggacagcctcaaccctcagtcgccgccgccgctcctcgcctccatgccagcccagctccctccccgggaccctaagagcacccccacccccacctactatggctccctggccaggttctcagccttatcatctgctacacccacgtccacccaatgggcctgggattcagggcaggggcccaggctcccctcctctgtggctcaaacggtggacgacttcctgttggagaagtggcgcaagtattttccatctggcatcccgctgctcagcaacagccccaccccgctggagagcaggctgggttacatgtctgccagtgagcagctccggctcctacagcactcccattcgcaagtccctgaggcgggcagcaccacctttcagggcataattgaggccaaccggaggtggctggaacgtgtcaagaatgaccccaggttacctctcttctcgtcaacacccaagccaaaagctactttgagcctcctgcagctgggccttgatgagcacaacagagtgaaggtgtatcgcttctgaggccctgagcaggggcttggggcagcccagcctctcctccacccagaccaagtgcctgaggagctgcctgccttcttccatctgagaaagcaccctccttccccctttgacttgcaggagccaccagggaccagggggttgagtggaacagtaaagccacacattctgtgactatataacctatctcaggctaaaatgtgtggactcgtacgagctcttgtcattgacatggcaagctgatggcgtgcggtggctgcggggtatcagggccgggagccctttgggaggaagggaggcgttagaggagctgccttcggaggctcagggagtccctttggagctggttgtttccttggccctgcagcgcactgctcggggctcccaaggaggttgtgtgtatggttcttaattcatcaggacaaagacccccagcatgtgtgtaccctgggacccgatttctctgggcccacatctatctccaatacctcagcctcagatcagaccctttcttttttgtctttcttctcttaatttttaaatgcctcttttcttgagcattccatctctctttttgaccctctcaggactgggcttagctgtccagagccctgccggagggtgctgggggctgtccctctgcaggcactgtgttttcctcaggggctgtcctcagaacacccctcctgctccctggggctcctcagggagccatttcagctggagtctcaggtctcaaaaacaacttctccaggaggccaaaaaaagactgggttggcttctggtcctcatgatggcttttatcctcctgggacactttgggtatattcatgggcattgtttccatctgtcttttctacctgtgccacccctgccctgattccacggctgcctcaggcaggcaggcaaggagctaggccggtgcccggccctggcagcaaggggtctttgtgcagttggagatgctgccgttgtggcagagcgtcctgcagccccgcttccatcagcaggctctggggtgggggctttgcaggggatgctctctgatgtttgttccgttgtttaaataaaatgcacttatttttgtttttttttttgcaagc

SEQ ID NO: 183405 - DNA, 4383 bp, Artificial Sequence
  derived and/or modified sequence
atggccggcagacccctgagaatcggcgaccagctggtgctggaggaggactacgacgagacctacatccccagcgagcaggagatcctggagttcgccagagagatcggcatcgaccccatcaaggagcccgagctgatgtggctggccagagagggcatcgtggcccccctgcccggcgagtggaagccctgccaggacatcaccggcgacatctactacttcaacttcgccaacggccagagcatgtgggaccacccctgcgacgagcactacagaagcctggtgatccaggagagagccaagctgagcaccagcggcgccatcaagaagaagaagaagaagaaggagaagaaggacaagaaggacagagacccccccaagagcagcctggccctgggcagcagcctggcccccgtgcacgtgcccctgggcggcctggcccccctgagaggcctggtggacaccccccccagcgccctgagaggcagccagagcgtgagcctgggcagcagcgtggagagcggcagacagctgggcgagctgatgctgcccagccagggcctgaagaccagcgcctacaccaagggcctgctgggcagcatctacgaggacaagaccgccctgagcctgctgggcctgggcgaggagaccaacgaggaggacgaggaggagagcgacaaccagagcgtgcacagcagcagcgagcccctgagaaacctgcacctggacatcggcgccctgggcggcgacttcgagtacgaggagagcctgagaaccagccagcccgaggagaagaaggacgtgagcctggacagcgacgccgccggcccccccaccccctgcaagcccagcagccccggcgccgacagcagcctgagcagcgccgtgggcaagggcagacagggcagcggcgccagacccggcctgcccgagaaggaggagaacgagaagagcgagcccaagatctgcagaaacctggtgacccccaaggccgaccccaccggcagcgagcccgccaaggccagcgagaaggaggcccccgaggacaccgtggacgccggcgaggagggcagcagaagagaggaggccgccaaggagcccaagaagaaggccagcgccctggaggagggcagcagcgacgccagccaggagctggagatcagcgagcacatgaaggagccccagctgagcgacagcatcgccagcgaccccaagagcttccacggcctggacttcggcttcagaagcagaatcagcgagcacctgctggacgtggacgtgctgagccccgtgctgggcggcgcctgcagacaggcccagcagcccctgggcatcgaggacaaggacgacagccagagcagccaggacgagctgcagagcaagcagagcaagggcctggaggagagactgagcccccccctgccccacgaggagagagcccagagcccccccagaagcctggccaccgaggaggagcccccccagggccccgagggccagcccgagtggaaggaggccgaggagctgggcgaggacagcgccgccagcctgagcctgcagctgagcctgcagagagagcaggcccccagcccccccgccgcctgcgagaagggcaaggagcagcacagccaggccgaggagctgggccccggccaggaggaggccgaggaccccgaggagaaggtggccgtgagccccaccccccccgtgagccccgaggtgagaagcaccgagcccgtggccccccccgagcagctgagcgaggccgccctgaaggccatggaggaggccgtggcccaggtgctggagcaggaccagagacacctgctggagagcaagcaggagaagatgcagcagctgagagagaagctgtgccaggaggaggaggaggagatcctgagactgcaccagcagaaggagcagagcctgagcagcctgagagagagactgcagaaggccatcgaggaggaggaggccagaatgagagaggaggagagccagagactgagctggctgagagcccaggtgcagagcagcacccaggccgacgaggaccagatcagagccgagcaggaggccagcctgcagaagctgagagaggagctggagagccagcagaaggccgagagagccagcctggagcagaagaacagacagatgctggagcagctgaaggaggagatcgaggccagcgagaagagcgagcaggccgccctgaacgccgccaaggagaaggccctgcagcagctgagagagcagctggagggcgagagaaaggaggccgtggccaccctggagaaggagcacagcgccgagctggagagactgtgcagcagcctggaggccaagcacagagaggtggtgagcagcctgcagaagaagatccaggaggcccagcagaaggaggaggcccagctgcagaagtgcctgggccaggtggagcacagagtgcaccagaagagctaccacgtggccggctacgagcacgagctgagcagcctgctgagagagaagagacaggaggtggagggcgagcacgagagaagactggacaagatgaaggaggagcaccagcaggtgatggccaaggccagagagcagtacgaggccgaggagagaaagcagagagccgagctgctgggccacctgaccggcgagctggagagactgcagagagcccacgagagagagctggagaccgtgagacaggagcagcacaagagactggaggacctgagaagaagacacagagagcaggagagaaagctgcaggacctggagctggacctggagaccagagccaaggacgtgaaggccagactggccctgctggaggtgcaggaggagaccgccagaagagagaagcagcagctgctggacgtgcagagacaggtggccctgaagagcgaggaggccaccgccacccaccagcagctggaggaggcccagaaggagcacacccacctgctgcagagcaaccagcagctgagagagatcctggacgagctgcaggccagaaagctgaagctggagagccaggtggacctgctgcaggcccagagccagcagctgcagaagcacttcagcagcctggaggccgaggcccagaagaagcagcacctgctgagagaggtgaccgtggaggagaacaacgccagcccccacttcgagcccgacctgcacatcgaggacctgagaaagagcctgggcaccaaccagaccaaggaggtgagcagcagcctgagccagagcaaggaggacctgtacctggacagcctgagcagccacaacgtgtggcacctgctgagcgccgagggcgtggccctgagaagcgccaaggagttcctggtgcagcagaccagaagcatgagaagaagacagaccgccctgaaggccgcccagcagcactggagacacgagctggccagcgcccaggaggtggccaaggacccccccggcatcaaggccctggaggacatgagaaagaacctggagaaggagaccagacacctggacgagatgaagagcgccatgagaaagggccacaacctgctgaagaagaaggaggagaagctgaaccagctggagagcagcctgtgggaggaggccagcgacgagggcaccctgggcggcagccccaccaagaaggccgtgaccttcgacctgagcgacatggacagcctgagcagcgagagcagcgagagcttcagccccccccacagagagtggtggagacagcagagaatcgacagcacccccagcctgaccagcagaaagatccacggcctgagccacagcctgagacagatcagcagccagctgagcagcgtgctgagcatcctggacagcctgaacccccagagccccccccccctgctggccagcatgcccgcccagctgccccccagagaccccaagagcacccccacccccacctactacggcagcctggccagattcagcgccctgagcagcgccacccccaccagcacccagtgggcctgggacagcggccagggccccagactgcccagcagcgtggcccagaccgtggacgacttcctgctggagaagtggagaaagtacttccccagcggcatccccctgctgagcaacagccccacccccctggagagcagactgggctacatgagcgccagcgagcagctgagactgctgcagcacagccacagccaggtgcccgaggccggcagcaccaccttccagggcatcatcgaggccaacagaagatggctggagagagtgaagaacgaccccagactgcccctgttcagcagcacccccaagcccaaggccaccctgagcctgctgcagctgggcctggacgagcacaacagagtgaaggtgtacagattctag

SEQ ID NO: 183406 - protein, 525 aa, Artificial Sequence
  derived and/or modified sequence
MGWLFLKVLLAGVSFSGFLYPLVDFCISGKTRGQKPNFVIILADDMGWGDLGANWAETKDTANLDKMASEGMRFVDFHAAASTCSPSRASLLTGRLGLRNGVTRNFAVTSVGGLPLNETTLAEVLQQAGYVTGIIGKWHLGHHGSYHPNFRGFDYYFGIPYSHDMGCTDTPGYNHPPCPACPQGDGPSRNLQRDCYTDVALPLYENLNIVEQPVNLSSLAQKYAEKATQFIQRASTSGRPFLLYVALAHMHVPLPVTQLPAAPRGRSLYGAGLWEMDSLVGQIKDKVDHTVKENTFLWFTGDNGPWAQKCELAGSVGPFTGFWQTRQGGSPAKQTTWEGGHRVPALAYWPGRVPVNVTSTALLSVLDIFPTVVALAQASLPQGRRFDGVDVSEVLFGRSQPGHRVLFHPNSGAAGEFGALQTVRLERYKAFYITGGARACDGSTGPELQHKFPLIFNLEDDTAEAVPLERGGAEYQAVLPEVRKVLADVLQDIANDNISSADYTQDPSVTPCCNPYQIACRCQAA

SEQ ID NO: 183407 - protein, 424 aa, Artificial Sequence
  derived and/or modified sequence
MWGCCVCGALFEGQRLRLLRAPGDGLSSPFTVVSRKWHLGHHGSYHPNFRGFDYYFGIPYSHDMGCTDTPGYNHPPCPACPQGDGPSRNLQRDCYTDVALPLYENLNIVEQPVNLSSLAQKYAEKATQFIQRASTSGRPFLLYVALAHMHVPLPVTQLPAAPRGRSLYGAGLWEMDSLVGQIKDKVDHTVKENTFLWFTGDNGPWAQKCELAGSVGPFTGFWQTRQGGSPAKQTTWEGGHRVPALAYWPGRVPVNVTSTALLSVLDIFPTVVALAQASLPQGRRFDGVDVSEVLFGRSQPGHRVLFHPNSGAAGEFGALQTVRLERYKAFYITGGARACDGSTGPELQHKFPLIFNLEDDTAEAVPLERGGAEYQAVLPEVRKVLADVLQDIANDNISSADYTQDPSVTPCCNPYQIACRCQAA

SEQ ID NO: 183408 - DNA, 1578 bp, Artificial Sequence
  derived and/or modified sequence
atgggctggctgttcctgaaggtgctgctggccggcgtgagcttcagcggcttcctgtaccccctggtggacttctgcatcagcggcaagaccagaggccagaagcccaacttcgtgatcatcctggccgacgacatgggctggggcgacctgggcgccaactgggccgagaccaaggacaccgccaacctggacaagatggccagcgagggcatgagattcgtggacttccacgccgccgccagcacctgcagccccagcagagccagcctgctgaccggcagactgggcctgagaaacggcgtgaccagaaacttcgccgtgaccagcgtgggcggcctgcccctgaacgagaccaccctggccgaggtgctgcagcaggccggctacgtgaccggcatcatcggcaagtggcacctgggccaccacggcagctaccaccccaacttcagaggcttcgactactacttcggcatcccctacagccacgacatgggctgcaccgacacccccggctacaaccaccccccctgccccgcctgcccccagggcgacggccccagcagaaacctgcagagagactgctacaccgacgtggccctgcccctgtacgagaacctgaacatcgtggagcagcccgtgaacctgagcagcctggcccagaagtacgccgagaaggccacccagttcatccagagagccagcaccagcggcagacccttcctgctgtacgtggccctggcccacatgcacgtgcccctgcccgtgacccagctgcccgccgcccccagaggcagaagcctgtacggcgccggcctgtgggagatggacagcctggtgggccagatcaaggacaaggtggaccacaccgtgaaggagaacaccttcctgtggttcaccggcgacaacggcccctgggcccagaagtgcgagctggccggcagcgtgggccccttcaccggcttctggcagaccagacagggcggcagccccgccaagcagaccacctgggagggcggccacagagtgcccgccctggcctactggcccggcagagtgcccgtgaacgtgaccagcaccgccctgctgagcgtgctggacatcttccccaccgtggtggccctggcccaggccagcctgccccagggcagaagattcgacggcgtggacgtgagcgaggtgctgttcggcagaagccagcccggccacagagtgctgttccaccccaacagcggcgccgccggcgagttcggcgccctgcagaccgtgagactggagagatacaaggccttctacatcaccggcggcgccagagcctgcgacggcagcaccggccccgagctgcagcacaagttccccctgatcttcaacctggaggacgacaccgccgaggccgtgcccctggagagaggcggcgccgagtaccaggccgtgctgcccgaggtgagaaaggtgctggccgacgtgctgcaggacatcgccaacgacaacatcagcagcgccgactacacccaggaccccagcgtgaccccctgctgcaacccctaccagatcgcctgcagatgccaggccgcctag

SEQ ID NO: 183409 - DNA, 1578 bp, Artificial Sequence
  derived and/or modified sequence
atggggtggctgttcctgaaagtcttactggccggcgtctcatttagcggctttctgtatcccttggtcgatttttgtatctctggcaagacacgtgggcagaagccaaacttcgtgattatcctcgccgacgacatgggttggggtgacctgggagctaattgggccgagaccaaggacacagcgaatctagacaaaatggcctctgaaggaatgcgctttgtcgattttcacgccgcagcgtcaacgtgttctcctagtcgcgcatcccttctgaccggtaggttgggactccgcaacggcgtgacgaggaactttgcagtgacatcggtgggcgggctgccgctgaatgagaccaccctcgccgaagtgctccagcaagccggatatgtgactggcattattgggaagtggcatctcggacatcacggatcataccaccccaactttcggggtttcgactactactttggtattccctattcccacgacatgggctgtactgacacccccggttacaaccacccaccttgccccgcctgtccacaaggagacggcccttcccgaaatctgcaacgggactgttataccgacgttgcgctgcctctgtacgaaaatcttaacatagtagaacagccagtgaacctctcaagcctggctcagaagtacgcggagaaggcaacacagtttatccagcgagcctcgacaagtggacggcccttcctgctttacgtggctctcgcccatatgcacgtgcccctgcctgtaacacaactgccagcagcccccagaggcaggagcttatatggcgccgggttgtgggagatggattctctggtgggccaaataaaagataaggtagaccacacagtcaaagagaatactttcctctggttcacaggtgacaatgggccctgggcccagaagtgtgagctagccggcagcgtgggccccttcacagggttctggcagacccgtcagggcggttcccccgctaaacagaccacctgggagggaggccatcgggtacctgccttagcttactggcccggccgcgtgcccgttaacgtcacctcgacagctctgctgagtgtgctggacattttcccgactgttgttgctttggcccaggcctctttaccccagggacggcgcttcgacggggtggatgtgtcagaggttcttttcggcagatcccagccagggcatagagtcctgtttcaccccaacagcggggccgccggagaatttggcgctctgcagacagtacgcttggagcgctacaaggccttctacatcactggaggcgcccgggcttgtgatggctccactggccccgaattgcagcacaagtttcctctcatattcaatttggaggacgacaccgcggaagccgtccccctcgaaaggggcggagcagagtatcaggccgtcctccctgaggtcaggaaagtgctcgccgacgtactccaggacatcgctaacgataacatctcttcagccgattatacccaagacccatctgtgactccttgctgcaatccatatcaaatcgcctgtcgatgccaggccgcctag

SEQ ID NO: 183410 - DNA, 1578 bp, Artificial Sequence
  derived and/or modified sequence
atgggctggctgttcctgaaggtgctgctggccggcgtgtccttcagcggcttcctgtaccccctggtggacttctgcatcagcggcaagacccggggccagaagcccaacttcgtcatcatcctggctgatgacatgggctggggagacctgggcgccaactgggccgagaccaaggacacagccaacctggacaagatggccagcgagggcatgagatttgtggacttccacgccgccgccagcacctgcagccccagccgggccagcctgctgaccggccgcctgggcctgagaaatggagtgaccaggaactttgctgtgacctctgtgggcggcctgcccctgaatgagaccaccctggccgaggtgctgcagcaggccggctacgtgacaggcatcatcggcaagtggcacctgggccaccacggcagctaccaccccaacttccggggctttgactactacttcggcatcccctacagccatgacatgggctgcacagacaccccaggctacaaccaccccccctgcccagcctgcccccagggagatggccccagcaggaacctgcagagggactgctacacagatgtggccctgcccctgtatgagaacctgaacatcgtggagcagcctgtgaacctgagcagcctggcccagaagtatgcagagaaggccacccagttcatccagagggccagcaccagcggccggcccttcctgctgtatgtggccctggcccacatgcacgtgcccctgcctgtgacccagctgcctgctgccccccggggccgcagcctgtatggagctggcctgtgggagatggacagcctggtgggccagatcaaggacaaggtggaccacacagtgaaggagaacaccttcctgtggttcaccggggacaatggcccctgggcccagaagtgtgagctggccggctctgtgggccccttcaccggcttctggcagacccggcagggcggcagccctgccaagcagaccacctgggagggcggccaccgggtgcctgccctggcctactggccaggccgggtgcctgtgaatgtgaccagcacagccctgctgtctgtgctggacatcttccccaccgtggtggccctggcccaggccagcctgccccagggccgccgctttgatggagtggatgtgtctgaggtgctgtttggccgcagccagcccggccaccgggtgctcttccaccccaacagcggggccgccggggagtttggagccctgcagacagtgcggctggagcgctacaaggccttctacatcaccggcggggcccgggcctgtgatggcagcacaggccctgagctgcagcacaagttccccctcatcttcaacctggaggatgacacagctgaggccgtgcccctggagcggggcggcgctgagtaccaggccgtgctgcctgaggtgaggaaggtgctggctgatgtgctgcaggacatcgccaatgacaacatcagcagcgctgactacacccaggaccccagcgtgaccccctgctgcaacccctaccagatcgcctgccgctgccaggccgcctag

SEQ ID NO: 183411 - DNA, 1578 bp, Artificial Sequence
  derived and/or modified sequence
atgggctggctgttcctgaaggtgctgctggccggcgtgagcttcagcggattcctatacccgctggttgacttctgtatttcaggtaaaaccagaggacagaagccaaatttcgtgatcattctggccgacgacatgggatggggcgatctgggggccaattgggctgaaaccaaagataccgcaaatctggataaaatggccagcgaggggatgcggttcgtagactttcacgccgccgctagcacttgctctcctagcagggctagcttgttgacagggcggttaggccttaggaacggggtgaccaggaatttcgcagtcaccagtgtgggggggcttccactgaacgagacaaccctggccgaagtcctgcagcaggctggttacgtgacagggattataggtaaatggcacctgggccaccacggctcataccaccccaactttagaggttttgactattactttggcataccatactcccacgacatgggctgtacagacacacctgggtataaccaccctccgtgtcccgcatgcccccaaggcgacggcccctctcgaaatttgcagcgggactgctataccgatgtagcgctaccactctatgagaacctgaatattgtcgagcagccggttaatctgagcagtctggcacaaaagtacgctgagaaagccacccagtttatccagagggcttctacatccgggcgcccgtttcttctctacgtggcccttgctcacatgcacgtgccgctccccgtgactcaattgcccgctgccccgcgcggacgttccctgtatggcgcaggactctgggaaatggatagcctggtggggcagatcaaggacaaggtggatcatactgttaaggaaaatacatttctatggttcacaggcgacaacggtccctgggcgcaaaaatgcgagctggccggctccgtgggacctttcactggattttggcagacgcgccagggcggtagtcccgccaaacagacaacctgggaaggaggacaccgagttcctgccctggcatattggcccggaagggttcctgtaaatgtaacctctactgcactgctgagcgtgcttgatatattccctactgtggtggctctggcgcaggcctctctaccacaggggcggagattcgacggagtggatgttagtgaggtgttgttcggtcggtctcagcctggacaccgtgtgttgtttcaccccaattctggagccgcaggggagtttggagcactccagaccgtcagacttgagcggtacaaggccttctatataaccggcggggcgagagcatgcgacggatctaccggacccgagctgcagcataagtttccactgatcttcaaccttgaggacgacactgccgaggcagtccccctcgaaagagggggagctgagtatcaagccgtgctccctgaggtccggaaagtcctagctgatgtgctgcaggatatcgctaatgacaacatctcctcagccgactacacacaggacccaagtgttacgccctgctgcaatccctaccaaattgcctgcagatgtcaggcggcatag

SEQ ID NO: 183412 - DNA, 1578 bp, Artificial Sequence
  derived and/or modified sequence
atgggctggttgttccttaaggttctgcttgcaggtgtttccttctccggcttcctgtacccgttggtggatttctgcattagtgggaaaaccagggggcagaaacccaacttcgtaataattctcgccgacgacatgggctggggagacctcggggcaaactgggccgaaaccaaagataccgctaatttggataagatggctagcgaaggaatgcggtttgtagatttccacgctgccgctagcacatgtagtccgagtagagcgtcattgcttactgggaggcttgggctgcggaatggggttacccgcaacttcgcagtcacgtccgtgggtggtttgccgctgaatgagacgacacttgccgaagtcctacagcaggctggctatgtgactggcataattggaaagtggcatctcggacatcatgggagttaccatcccaatttccgaggtttcgactactactttggcatcccttatagtcacgacatgggctgcaccgataccccaggatacaaccacccgccatgccccgcatgtccccaaggagacggcccaagccgcaacttgcagcgagactgttacaccgatgttgcccttccgctgtacgaaaacttgaacattgtggaacagccagtcaacttaagcagcctcgcccagaaatatgcagagaaggccacgcagtttatccagcgcgcttccacaagcgggcgtccctttctgctatacgttgctcttgcccacatgcacgtgccactcccggtgacacagttgcccgctgcccctcggggacgttccctctacggcgctggtttatgggagatggattctctcgtcgggcagatcaaagacaaggtggaccacacagttaaggaaaatacattcttgtggttcacaggcgataacggcccttgggcccagaaatgcgagttggctgggtcagtgggcccatttaccggtttttggcagacccgtcagggagggagcccggcaaagcagactacctgggaaggtgggcatagagtgccagccctcgcctattggccgggacgcgttccggtgaatgtcaccagcacagctctactttctgtgctggacatcttcccaactgtcgtggcactggcccaggcgagcctgccccaggggcgacgcttcgacggagttgacgtcagtgaggttcttttcggcaggagccagccaggccaccgagtgttgttccacccaaactccggggcagccggtgaattcggggcactgcagaccgttaggttagagcgctacaaggctttctacatcactggcggagccagggcttgtgacggcagcacaggaccagaactccagcataagtttccactcatcttcaatttggaagatgatactgccgaggctgtgcctcttgagaggggaggcgctgagtatcaggccgtgttgcccgaggtgaggaaggttcttgcagacgttttgcaggatattgcaaatgacaacataagctctgcagattatacccaggacccgtctgttactccatgttgcaacccataccagattgcatgcagatgtcaggcggcatag

SEQ ID NO: 183413 - DNA, 4642 bp, Artificial Sequence
  derived and/or modified sequence
ggctgcgcccaggccggcgggcccagcagctgcgaaccgccggcgcaccacctgtttccgcgcccggggacttccccggcggggctcagaagtgtgggatcggtcgcttggcttcccctggcgtcagcgacccagggtaacctcctccactgctgcgtgccgtgcaggcctgcctgtgtgagagccacgtgtgccgcgctctgggcacagccttggaaagtcaggaccgcgacggcagcagagcagaaaccttacagaaacatgaagccctcaaccatctgctactcagttattcggggctgacggcggcttctagaacatccaggtgttctgcagatgcgagaactcatcctgtagtcaccagatggagtcccaaacagccaagcagatgtaaggcctgtgctgtggctctgaggccctgaatacagaagggtcactttcttagtggccaaagagcagttgttgacattgatgtctaattattgaacacgaccagtcattttactgagctgcggtgaggaaacactgaccatagaagatcaagccaaatgagggattgcaaatttcctgattcttttgaattaggattccagatgggggcctcatttctacagcccccaacattcctatagccgttatcactgccatcaccactgccaccagcatcttcttgcagattccacccctgctccccagagacttcctgctttgaaagtgagcagaaaggaagctctcagaaaaatctctagtggtggctgccgtcgctccagacaatcggaatcctgccttcaccaccatgggctggctttttctaaaggttttgttggcgggagtgagtttctcaggatttctttatcctcttgtggatttttgcatcagtgggaaaacaagaggacagaagccaaactttgtgattattttggccgatgacatggggtggggtgacctgggagcaaactgggcagaaacaaaggacactgccaaccttgataagatggcttcggagggaatgaggtttgtggatttccatgcagctgcctccacctgctcaccctcccgggcttccttgctcaccggccggcttggccttcgcaatggagtcacacgcaactttgcagtcacttctgtgggaggccttccgctcaacgagaccaccttggcagaggtgctgcagcaggcgggttacgtcactgggataataggcaaatggcatcttggacaccacggctcttatcaccccaacttccgtggttttgattactactttggaatcccatatagccatgatatgggctgtactgatactccaggctacaaccaccctccttgtccagcgtgtccacagggtgatggaccatcaaggaaccttcaaagagactgttacactgacgtggccctccctctttatgaaaacctcaacattgtggagcagccggtgaacttgagcagccttgcccagaagtatgctgagaaagcaacccagttcatccagcgtgcaagcaccagcgggaggcccttcctgctctatgtggctctggcccacatgcacgtgcccttacctgtgactcagctaccagcagcgccacggggcagaagcctgtatggtgcagggctctgggagatggacagtctggtgggccagatcaaggacaaagttgaccacacagtgaaggaaaacacattcctctggtttacaggagacaatggcccgtgggctcagaagtgtgagctagcgggcagtgtgggtcccttcactggattttggcaaactcgtcaagggggaagtccagccaagcagacgacctgggaaggagggcaccgggtcccagcactggcttactggcctggcagagttccagttaatgtcaccagcactgccttgttaagcgtgctggacatttttccaactgtggtagccctggcccaggccagcttacctcaaggacggcgctttgatggtgtggacgtctccgaggtgctctttggccggtcacagcctgggcacagggtgctgttccaccccaacagcggggcagctggagagtttggagccctgcagactgtccgcctggagcgttacaaggccttctacattaccggtggagccagggcgtgtgatgggagcacggggcctgagctgcagcataagtttcctctgattttcaacctggaagacgataccgcagaagctgtgcccctagaaagaggtggtgcggagtaccaggctgtgctgcccgaggtcagaaaggttcttgcagacgtcctccaagacattgccaacgacaacatctccagcgcagattacactcaggacccttcagtaactccctgctgtaatccctaccaaattgcctgccgctgtcaagccgcataacagaccaatttttattccacgaggaggagtacctggaaattaggcaagtttgcttccaaatttcatttttaccctctttacaaacacacgctttagtttagtcttggagtttagttttggagttagccttgcatatcccttctgtatcctgtccctcctccacgccgacccgagagcagctgagctgcgctggctctgggcagggagtgtgccttaatgggaagcacacgggctttggagtcaggcacaggtgccagctccagcttttgaacttgggcaattgtttaacctaacctgcaagttgattttgagggttaaataaaggcatacatgaaaatgcctggcaaattacctgacacagagcagacattcaatacattttagtttccttgtttctctggttcccagtttctctggtcattttggtgtaaatccattctaattagtatttagggcagagcttctctctcttttctctttttttccttccacaaaccagtgtactcactggtctccatctttaatatgcaaacaaatcacctgggatcttgtgagaatccggattccgtctcagtagggctcgagtagatcctgaaatcctacatttctatcaaacaatgccttgaggagcacagatttagaccaaagttaggtcgttttccagatctcagagcagacgagtccatggataagtctgtggcccaatccccttcctctccttttaagggtgaaatgactgcatttaaaagaagttaaagagttcctcctgtcccctataaccacaaggaaacaaaaaaatatataaaaacctcaaaaatgcattgccatgattttattattagtgtccaaaatgggactcccaagtaataaatgatttattccagccacagccaaaaaagactttgcctggctaaaagagtctctctctaagtatgtaatatacaagaaatacaattcaaagagatgttcctataagtacattttttacacggcatatatttaaaaaggaggccccttttaatataaaattccggttatataccaatatggttaattagcatttacactatagtttgaacgtattttaaatagcatgatgtgtatacaatgtctcccgcgcccattggcaaccagggtcgtgggaagcttggtgaggagttaaccaggtcctgtggtttaagcagtggagcacccgggattcctgcccccctttctgctcacacaattgcactccattcttccgccttccttgttttctccaaaaccacctgataggggggatgtcctgatttctgaggtgtgcttctcatcatgactgcttcgttttgcccttctgatttccacggcacaagattatctaccaaaatcaaaacagaatggccttactcttctcaggaagaggctggtaggcaggtgcattatcaacaggtctgtgcccatgcagagtgagcagggagaggctgggcactgtggaatttttctgtctgaactcgctcatggccacagaatggtcacccagcttatttaggtgtagacaagtatgacacagttctagaaaatactgactataaaaatgtctctgtgtgtgtgtgtatgtatttatatgtatatgtatatatttttaaaaggctcatcttacttgtaaacatggactgctcaatcactattaaaaagtcagtttaggctgggcgcggtggctcacgcctgtaatcccagaactttgggaggctgaggtgggtggatcactaggtcaggagtttgagaccagcctggccaacatggtgaaaccccatcgctactaaaaaatacaaaaattagccgggcatggtggcgctcacctgtaatcccagctactcgggaggctgaggcaggagagaatcgcttgaaccggggaggtggaggctgcagtgagccgagatcgcaccactgcactccagcctgggcgatggagcaagactccatctcaaaaaaaaaaaagtcagtttaggctgggcgcagtggctcacacctgtaatcccagcactttaggaggctgaggggggtgatcacctgaggtcaggagtttgagaccagcctggccaacatggtgaaatcctgtctctactaaaaatacaaaatttagctgggcatggtagcatgcctgaaaccccagctacttgggaggctgaggcactagaatcacttgaacctaggaggtggaggttgcagtgagtggagatcacgccaacacattctagcctgagggacagagtgagactctatcatctc

SEQ ID NO: 183414 - DNA, 1275 bp, Artificial Sequence
  derived and/or modified sequence
atgtggggctgttgtgtgtgtggggctctgttcgaagggcagcgtttgcgcttacttagggcccctggggacggactgtccagcccgttcactgtggtttcacgtaagtggcacctcggacatcatggcagctaccacccaaacttccgagggttcgattattattttgggataccgtacagccacgacatgggatgtaccgacacccccggctataatcatcccccctgccccgcctgcccacagggtgacgggcctagtaggaatctgcaacgagattgttacaccgatgttgctctgcctctgtatgagaatctgaacatcgtggagcagccagtgaatctcagttctctggcccagaagtacgcagagaaagctacccagtttatccagagagcatctacaagtgggcgcccttttctgttatatgtggcgcttgctcacatgcacgtccccttacccgtcacgcagctgcccgccgctccccggggcaggtcattgtatggggccgggctgtgggagatggactccctggtagggcaaatcaaggataaggtggaccacaccgtgaaagagaacactttcctgtggttcactggagacaatggcccctgggcccagaaatgcgagctcgcagggtctgtggggcctttcactgggttctggcagaccaggcagggaggcagccctgccaagcagaccacctgggagggggggcatagggtcccggcactggcttattggccggggcgagtacctgtgaacgtgaccagcaccgccctgcttagcgtcctggatatcttccctactgtggtagcccttgcccaggccagcctgccccaggggcggagattcgacggcgtcgacgtgtcagaagtgctctttggacgctcacagccaggtcacagggtgctgtttcatcctaattctggcgctgctggagagtttggggcacttcagacagttagattggagcgctacaaggcgttttacatcacgggtggtgctcgggcttgtgatggcagtacaggaccagagctccagcataagtttcctctgattttcaacctggaggacgataccgcagaagccgtaccattagaacggggaggggccgaataccaggcagtcctgcccgaggttagaaaggtgctggccgacgtgctgcaggacatcgccaacgataacatttcttccgccgactatacccaggaccccagcgtgacaccttgttgtaacccttaccaaatagcctgccgctgccaggctgcatag

SEQ ID NO: 183415 - DNA, 1578 bp, Artificial Sequence
  derived and/or modified sequence
atgggttggctgttcctgaaggtgcttctggccggcgtttcattctccggtttcctctatcctctggtagatttctgtatcagtggcaagaccaggggccagaagcccaacttcgtaattatcttggcagacgacatgggttggggggatctaggagccaattgggctgaaacgaaggacaccgccaacttagacaaaatggcttccgaggggatgcggtttgtcgatttccacgcagcagcctctacatgttctcccagccgggcctcccttcttaccgggcgactgggactaagaaatggggtgactcgaaactttgcggtgacgtctgttgggggtttgcctctcaacgagacaactcttgctgaagtgctgcaacaagctggatatgtgacaggcattattggtaagtggcatttgggccatcacggatcataccatcctaattttcgaggtttcgattactactttgggatcccctattcccatgatatgggctgcacagacacgcctggttacaatcaccctccctgtccagcctgcccgcagggtgacggccccagccgaaacctgcaaagggattgttataccgatgttgccttgcccctctacgagaacctgaacattgtcgaacagcccgtgaacttgtcaagcctggcacagaagtatgctgaaaaggcgacccagttcattcagcgagcgtccacttccgggcgcccctttctcctgtacgttgcattggcacacatgcacgtgcccttgcccgtgacccagctgccagccgcaccaagggggcgctctctgtacggcgctggcctttgggagatggatagtctggtgggacaaattaaagacaaagtcgaccacaccgtgaaggaaaatacctttctttggtttacaggcgataacgggccatgggcacagaaatgcgagctggccggttccgtgggacccttcaccggattttggcagacccgacaaggcggcagccccgcaaaacagacaacctgggagggtggacaccgagtgccggcactcgcttattggccggggcgagttccagtcaacgtcaccagtaccgctttgctcagtgtgctcgacatcttccctactgtcgtggcgttagcccaagcgagtctgccacagggccgccgattcgatggcgtcgacgtttccgaggtcctgtttgggaggtcccagccaggccatcgcgtgctgttccatcccaactctggagccgccggggaatttggcgccctacaaacagtaagactcgagcggtataaagctttctacatcacaggcggggcaagagcttgcgacggctcaactggcccagagctgcaacataagttcccactcatttttaatctagaggatgataccgccgaggccgtcccactggaaagggggggagctgagtaccaggccgtgcttccggaggtgagaaaagtattggctgatgtgcttcaggatatcgcaaatgacaacattagctccgctgattatactcaggatccttctgttaccccttgctgtaacccctaccagatagcctgtcgttgtcaggctgcttag

SEQ ID NO: 183416 - DNA, 1275 bp, Artificial Sequence
  derived and/or modified sequence
atgtggggctgctgcgtgtgtggggccctgtttgagggccagaggctgcggctgctgcgggcccctggagatggcctgagcagccccttcaccgtggtgtccaggaagtggcacctgggccaccacggcagctaccaccccaacttccggggctttgactactacttcggcatcccctacagccatgacatgggctgcacagacaccccaggctacaaccaccccccctgcccagcctgcccccagggagatggccccagcaggaacctgcagagggactgctacacagatgtggccctgcccctgtatgagaacctgaacatcgtggagcagcctgtgaacctgagcagcctggcccagaagtatgcagagaaggccacccagttcatccagagggccagcaccagcggccggcccttcctgctgtatgtggccctggcccacatgcacgtgcccctgcctgtgacccagctgcctgctgccccccggggccgcagcctgtatggagctggcctgtgggagatggacagcctggtgggccagatcaaggacaaggtggaccacacagtgaaggagaacaccttcctgtggttcaccggggacaatggcccctgggcccagaagtgtgagctggccggctctgtgggccccttcaccggcttctggcagacccggcagggcggcagccctgccaagcagaccacctgggagggcggccaccgggtgcctgccctggcctactggccaggccgggtgcctgtgaatgtgaccagcacagccctgctgtctgtgctggacatcttccccaccgtggtggccctggcccaggccagcctgccccagggcagaagatttgatggagtggatgtgtctgaggtgctgtttggccgcagccagcccggccaccgggtgctcttccaccccaacagcggggctgctggggagtttggagccctgcagacagtgcggctggagcgctacaaggccttctacatcactggaggagcccgggcctgtgatggcagcactggacctgagctgcagcacaagttccccctcatcttcaacctggaggatgacacagctgaggccgtgcccctggagcggggcggcgctgagtaccaggccgtgctgcctgaggtgaggaaggtgctggctgatgtgctgcaggacatcgccaatgacaacatcagcagcgctgactacacccaggaccccagcgtgaccccctgctgcaacccctaccagatcgcctgccgctgccaggccgcctag

SEQ ID NO: 183417 - DNA, 1275 bp, Artificial Sequence
  derived and/or modified sequence
atgtggggctgctgcgtgtgcggcgccctgttcgagggccagcggctgagactgttgcgggcccccggagatggactatccagccccttcaccgtggtctctaggaaatggcacctaggacatcacggtagctatcaccctaatttcagagggtttgattattatttcggcataccttactcccatgacatggggtgcaccgataccccagggtacaaccatcccccatgtcctgcatgtcctcagggggatggaccctccagaaatctgcaaagagactgttatacagacgttgctctccccctgtacgagaacctcaatattgtagagcagccagtcaatttgagcagcttagctcagaagtacgcggagaaggctacacagtttattcaaagggcaagtactagcggtcggcctttcctcctatacgtagccctcgcccacatgcacgtgcccttaccagtcacccagctccccgcggctccgaggggccgaagcctatacggggctgggctgtgggagatggacagcctggtcggacagataaaagataaagtggaccacacagtgaaggagaacactttcctttggttcaccggagataatggcccatgggcgcagaaatgcgaattggctggatcagttggccctttcaccggcttttggcagactagacagggcggctccccggccaagcaaacgacttgggaaggcggacaccgtgtacctgctctggcgtactggcccgggagggtaccagttaacgtgacatctactgccctactgtccgtcctagacatcttccctacagtagtggcgctggcgcaggcaagtctgcctcagggcagaagatttgatggcgtggacgttagtgaagtcttattcgggcgaagccagcccggtcaccgtgtgctgtttcatcccaatagtggcgccgctggggagttcggagccttacaaacggtgagactagagcgctataaagcattttatatcacgggaggtgcaagggcctgcgatggttccacaggtccagagcttcagcacaagtttccactgatatttaatctggaagacgacaccgccgaggcagtgccccttgagaggggaggcgcagaataccaggctgttctgccggaggttcgtaaggtacttgccgatgttttgcaggacattgccaacgataacatttcctcggcggactacacgcaggatcctagtgttaccccctgctgtaacccctaccaaatagcttgtagatgtcaggccgcgtag

SEQ ID NO: 183418 - DNA, 1578 bp, Artificial Sequence
  derived and/or modified sequence
atgggctggctgttcctgaaggtgctgctggccggcgtgagcttcagcggctttctttaccccttagtggacttctgcatttccggaaaaacgaggggccaaaaaccaaattttgtgataatactcgcagacgacatgggatggggcgatctgggagcaaactgggccgagacaaaggacaccgccaaccttgacaagatggcctccgaggggatgaggttcgtagatttccatgccgctgcaagtacctgttccccatccagggcaagcctgctcacgggcagattaggcctccgcaatggagtgacccgcaactttgccgtcacctcagtggggggattgcccttgaatgagaccacccttgcagaggtgttacagcaggctggttacgtgacaggcataatagggaaatggcatctgggacaccacggatcttatcatcccaatttcagagggttcgattactacttcggtattccttactcccatgacatgggctgtacggacactccaggatataaccacccgccttgcccagcttgtccacaaggcgatggccccagtagaaatcttcagagagactgctacaccgatgtagccctccctctatacgagaacctcaacatcgtggaacagcccgtgaacttgtcaagcctagctcagaaatacgccgagaaagctacacaattcattcaaagggcaagcacatcaggtcgtccctttctgctgtatgtcgccttggcccacatgcacgttcctctgcctgtcactcagctgcccgccgcccctcggggccgctccctctacggggcaggtttgtgggaaatggactccttggtgggccaaattaaagataaagtggaccatacagtcaaagagaataccttcctgtggttcacaggcgacaacggaccatgggcacaaaagtgcgagttggctggctctgtgggtcccttcacgggattttggcagacaagacagggcgggtccccagccaagcaaaccacctgggaagggggccaccgcgtgccggcgctcgcctactggcccggaagggtgccggtgaacgtcaccagtacagcactactgagtgtgctggacattttcccgacggtggttgccctggcacaggcctccctgccacaaggccgaaggttcgacggcgtggacgtaagtgaggttctgttcggcaggtcacagcctggtcatagggtcctcttccatccaaactccggggctgctggagaattcggggccctgcagaccgtgcgcctggagcggtacaaagcgttttatatcactgggggcgcacgtgcctgcgacgggtccacagggcctgagcttcagcacaagtttcctttgatttttaatttagaagatgatactgccgaggccgtccccctggagagaggaggcgccgaataccaggcagtactgcccgaggtgcgaaaagtgcttgctgatgtgctgcaggatatagcgaatgataacatctcttcagccgattacacccaagacccatctgtgaccccatgctgcaatccctaccagatagcgtgccgctgccaggcagcatag

SEQ ID NO: 183419 - DNA, 1275 bp, Artificial Sequence
  derived and/or modified sequence
atgtggggctgctgcgtctgtggagccttgtttgagggccagaggctgcggcttttgcgcgcaccgggagatggcttgtctagccccttcaccgtggtgagtaggaagtggcacttgggccaccacggttcgtatcacccaaacttcaggggctttgactactattttggaataccatactcacacgatatgggatgcaccgatacccccggatacaaccatcccccatgccctgcctgtcctcagggtgatggaccatcccgcaatttacagagagactgttatactgatgtggctctcccactttacgagaacttaaacatcgtggagcaaccagtgaacttgtccagtctcgctcagaagtacgccgagaaagcgacgcagtttatacaaagagcttctacgagtggccgaccttttctgctctacgtggccctggctcatatgcatgttcccctgcctgtgacccagctccctgctgctccacgcggacgctctctctatggtgccggtctatgggaaatggattctctggtgggccagatcaaggacaaggtggatcatacggtgaaagagaacacattcctgtggttcaccggcgacaacgggccatgggcacagaaatgcgagctggccggtagtgtggggccattcaccggattttggcagactcgccaaggcggtagccctgcgaaacagactacttgggaagggggtcatagagtcccagctctcgcctactggcccggacgcgttccggtcaacgtaaccagcactgctctgctctccgtgctggacatattccccacggtagtggcccttgcacaggcctcactgccccaaggacgaagattcgatggagtggatgtttccgaagtgcttttcggtcgcagccagccaggccatagagttctcttccacccaaattctggcgctgcaggggaattcggggcactccagactgtgcggctcgagaggtacaaagctttttacatcacaggcggagcccgtgcgtgcgacgggagcaccggtcctgagctgcagcacaaatttcccctgatattcaacctggaagacgatactgccgaagctgtgcctctggagaggggaggggctgagtatcaggcggtcctgcctgaggtgcgcaaggtattggctgacgtgttacaggacattgccaacgataatattagcagtgctgattacacacaggacccgtcagttacgccttgctgtaatccataccagattgcctgccgctgccaggcggcttag

SEQ ID NO: 183420 - DNA, 1578 bp, Artificial Sequence
  derived and/or modified sequence
atgggatggcttttcctgaaagtgttgctggccggtgtctctttctccggtttcttgtaccctttggtggacttctgtatttcgggcaagacaaggggacagaagcctaactttgtcataattctagccgatgatatgggctggggggaccttggggctaattgggccgaaaccaaagataccgctaatctggataaaatggcttctgagggaatgcggttcgtcgacttccacgccgcagcctccacctgcagccctagccgggcttcgcttcttacgggtcgcttgggactgcgcaacggggtcaccagaaacttcgcagtgacatcagtgggcggacttcctctgaatgaaacaacgctggctgaggtgctccagcaggccggatatgttacgggcatcatcggaaagtggcatcttggccaccacggatcctatcatcctaacttccgtggcttcgactattactttgggattccctatagtcacgacatgggatgcaccgataccccgggatacaatcaccctccttgccctgcttgccctcaaggcgacggtccctcccgcaatctgcagcgagactgttataccgatgtggcccttccgctgtacgaaaatcttaacattgtggagcaacctgtgaacctctctagcttggctcagaagtacgctgaaaaggctacccagtttatacaacgggcatctacctccggcaggccctttctgctgtatgtagcactggcccacatgcacgttcccctgccagtgacccagctgccagctgctccacgcggacggagtctgtatggtgccggtctctgggaaatggactcattggtggggcagattaaggataaagtagaccacaccgtgaaggagaacacatttctctggttcactggcgacaatggcccttgggctcaaaagtgtgagctggcagggtcagtggggcctttcaccgggttttggcagacccgtcaaggtgggagccctgctaagcagaccacctgggaaggagggcacagagtgccggctctggcatactggccgggacgcgtgcccgtgaacgtgacatccaccgccctgctgtcagtgctggacatttttccaacagttgtagccctggcccaggcctcccttccccaaggtcgacgattcgacggcgtggatgtgagtgaggtgctctttggacgcagccaaccaggacaccgcgtgctttttcacccgaatagcggggctgctggtgagttcggcgctctccagactgtgcgtctggaacgctataaagctttttacatcacaggcggtgccagggcctgcgacggctccactggtccagaacttcagcacaaattcccacttatcttcaatctcgaggacgacaccgcggaggccgtcccgctggaacgaggcggagccgaataccaggccgtcctgcccgaagttcggaaagtgctggctgacgtgttgcaagatattgccaatgacaacatttcttcagccgactacacccaggacccatctgtgactccatgctgtaatccttaccagattgcctgccgatgccaggctgcatag

SEQ ID NO: 183421 - DNA, 3543 bp, Artificial Sequence
  derived and/or modified sequence
atgtggggttgctgtgtctgtggagccctctttgaggggcagaggctcaggcttctccgggctcctggtgatgggctgtcttcccctttcactgtggtttcccgcaaatggcatcttggacaccacggctcttatcaccccaacttccgtggttttgattactactttggaatcccatatagccatgatatgggctgtactgatactccaggctacaaccaccctccttgtccagcgtgtccacagggtgatggaccatcaaggaaccttcaaagagactgttacactgacgtggccctccctctttatgaaaacctcaacattgtggagcagccggtgaacttgagcagccttgcccagaagtatgctgagaaagcaacccagttcatccagcgtgcaagcaccagcgggaggcccttcctgctctatgtggctctggcccacatgcacgtgcccttacctgtgactcagctaccagcagcgccacggggcagaagcctgtatggtgcagggctctgggagatggacagtctggtgggccagatcaaggacaaagttgaccacacagtgaaggaaaacacattcctctggtttacaggagacaatggcccgtgggctcagaagtgtgagctagcgggcagtgtgggtcccttcactggattttggcaaactcgtcaagggggaagtccagccaagcagacgacctgggaaggagggcaccgggtcccagcactggcttactggcctggcagagttccagttaatgtcaccagcactgccttgttaagcgtgctggacatttttccaactgtggtagccctggcccaggccagcttacctcaaggacggcgctttgatggtgtggacgtctccgaggtgctctttggccggtcacagcctgggcacagggtgctgttccaccccaacagcggggcagctggagagtttggagccctgcagactgtccgcctggagcgttacaaggccttctacattaccggtggagccagggcgtgtgatgggagcacggggcctgagctgcagcataagtttcctctgattttcaacctggaagacgataccgcagaagctgtgcccctagaaagaggtggtgcggagtaccaggctgtgctgcccgaggtcagaaaggttcttgcagacgtcctccaagacattgccaacgacaacatctccagcgcagattacactcaggacccttcagtaactccctgctgtaatccctaccaaattgcctgccgctgtcaagccgcataacagaccaatttttattccacgaggaggagtacctggaaattaggcaagtttgcttccaaatttcatttttaccctctttacaaacacacgctttagtttagtcttggagtttagttttggagttagccttgcatatcccttctgtatcctgtccctcctccacgccgacccgagagcagctgagctgcgctggctctgggcagggagtgtgccttaatgggaagcacacgggctttggagtcaggcacaggtgccagctccagcttttgaacttgggcaattgtttaacctaacctgcaagttgattttgagggttaaataaaggcatacatgaaaatgcctggcaaattacctgacacagagcagacattcaatacattttagtttccttgtttctctggttcccagtttctctggtcattttggtgtaaatccattctaattagtatttagggcagagcttctctctcttttctctttttttccttccacaaaccagtgtactcactggtctccatctttaatatgcaaacaaatcacctgggatcttgtgagaatccggattccgtctcagtagggctcgagtagatcctgaaatcctacatttctatcaaacaatgccttgaggagcacagatttagaccaaagttaggtcgttttccagatctcagagcagacgagtccatggataagtctgtggcccaatccccttcctctccttttaagggtgaaatgactgcatttaaaagaagttaaagagttcctcctgtcccctataaccacaaggaaacaaaaaaatatataaaaacctcaaaaatgcattgccatgattttattattagtgtccaaaatgggactcccaagtaataaatgatttattccagccacagccaaaaaagactttgcctggctaaaagagtctctctctaagtatgtaatatacaagaaatacaattcaaagagatgttcctataagtacattttttacacggcatatatttaaaaaggaggccccttttaatataaaattccggttatataccaatatggttaattagcatttacactatagtttgaacgtattttaaatagcatgatgtgtatacaatgtctcccgcgcccattggcaaccagggtcgtgggaagcttggtgaggagttaaccaggtcctgtggtttaagcagtggagcacccgggattcctgcccccctttctgctcacacaattgcactccattcttccgccttccttgttttctccaaaaccacctgataggggggatgtcctgatttctgaggtgtgcttctcatcatgactgcttcgttttgcccttctgatttccacggcacaagattatctaccaaaatcaaaacagaatggccttactcttctcaggaagaggctggtaggcaggtgcattatcaacaggtctgtgcccatgcagagtgagcagggagaggctgggcactgtggaatttttctgtctgaactcgctcatggccacagaatggtcacccagcttatttaggtgtagacaagtatgacacagttctagaaaatactgactataaaaatgtctctgtgtgtgtgtgtatgtatttatatgtatatgtatatatttttaaaaggctcatcttacttgtaaacatggactgctcaatcactattaaaaagtcagtttaggctgggcgcggtggctcacgcctgtaatcccagaactttgggaggctgaggtgggtggatcactaggtcaggagtttgagaccagcctggccaacatggtgaaaccccatcgctactaaaaaatacaaaaattagccgggcatggtggcgctcacctgtaatcccagctactcgggaggctgaggcaggagagaatcgcttgaaccggggaggtggaggctgcagtgagccgagatcgcaccactgcactccagcctgggcgatggagcaagactccatctcaaaaaaaaaaaagtcagtttaggctgggcgcagtggctcacacctgtaatcccagcactttaggaggctgaggggggtgatcacctgaggtcaggagtttgagaccagcctggccaacatggtgaaatcctgtctctactaaaaatacaaaatttagctgggcatggtagcatgcctgaaaccccagctacttgggaggctgaggcactagaatcacttgaacctaggaggtggaggttgcagtgagtggagatcacgccaacacattctagcctgagggacagagtgagactctatcatctc

SEQ ID NO: 183422 - DNA, 2770 bp, Artificial Sequence
  derived and/or modified sequence
ggctgcgcccaggccggcgggcccagcagctgcgaaccgccggcgcaccacctgtttccgcgcccggggacttccccggcggggctcagaagtgtgggatcggtcgcttggcttcccctggcgtcagcgacccagggtaacctcctccactgctgcgtgccgtgcaggcctgcctgtgtgagagccacgtgtgccgcgctctgggcacagccttggaaagtcaggaccgcgacggcagcagagcagaaaccttacagaaacatgaagccctcaaccatctgctactcagttattcggggctgacggcggcttctagaacatccaggtgttctgcagatgcgagaactcatcctgtagtcaccagatggagtcccaaacagccaagcagatgtaaggcctgtgctgtggctctgaggccctgaatacagaagggtcactttcttagtggccaaagagcagttgttgacattgatgtctaattattgaacacgaccagtcattttactgagctgcggtgaggaaacactgaccatagaagatcaagccaaatgagggattgcaaatttcctgattcttttgaattaggattccagatgggggcctcatttctacagcccccaacattcctatagccgttatcactgccatcaccactgccaccagcatcttcttgcagattccacccctgctccccagagacttcctgctttgaaagtgagcagaaaggaagctctcagaaaaatctctagtggtggctgccgtcgctccagacaatcggaatcctgccttcaccaccatgggctggctttttctaaaggttttgttggcgggagtgagtttctcaggatttctttatcctcttgtggatttttgcatcagtgggaaaacaagaggacagaagccaaactttgtgattattttggccgatgacatggggtggggtgacctgggagcaaactgggcagaaacaaaggacactgccaaccttgataagatggcttcggagggaatgaggtttgtggatttccatgcagctgcctccacctgctcaccctcccgggcttccttgctcaccggccggcttggccttcgcaatggagtcacacgcaactttgcagtcacttctgtgggaggccttccgctcaacgagaccaccttggcagaggtgctgcagcaggcgggttacgtcactgggataataggcaaatggcatcttggacaccacggctcttatcaccccaacttccgtggttttgattactactttggaatcccatatagccatgatatgggctgtactgatactccaggctacaaccaccctccttgtccagcgtgtccacagggtgatggaccatcaaggaaccttcaaagagactgttacactgacgtggccctccctctttatgaaaacctcaacattgtggagcagccggtgaacttgagcagccttgcccagaagtatgctgagaaagcaacccagttcatccagcgtgcaagcaccagcgggaggcccttcctgctctatgtggctctggcccacatgcacgtgcccttacctgtgactcagctaccagcagcgccacggggcagaagcctgtatggtgcagggctctgggagatggacagtctggtgggccagatcaaggacaaagttgaccacacagtgaaggaaaacacattcctctggtttacaggagacaatggcccgtgggctcagaagtgtgagctagcgggcagtgtgggtcccttcactggattttggcaaactcgtcaagggggaagtccagccaagcagacgacctgggaaggagggcaccgggtcccagcactggcttactggcctggcagagttccagttaatgtcaccagcactgccttgttaagcgtgctggacatttttccaactgtggtagccctggcccaggccagcttacctcaaggacggcgctttgatggtgtggacgtctccgaggtgctctttggccggtcacagcctgggcacagggtgctgttccaccccaacagcggggcagctggagagtttggagccctgcagactgtccgcctggagcgttacaaggccttctacattaccggtggagccagggcgtgtgatgggagcacggggcctgagctgcagcataagtttcctctgattttcaacctggaagacgataccgcagaagctgtgcccctagaaagaggtggtgcggagtaccaggctgtgctgcccgaggtcagaaaggttcttgcagacgtcctccaagacattgccaacgacaacatctccagcgcagattacactcaggacccttcagtaactccctgctgtaatccctaccaaattgcctgccgctgtcaagccgcataacagaccaatttttattccacgaggaggagtacctggaaattaggcaagtttgcttccaaatttcatttttaccctctttacaaacacacgctttagtttagtcttggagtttagttttggagttagccttgcatatcccttctgtatcctgtccctcctccacgccgacccgagagcagctgagctgcgctggctctgggcagggagtgtgccttaatgggaagcacacgggctttggagtcaggcacaggtgccagctccagcttttgaacttgggcaattgtttaacctaacctgcaagttgattttgagggttaaataaaggcatacatgaaaatgcctggcaaattacctgacacagagcagacattcaatacattttagtttccttgtttc

SEQ ID NO: 183423 - DNA, 1275 bp, Artificial Sequence
  derived and/or modified sequence
atgtggggctgctgcgtgtgcggcgccctgttcgagggccagagactgagactgctgagagcccccggcgacggcctgagcagccccttcaccgtggtgagcagaaagtggcacctgggccaccacggcagctaccaccccaacttcagaggcttcgactactacttcggcatcccctacagccacgacatgggctgcaccgacacccccggctacaaccaccccccctgccccgcctgcccccagggcgacggccccagcagaaacctgcagagagactgctacaccgacgtggccctgcccctgtacgagaacctgaacatcgtggagcagcccgtgaacctgagcagcctggcccagaagtacgccgagaaggccacccagttcatccagagagccagcaccagcggcagacccttcctgctgtacgtggccctggcccacatgcacgtgcccctgcccgtgacccagctgcccgccgcccccagaggcagaagcctgtacggcgccggcctgtgggagatggacagcctggtgggccagatcaaggacaaggtggaccacaccgtgaaggagaacaccttcctgtggttcaccggcgacaacggcccctgggcccagaagtgcgagctggccggcagcgtgggccccttcaccggcttctggcagaccagacagggcggcagccccgccaagcagaccacctgggagggcggccacagagtgcccgccctggcctactggcccggcagagtgcccgtgaacgtgaccagcaccgccctgctgagcgtgctggacatcttccccaccgtggtggccctggcccaggccagcctgccccagggcagaagattcgacggcgtggacgtgagcgaggtgctgttcggcagaagccagcccggccacagagtgctgttccaccccaacagcggcgccgccggcgagttcggcgccctgcagaccgtgagactggagagatacaaggccttctacatcaccggcggcgccagagcctgcgacggcagcaccggccccgagctgcagcacaagttccccctgatcttcaacctggaggacgacaccgccgaggccgtgcccctggagagaggcggcgccgagtaccaggccgtgctgcccgaggtgagaaaggtgctggccgacgtgctgcaggacatcgccaacgacaacatcagcagcgccgactacacccaggaccccagcgtgaccccctgctgcaacccctaccagatcgcctgcagatgccaggccgcctag

SEQ ID NO: 183424 - protein, 469 aa, Artificial Sequence
  derived and/or modified sequence
MSALTPPTDMPTPTTDKITQAAMETIYLCKFRVSMDGEWLCLRELDDISLTPDPEPTHEDPNYLMANERMNLMNMAKLSIKGLIESALNLGRTLDSDYAPLQQFFVVMEHCLKHGLKAKKTFLGQNKSFWGPLELVEKLVPEAAEITASVKDLPGLKTPVGRGRAWLRLALMQKKLSEYMKALINKKELLSEFYEPNALMMEEEGAIIAGLLVGLNVIDANFCMKGEDLDSQVGVIDFSMYLKDGNSSKGTEGDGQITAILDQKNYVEELNRHLNATVNNLQAKVDALEKSNTKLTEELAVANNRIITLQEEMERVKEESSYILESNRKGPKQDRTAEGQALSEARKHLKEETQLRLDVEKELEMQISMRQEMELAMKMLEKDVCEKQDALVSLRQQLDDLRALKHELAFKLQSSDLGVKQKSELNSRLEEKTNQMAATIKQLEQSEKDLVKQAKTLNSAANKLIPKHH

SEQ ID NO: 183425 - DNA, 4282 bp, Artificial Sequence
  derived and/or modified sequence
cattttggtcaacaccctgcttactgcgcacggccaatcctatgagaactcagcatcccagctcatctgagcagatcctggaagtgatttctgcagctcaggattttttttttaagctacattgaaaatataggtttattttttgttcaggtttttcttttatattttttttctgcacaaaggaggaggatttttcacttactcatatcgaggccagatttttaaagccagctaaggcagcatcagctgtgcgggatttaaagcctatagctcagctgaaaaaaaaggtggggggcagggaagggaagataaaaggagaggaagctgggagaagacaagcatcatcttattttgctatgtggtaggaactgtctataagatagtgtagaattgtttatcttgagcagtttgttcttaacctataaggtatttttccttttttttttttttaaacctcccccacccttttcctgaaagctttgtttcagagctttgtattgggtttttttggtgaggaggttgtatttatttttttggtgtgtgtgtgtgagtgtgtgtgtgtctgtgtgtgtgttgtggtcccagctgagtcatcatgtctgctctgacgcctccgaccgatatgccaacccccaccactgacaagatcacacaggctgccatggagaccatctacctttgcaaattccgagtgtccatggatggagaatggctctgcctgcgagagctggatgacatctcacttacacctgacccagagcctacccatgaagatcctaattatctcatggctaatgaacgcatgaacctcatgaacatggccaagctgagtatcaagggcttgattgaatcagctctgaacctggggaggactcttgactctgactatgcacctctccagcaattctttgtggtgatggagcactgtctgaaacatggcttgaaagctaaaaaaacttttctcggacaaaataaatccttctgggggcctctagaactggtagaaaagcttgttccagaagccgcagagataacagcaagtgttaaagatcttccaggacttaagacaccagtaggtagaggaagagcctggcttcgtttggcattaatgcaaaagaaactttcagaatatatgaaagctttgatcaataagaaagaacttctcagtgaattctacgaacccaatgccctcatgatggaagaagaaggagccataattgctggtctgttggtgggtctgaatgtcattgatgccaatttctgtatgaaaggagaagacttggactctcaggttggagttatagatttttcaatgtatctcaaggacgggaacagcagtaaaggtactgaaggagacggtcagattactgcaattctggaccagaagaactatgtagaagaactgaacagacatttgaatgctactgtaaacaaccttcaggcaaaagtagatgcattagaaaaatccaacactaaactgacagaggagcttgcagttgcaaacaacaggatcattaccttacaagaagaaatggaacgagttaaagaggaaagttcctacatactggaatccaatcggaagggtcccaagcaagacagaactgcagaagggcaagcactaagtgaagcaagaaagcatttaaaagaagagacacaattacgattggatgttgagaaagaactggagatgcagatcagcatgaggcaggagatggaattggctatgaagatgctggagaaggatgtctgtgagaagcaggatgccctggtatctcttcggcagcagctggatgacctcagagctctcaagcatgaacttgcctttaagctgcagagttcagacttaggagtaaaacagaaaagtgaactaaacagtcgcttggaagagaagactaatcagatggctgctaccattaaacaacttgaacaaagtgaaaaggatttggtgaaacaggcaaagaccttaaatagtgcagcaaataaactgatcccaaaacatcattaggcatttttaagttggtcacgtcgcaagtccgatatcacaacttaattgtaaaaggaagaaatctgaaagttactacatttaagctctgattctatataaaatgtcaccaaaaagttgactttgaatttgttggacttttaaaaaaccagttggaaatataggttgggtttttttcttattgttttctccccagggttagaaaaattggtataagttcctaattaaaagctgaataaactttgagaaattatttctgagttgaccaataaataaaaataccactttctttaaaaaagcctagggaattgaagctctgtacatatactaatgatgcctttacaacccagtccttgataataccagattctcggtgcattgttcatgtctgtatctgcaagcctgttctgccattgcagtgtgatgaacctagaggtaactaccatgtgaacttgaactcttctaaaatagttctgtgtctcttagaccatgaccccttttcacttttgttatataggtttaatccccaagccaaggatagtacttagtatttcactacacttctattctcagtaaccaagattgcttgcaactttttttgccttggtgacttttgaaaaaaaaagaaaagaaaaagcagcatccttatatttctttaaaatacatagaaataaagttagtaattaggtaacctatgataacataataatgtggacgcctggggaaaccctcctcatgtttgtcatcttctacctctgccgttttcctgcaattccgcttcctacttaggcagttcagagagaacaattctaataaaaacactcctctcctattaacaaaaaatgatgcagtacccatttttcgtatcctgcttttcttatattggagtaaaaaggacagggtatagacatgaatgatgatattctgcctggcctgtcatttcttacctggaaacatttacttaagagtttctgttactttttgttcagatggggatttgctaaaggttctgggaagctaataattgaattattagaaaaacatttcagaataggaagtaaatgataaacttatattctttattattatttagtacaaaaatagattcccagtagatatccacaagcaatattagcagggcttctgtttctaagtgaccacagactaaccctttctaggctttaacattgtaaataatcctataaacagtttgattttttaagatgatttttgatttgaagagacaggctttacataagccttcattccttcaaaaggtcctgacaaaatacttgggtttttttctctttttttcattctggtatgctttgcagcatttcagctgctttggtggggacacagataaccccttcgcttccagctcttaaaattctttatctttttcttggcaaaaccagaattaagagtgtaagatagattccatgtgtgcttatataggtccctgcacagattggacttgaaccaaaattaagtccaaagaacatatgtttagaccaacttcatggaagtggaagatcctgtgctcttgaacttattttaattcttataatttgcacctatataaacaaagctcctactgtattcttctcttcatcaaccttttgtggtgatgggttgccttttctacgagcatttggaaggagtgatcaaataccgaaattgaactttctaaaacctacacatagcatgcgtttaaattctattatataaagccccaagtgctttaccttctaaaacatgcttctctataggtgcaaagttataagatatgtagaagaaaacatccatcagaatcttctggagaatatggtcagagtcttaaacaggcccagtgctgagttctttgtccacttagtcacacatcttttgtgggaatgggaaaggaaggagacagccaaactctgacaaaggcttttccttatagaataacccaaagcctaggtgagggttgatatataatgtcccatgatttaatatatgtggtttgggggaaaggacaagaaaaaactataattccacatataagaaggtagttgcccatttacaagttccagttatgtgtgtaaaacagaaaaattaagtaccaaacctattaggaaatttttttaaaaagtggatttaacttaaattactgtgtacttgaggttggctttggatatggattttctaaaaagtgatgttttattgtttatcatctaatggctgtaaactgtagtactagaataaaaaaaatggaaaatcaaaaaaaaaaaaaaaaaa

SEQ ID NO: 183426 - DNA, 4233 bp, Artificial Sequence
  derived and/or modified sequence
gccaatcctatgagaactcagcatcccagctcatctgagcagatcctggaagtgatttctgcagctcaggattttttttttaagctacattgaaaatataggtttattttttgttcaggtttttcttttatattttttttctgcacaaaggaggaggatttttcacttactcatatcgaggccagatttttaaagccagctaaggcagcatcagctgtgcgggatttaaagcctatagctcagctgaaaaaaaaggtggggggcagggaagggaagataaaaggagaggaagctgggagaagacaagcatcatcttattttgctatgtggtaggaactgtctataagatagtgtagaattgtttatcttgagcagtttgttcttaacctataaggtatttttccttttttttttttttaaacctcccccacccttttcctgaaagctttgtttcagagctttgtattgggtttttttggtgaggaggttgtatttatttttttggtgtgtgtgtgtgagtgtgtgtgtgtctgtgtgtgtgttgtggtcccagctgagtcatcatgtctgctctgacgcctccgaccgatatgccaacccccaccactgacaagatcacacaggctgccatggagaccatctacctttgcaaattccgagtgtccatggatggagaatggctctgcctgcgagagctggatgacatctcacttacacctgacccagagcctacccatgaagatcctaattatctcatggctaatgaacgcatgaacctcatgaacatggccaagctgagtatcaagggcttgattgaatcagctctgaacctggggaggactcttgactctgactatgcacctctccagcaattctttgtggtgatggagcactgtctgaaacatggcttgaaagctaaaaaaacttttctcggacaaaataaatccttctgggggcctctagaactggtagaaaagcttgttccagaagccgcagagataacagcaagtgttaaagatcttccaggacttaagacaccagtaggtagaggaagagcctggcttcgtttggcattaatgcaaaagaaactttcagaatatatgaaagctttgatcaataagaaagaacttctcagtgaattctacgaacccaatgccctcatgatggaagaagaaggagccataattgctggtctgttggtgggtctgaatgtcattgatgccaatttctgtatgaaaggagaagacttggactctcaggttggagttatagatttttcaatgtatctcaaggacgggaacagcagtaaaggtactgaaggagacggtcagattactgcaattctggaccagaagaactatgtagaagaactgaacagacatttgaatgctactgtaaacaaccttcaggcaaaagtagatgcattagaaaaatccaacactaaactgacagaggagcttgcagttgcaaacaacaggatcattaccttacaagaagaaatggaacgagttaaagaggaaagttcctacatactggaatccaatcggaagggtcccaagcaagacagaactgcagaagggcaagcactaagtgaagcaagaaagcatttaaaagaagagacacaattacgattggatgttgagaaagaactggagatgcagatcagcatgaggcaggagatggaattggctatgaagatgctggagaaggatgtctgtgagaagcaggatgccctggtatctcttcggcagcagctggatgacctcagagctctcaagcatgaacttgcctttaagctgcagagttcagacttaggagtaaaacagaaaagtgaactaaacagtcgcttggaagagaagactaatcagatggctgctaccattaaacaacttgaacaaagtgaaaaggatttggtgaaacaggcaaagaccttaaatagtgcagcaaataaactgatcccaaaacatcattaggcatttttaagttggtcacgtcgcaagtccgatatcacaacttaattgtaaaaggaagaaatctgaaagttactacatttaagctctgattctatataaaatgtcaccaaaaagttgactttgaatttgttggacttttaaaaaaccagttggaaatataggttgggtttttttcttattgttttctccccagggttagaaaaattggtataagttcctaattaaaagctgaataaactttgagaaattatttctgagttgaccaataaataaaaataccactttctttaaaaaagcctagggaattgaagctctgtacatatactaatgatgcctttacaacccagtccttgataataccagattctcggtgcattgttcatgtctgtatctgcaagcctgttctgccattgcagtgtgatgaacctagaggtaactaccatgtgaacttgaactcttctaaaatagttctgtgtctcttagaccatgaccccttttcacttttgttatataggtttaatccccaagccaaggatagtacttagtatttcactacacttctattctcagtaaccaagattgcttgcaactttttttgccttggtgacttttgaaaaaaaaagaaaagaaaaagcagcatccttatatttctttaaaatacatagaaataaagttagtaattaggtaacctatgataacataataatgtggacgcctggggaaaccctcctcatgtttgtcatcttctacctctgccgttttcctgcaattccgcttcctacttaggcagttcagagagaacaattctaataaaaacactcctctcctattaacaaaaaatgatgcagtacccatttttcgtatcctgcttttcttatattggagtaaaaaggacagggtatagacatgaatgatgatattctgcctggcctgtcatttcttacctggaaacatttacttaagagtttctgttactttttgttcagatggggatttgctaaaggttctgggaagctaataattgaattattagaaaaacatttcagaataggaagtaaatgataaacttatattctttattattatttagtacaaaaatagattcccagtagatatccacaagcaatattagcagggcttctgtttctaagtgaccacagactaaccctttctaggctttaacattgtaaataatcctataaacagtttgattttttaagatgatttttgatttgaagagacaggctttacataagccttcattccttcaaaaggtcctgacaaaatacttgggtttttttctctttttttcattctggtatgctttgcagcatttcagctgctttggtggggacacagataaccccttcgcttccagctcttaaaattctttatctttttcttggcaaaaccagaattaagagtgtaagatagattccatgtgtgcttatataggtccctgcacagattggacttgaaccaaaattaagtccaaagaacatatgtttagaccaacttcatggaagtggaagatcctgtgctcttgaacttattttaattcttataatttgcacctatataaacaaagctcctactgtattcttctcttcatcaaccttttgtggtgatgggttgccttttctacgagcatttggaaggagtgatcaaataccgaaattgaactttctaaaacctacacatagcatgcgtttaaattctattatataaagccccaagtgctttaccttctaaaacatgcttctctataggtgcaaagttataagatatgtagaagaaaacatccatcagaatcttctggagaatatggtcagagtcttaaacaggcccagtgctgagttctttgtccacttagtcacacatcttttgtgggaatgggaaaggaaggagacagccaaactctgacaaaggcttttccttatagaataacccaaagcctaggtgagggttgatatataatgtcccatgatttaatatatgtggtttgggggaaaggacaagaaaaaactataattccacatataagaaggtagttgcccatttacaagttccagttatgtgtgtaaaacagaaaaattaagtaccaaacctattaggaaatttttttaaaaagtggatttaacttaaattactgtgtacttgaggttggctttggatatggattttctaaaaagtgatgttttattgtttatcatctaatggctgtaaactgtagtactagaataaaaaaaatggaaaatca

SEQ ID NO: 183427 - DNA, 1410 bp, Artificial Sequence
  derived and/or modified sequence
atgtccgccctcacacctccaacagatatgccaacaccgacaacagataaaatcacacaggccgcaatggagaccatttacctgtgtaaatttagggtgtccatggatggcgagtggctatgtcttagggagctagatgatatctccctgacgccagatcccgagcccactcacgaggatcccaattacttgatggccaacgaacgcatgaacctgatgaacatggcgaaactgtccatcaaaggcctgatcgaatcagctctcaatctaggaagaaccttagactccgattacgctccactccaacagttctttgtagtgatggagcactgtctgaagcacggcctcaaagccaaaaagacctttctggggcagaacaaaagcttttggggtcccctggagctggtggaaaaactggtgcctgaggctgccgaaataaccgcttccgtcaaggacctacccgggctgaaaacccctgtcggaaggggccgggcatggctgcgtctggctctaatgcagaagaagctcagcgagtatatgaaggctctgatcaataagaaggaattactgtcagaattttacgaacctaacgcgctcatgatggaggaggagggggccattattgcgggcttgttggtgggacttaacgtgatcgacgcaaacttttgcatgaagggggaagacctcgactcccaggtgggcgttattgacttttccatgtatctcaaggacggaaattcctccaagggcaccgaaggggatggacagatcaccgccatccttgaccaaaagaattacgttgaagagctgaatcgtcacctgaacgccaccgtgaataatctgcaggctaaggttgacgctctcgagaaatccaacactaagttgaccgaggaactagccgtcgcaaataatcgcattatcacactccaggaggagatggaacgggtgaaggaagaaagttcctacattttagaatctaacagaaagggaccaaaacaggaccgaactgcagaaggccaagcactctccgaggctaggaaacatctgaaggaagagacccagttgcgcctggacgtagagaaagagctcgaaatgcagatttcaatgcggcaggagatggagctggcaatgaagatgctcgaaaaggatgtgtgcgagaaacaggacgcgctcgttagtctacgtcaacagttagatgaccttagagctctaaagcacgagctggctttcaaattgcagtcctccgacctcggtgttaaacagaagagtgagttaaacagcagactcgaggaaaaaaccaaccagatggctgccactataaagcagcttgaacaaagcgaaaaagatctggtcaagcaggctaagacactcaattctgcagccaataagctcatcccgaaacatcactag

SEQ ID NO: 183428 - DNA, 1410 bp, Artificial Sequence
  derived and/or modified sequence
atgtctgccctgaccccacccacagacatgcccacccccaccacagacaagatcacccaggccgccatggagaccatctacctgtgcaagttccgggtgtccatggatggagagtggctgtgcctgcgggagctggatgacatcagcctgaccccagaccctgagcccacccatgaggaccccaactacctgatggccaatgaaagaatgaacctgatgaacatggccaagctgagcatcaagggcctcatcgagagcgccctgaacctgggccgcaccctggacagcgactatgcccccctgcagcagttctttgtggtgatggagcactgcctgaagcacggcctgaaggccaagaagaccttcctgggccagaacaagagcttctggggccccctggagctggtggagaagctggtgcctgaggccgctgagatcacagcctctgtgaaggacctgcccggcctgaagacccctgtgggccggggccgggcctggctgcggctggccctgatgcagaagaagctgtctgagtacatgaaggccctgatcaacaagaaggagctgctgtctgagttctatgagcccaatgccctgatgatggaggaggagggcgccatcatcgccggcctgctggtgggcctgaatgtgattgatgccaacttctgcatgaagggggaggacctggacagccaggtgggcgtcatcgacttctccatgtacctgaaggatggcaacagcagcaaaggaacagaaggagatggccagatcacagccatcctggaccagaagaactacgtggaggagctgaacagacacctgaatgccaccgtgaacaacctgcaggccaaggtggatgccctggagaagagcaacaccaagctgacagaggagctggccgtggccaacaaccgcatcatcaccctgcaggaggagatggagcgggtgaaggaggagagcagctacatcctggagagcaacaggaagggccccaagcaggacagaacagctgagggccaggccctgtctgaggccaggaagcacctgaaggaggagacccagctgcggctggatgtggagaaggagctggagatgcagatctccatgaggcaggagatggagctggccatgaagatgctggagaaggatgtgtgtgagaagcaggatgccctggtgtccctgcggcagcagctggatgacctgcgggccctgaagcatgagctggccttcaagctgcagagcagtgacctgggcgtgaagcagaagtctgagctgaacagccggctggaggagaagaccaaccagatggccgccaccatcaagcagctggagcagagcgagaaggacctggtgaagcaggccaagaccctgaacagcgctgccaacaagctgatccccaagcaccactag

SEQ ID NO: 183429 - DNA, 1410 bp, Artificial Sequence
  derived and/or modified sequence
atgagcgccctgaccccccccaccgacatgcccacccccaccaccgataagataactcaggccgctatggaaactatttatctgtgtaagtttcgagtgagtatggatggcgagtggttgtgtctacgggagctggacgatataagtctcacgccggatcctgaacctactcacgaggacccaaactacctgatggccaatgagagaatgaacctcatgaatatggctaagttatcaatcaagggcttgatcgagagtgcgctgaacttggggagaactctcgactctgactatgcccccctgcagcaattcttcgtggtgatggagcactgcttgaagcacggactgaaggcaaaaaagacattcttaggacagaataaaagtttctggggaccactcgagctggttgaaaagctcgttcctgaagctgcggaaataactgcctctgttaaagacctgcccgggttaaaaacccccgttggacgggggagagcctggttgcggttggctctaatgcagaaaaaactctctgagtatatgaaggctctcattaataagaaggaactcctgagcgagttttatgagccaaatgctttgatgatggaggaagaaggggcaataatcgcaggcctgctggtgggccttaatgtcatcgacgctaatttttgcatgaagggggaggatttagatagccaggtcggggtgattgatttctctatgtacctgaaggatggaaattctagtaaggggacagaaggagacgggcagattactgcaattctcgatcagaagaattacgtggaagagcttaatcgtcatttaaacgccaccgttaataacttacaggccaaagttgacgcgttggaaaagtccaatacaaaactgaccgaggaactggctgtggctaataacagaattatcaccctccaggaggaaatggaaagagtaaaagaggaatccagctatattctggagtcaaacagaaaaggaccaaagcaggatagaacggccgaaggtcaggcgctgtctgaggccagaaaacatttaaaggaggagacacagctgagactcgatgttgagaaagaactggaaatgcagatctcaatgaggcaggagatggagcttgctatgaagatgctggaaaaagatgtgtgcgagaagcaggacgcgctggtatcccttcgccagcagctcgacgaccttcgggctttgaagcacgagctcgcattcaaattgcagtcaagtgacttgggcgttaaacagaaaagtgagcttaactctcggctcgaggaaaagaccaatcagatggctgccactataaaacagttggagcagtcggaaaaggatctggttaagcaggctaagaccctgaatagtgccgcgaataagcttattcccaagcaccactag

SEQ ID NO: 183430 - DNA, 1410 bp, Artificial Sequence
  derived and/or modified sequence
atgtctgcactgacaccaccaacggacatgccaactcccacaaccgacaagataacacaggcagctatggagacaatatacctttgcaaattccgcgtctcaatggacggcgaatggttgtgcctgagagaattggatgacatatctctgacccctgaccctgaacctacacatgaggatcctaattacctaatggcaaacgagcgaatgaatttaatgaatatggctaaactgagcattaagggcttgatcgaatccgccctgaatcttgggaggacactagacagcgattatgcacccctgcaacagttttttgtcgtcatggaacattgcttgaagcacggtctgaaggccaaaaagacctttctgggacaaaataaaagtttttggggacctctagagctagtggagaaactggtccctgaagctgctgaaatcactgcatcagtgaaagatctccccggtctaaaaacacctgtcggcagaggacgggcatggctgaggctggccctgatgcaaaaaaagctgagcgaatatatgaaagcgctgattaataaaaaagagttgctgtccgaattttacgaacctaatgccctcatgatggaagaggaaggggcaatcattgccggattgctggtcggcctgaatgtgattgatgcaaatttttgcatgaaaggtgaagacctcgattctcaggtcggtgtgattgacttctccatgtatctcaaagatggtaactcatccaagggaaccgaaggcgacggccagattactgccattcttgaccaaaaaaactatgtggaggaattgaaccgacatctgaatgctaccgtcaacaatctgcaagccaaagttgacgcattggaaaagtccaacactaaattgaccgaagaactggccgtcgccaacaacagaatcataacactgcaggaggagatggagcgggtcaaggaggagtccagctacatcctggaaagtaaccgcaaggggccaaagcaagacagaaccgcagaggggcaggcattatctgaggctaggaagcacctcaaagaggagacccagctgaggctggatgtcgaaaaagagctggaaatgcagatctctatgaggcaggagatggaactggcaatgaagatgctcgagaaggacgtttgcgagaagcaggatgcacttgtttccctgcgacagcaactggacgacctaagggcactgaagcacgaactcgccttcaagcttcagtcttcagacttgggcgtgaagcaaaaaagcgagctcaactctcgattagaggagaaaactaatcaaatggccgctaccatcaagcagttggaacaatctgagaaagacctggtcaaacaggccaagaccctgaattctgccgcaaataagctgatccccaaacaccattag

SEQ ID NO: 183431 - DNA, 1410 bp, Artificial Sequence
  derived and/or modified sequence
atgagcgccctgaccccccccaccgacatgcccacccccaccaccgacaagatcacccaggccgccatggagaccatctacctgtgcaagttcagagtgagcatggacggcgagtggctgtgcctgagagagctggacgacatcagcctgacccccgaccccgagcccacccacgaggaccccaactacctgatggccaacgagagaatgaacctgatgaacatggccaagctgagcatcaagggcctgatcgagagcgccctgaacctgggcagaaccctggacagcgactacgcccccctgcagcagttcttcgtggtgatggagcactgcctgaagcacggcctgaaggccaagaagaccttcctgggccagaacaagagcttctggggccccctggagctggtggagaagctggtgcccgaggccgccgagatcaccgccagcgtgaaggacctgcccggcctgaagacccccgtgggcagaggcagagcctggctgagactggccctgatgcagaagaagctgagcgagtacatgaaggccctgatcaacaagaaggagctgctgagcgagttctacgagcccaacgccctgatgatggaggaggagggcgccatcatcgccggcctgctggtgggcctgaacgtgatcgacgccaacttctgcatgaagggcgaggacctggacagccaggtgggcgtgatcgacttcagcatgtacctgaaggacggcaacagcagcaagggcaccgagggcgacggccagatcaccgccatcctggaccagaagaactacgtggaggagctgaacagacacctgaacgccaccgtgaacaacctgcaggccaaggtggacgccctggagaagagcaacaccaagctgaccgaggagctggccgtggccaacaacagaatcatcaccctgcaggaggagatggagagagtgaaggaggagagcagctacatcctggagagcaacagaaagggccccaagcaggacagaaccgccgagggccaggccctgagcgaggccagaaagcacctgaaggaggagacccagctgagactggacgtggagaaggagctggagatgcagatcagcatgagacaggagatggagctggccatgaagatgctggagaaggacgtgtgcgagaagcaggacgccctggtgagcctgagacagcagctggacgacctgagagccctgaagcacgagctggccttcaagctgcagagcagcgacctgggcgtgaagcagaagagcgagctgaacagcagactggaggagaagaccaaccagatggccgccaccatcaagcagctggagcagagcgagaaggacctggtgaagcaggccaagaccctgaacagcgccgccaacaagctgatccccaagcaccactag

SEQ ID NO: 183432 - protein, 522 aa, Artificial Sequence
  derived and/or modified sequence
MVDDKEKNMKCLTFFLMLPETVKNRSKKSSKKANTSSSSSNSSKLPPVCYEIITLKTKKKKMAADIFPRKKPANSSSTSVQQYHQQNLSNNNLIPAPNWQGLYPTIRERNAMMFNNDLMADVHFVVGPPGGTQRLPGHKYVLAVGSSVFHAMFYGELAEDKDEIRIPDVEPAAFLAMLKYIYCDEIDLAADTVLATLYAAKKYIVPHLARACVNFLETSLSAKNACVLLSQSCLFEEPDLTQRCWEVIDAQAELALKSEGFCDIDFQTLESILRRETLNAKEIVVFEAALNWAEVECQRQDLALSIENKRKVLGKALYLIRIPTMALDDFANGAAQSGVLTLNETNDIFLWYTAAKKPELQFVSKARKGLVPQRCHRFQSCAYRSNQWRYRGRCDSIQFAVDKRVFIAGFGLYGSSCGSAEYSAKIELKRQGVVLGQNLSKYFSDGSSNTFPVWFEYPVQIEPDTFYTASVILDGNELSYFGQEGMTEVQCGKVTVQFQCSSDSTNGTGVQGGQIPELIFYA

SEQ ID NO: 183433 - protein, 136 aa, Artificial Sequence
  derived and/or modified sequence
MAADIFPRKKPANSSSTSVQQYHQQNLSNNNLIPAPNWQGLYPTIRERNAMMFNNDLMADVHFVVGPPGGTQRLPGHKYVLAVGSSVFHAMFYGELAEDKDEIRIPDVEPAAFLAMLKYIYCDEIDLAADTVLATL

SEQ ID NO: 183434 - DNA, 4857 bp, Artificial Sequence
  derived and/or modified sequence
cagactcacgcagctccagcccatcttgctgacctaattcagaaaagaagtgctacagctctgtgcctgtcatctttgcagtgtagcattttcaggtgatctaggaaacagttatttttatgagcaaataagagaaacaggaatcatgatggggatatatttaacagacccagtactggataaaacttaaagccagtttctattcaacatagtgaaaaggtcaccttgcctggctgagaaaagcagcaaaatatcagctttgttggtttcagttaacctcttagcccgggctaatctcttttccttgatgttcaaaccaatttgggatatctaactctaaagagagacacactgtactcatggtagatgacaaggaaaagaacatgaaatgtctcaccttcttcttgatgcttccagagacggtaaagaacaggtccaagaaaagctcaaagaaagcaaataccagcagcagcagtagcaacagcagcaagttgccaccagtttgttatgaaataattaccttgaagactaaaaagaagaagatggctgctgatatattcccccgtaaaaagccagccaactccagcagcaccagcgtccagcagtaccaccagcagaatctcagtaacaacaaccttatcccggccccaaactggcagggtctttatcccaccattagagagagaaatgcgatgatgttcaataatgatttgatggcagatgtacattttgtggttgggccaccaggtgggactcaacggttgccaggacacaaatatgttttagctgttgggagctctgtgttccatgcgatgttttacggagaacttgcagaggacaaagatgaaatccgtataccagatgtcgaacctgctgcttttctcgctatgctgaaatatatctattgtgatgaaattgacttggctgctgacacagtgctggccacactttatgctgccaaaaagtacattgtccctcaccttgccagagcctgtgttaatttcctggagaccagcctgagtgccaagaatgcctgtgtgctcctctcccagagctgcctgttcgaggagccagacctgacccagcgttgctgggaggtgattgatgcccaggctgagttagctctcaagtctgagggattctgcgatattgacttccagacactagaaagtattctccgtagggaaactctgaatgccaaagaaattgtggtttttgaggcagctctcaactgggctgaagtagaatgccaacgacaagatctggcgttgagcattgaaaataaacgcaaggttctaggaaaggcactttacttgatccgcatacccacaatggccctcgatgattttgcaaatggtgctgcacagtccggggtattaactctcaatgagaccaacgacatcttcctctggtatactgcagccaaaaagcctgagcttcagtttgtgagtaaagcccgtaagggccttgtcccccagcgctgtcaccgtttccagtcgtgtgcctatcgaagcaaccaatggcgctatcgtggtcgctgtgacagcatccagtttgcagttgataaaagagtgttcattgctggctttgggctgtatggctccagctgtggttctgcagaatacagtgccaagattgaacttaagcggcagggcgttgtcctggggcagaacttgagcaagtacttctcagatgggtccagcaatacctttcccgtatggtttgaatacccagtgcagatcgagccagacaccttctacacagccagtgtgatactggatggcaatgaactcagctactttggacaagaaggcatgacagaagttcagtgtggcaaagtgactgtccagtttcagtgctcctcagatagcaccaatggcactggggtacagggagggcagatccctgaacttatattctatgcttgaaaactcacttcctgaagcagcttgagctccaaagtgcacatctggttccaacttgcctgatgcttagctcatctgcaaatatgtgatcagtgccggtaatttgtaatgaatgaagcggtaggcaggttctaatttcttttaaccttttaattatgtacaggcaaaaatgcagcattccgcttttaactatctgcttaaaagagctaacgttcttattaaggctttgtggtttttagagttgcatctatgaacctggggagattatgtgctttcccaagcgttccaccaccctctcagttttgtccctctgaagataattttggatcaccttgaatttccttttggacgttatttgatgaacagaaataaattgataacaagagttatttttaaacagaactcctcttaccccccaaaacagataaacctcagtgtacaattttgaaagaagttttgccttgtaatgagtaataatttagaaagtagacagtggttgtgtttggctctcgttttattccttttacatttgttgcttctgggatttaaaaaattactaaattcataagatagttaggtattaaacacttcagaatatcaatgtaaaattggaaaataaggaactgggggcatttgtttaggccatgacttctacaagcagatttcttttcttttagtttagaagacaaaaaatttcaatacagatacttcttttagaagtaaatttttagattttattgtcagtagaaaaaagttaaactcctactaatttaaactaagacagtttaaaaaggaagcctgaaaaagactcatactacaaataatttaattgatggcatataagaatatgcagtttgaaaaagccaaactcttctctccacttagcttttgatccccactgtttgcttatttgtataagtcatactgtgtagaatttctattttctttttccccattaaaagaggaccaaacaattctttatacaaatggagtagcaactagttttgtagcactacatttaatgtaatgagatacctttgttcatttttttaaatttgaaatatactttacctgatccactttgattgtatactatattctttgttaattttaattttgtcctgttcctagactgctagaatctggcccctggccatcttaaagtgccaacatatgcctgcagggtttataaaaaatggcctggagtgacacattttattatacctaatattcactgcatcagtatcacatctagctcccttacttgtccacagataatgtaaacaaaggagggaaaaacttattaaattctccttcgctgctggcttgtgctggtttagtgcctgtgtccctggcagtgtccagtgtgttcacttccagttgaagtatccatgtgtttctgggcagcttttctgctcagtgtgatcctgagatggcttccccgccgccacccagagtgtggtccttggccgcctcctgctcctgctctgcaagcctgaaactggcttgtctggagccaggagttagtcctggggtgtgtgtgtgcctgcgcacccatgcgcatgcaagtgtgtttgccagctcaggagctgtctcctctctacctggctagtaagaggtgggacagtaatggtcctcctgctggccccagcaaggcccatgagtgactgccctgacgtattcactgtgcctctgggccacttcttcccctgtagatgtgggcttgttgccttcagccggcttccctgagggaggagaacactggattattggaaatgttttaatcactcttgccattacctacatctattagcatagatgatgaaaagctgttactggtgattatagatgagtatttccaggacaacattctaaaagtacaattatttcttattggggagattacaggtagtttggcaaagcattgaagtacaaaggtacattttcaattaaaaagcacacttctacaaaagatttggtttttaaattatggttacacatttcagtaactcatagctgctgtgcaaattggtagaccttataagaaggcacttgtttgtaagccagagaagaaactttaattgcatcctatcagattgttgaggtgggtgtgatagtcttcaggtgcagtgcgttcattcactaacgctcactgtcagtgcccatgtttgctagctgcctccatgtgactagtgagctgctggtgaaagtcgtgtgaaatcctgtacactgtgtatagaacaatgtaattttatgttaattgttattactttaaaacatatctaccatctgattggctggtaccgagagctgtgggtaaaatttgaaaattgtatttagaataagaaattttacattttaaaccctattgtcctttatgcattttcaatgaaatggaatgaaggctaatatgcttgctttatttacttttgtaatcttggattttgtagcttttaaaactagaaaccattgttctaacaaagcaggcaactttattctataaacacaactttattaagcagaatacactgtagatgcttttccccaacgtatctggctggcagtctttgtcgttgttcattctggggataaaggggaactaggctagcagttctaatgtgacattctttaagcatatcttaaaatagtatttaagtaaatggtctaatttctacataattattgcactgaacttttttgtttattaaggtgtttaaataagctcagctaattcaagacactgtagtcacttgtgcatcagtgtgcttgaatttagtagcttacagcattatttatgaaggaaaaaatacataaatatgaagtacctcatgttgaatgttattgtactgtatttttaatgtaacagtgcagatcttgttagacacatgaatgtgtataatcatgttaaatgcaaataaaactagttcataga

SEQ ID NO: 183435 - DNA, 1386 bp, Artificial Sequence
  derived and/or modified sequence
atggccgccgacatcttccccagaaagaagcccgccaacagcagcagcaccagcgtgcagcagtaccaccagcagaacctgagcaacaacaacctgatccccgcccccaactggcagggcctgtaccccaccatcagagagagaaacgccatgatgttcaacaacgacctgatggccgacgtgcacttcgtggtgggcccccccggcggcacccagagactgcccggccacaagtacgtgctggccgtgggcagcagcgtgttccacgccatgttctacggcgagctggccgaggacaaggacgagatcagaatccccgacgtggagcccgccgccttcctggccatgctgaagtacatctactgcgacgagatcgacctggccgccgacaccgtgctggccaccctgtacgccgccaagaagtacatcgtgccccacctggccagagcctgcgtgaacttcctggagaccagcctgagcgccaagaacgcctgcgtgctgctgagccagagctgcctgttcgaggagcccgacctgacccagagatgctgggaggtgatcgacgcccaggccgagctggccctgaagagcgagggcttctgcgacatcgacttccagaccctggagagcatcctgagaagagagaccctgaacgccaaggagatcgtggtgttcgaggccgccctgaactgggccgaggtggagtgccagagacaggacctggccctgagcatcgagaacaagagaaaggtgctgggcaaggccctgtacctgatcagaatccccaccatggccctggacgacttcgccaacggcgccgcccagagcggcgtgctgaccctgaacgagaccaacgacatcttcctgtggtacaccgccgccaagaagcccgagctgcagttcgtgagcaaggccagaaagggcctggtgccccagagatgccacagattccagagctgcgcctacagaagcaaccagtggagatacagaggcagatgcgacagcatccagttcgccgtggacaagagagtgttcatcgccggcttcggcctgtacggcagcagctgcggcagcgccgagtacagcgccaagatcgagctgaagagacagggcgtggtgctgggccagaacctgagcaagtacttcagcgacggcagcagcaacaccttccccgtgtggttcgagtaccccgtgcagatcgagcccgacaccttctacaccgccagcgtgatcctggacggcaacgagctgagctacttcggccaggagggcatgaccgaggtgcagtgcggcaaggtgaccgtgcagttccagtgcagcagcgacagcaccaacggcaccggcgtgcagggcggccagatccccgagctgatcttctacgcctag

SEQ ID NO: 183436 - DNA, 1569 bp, Artificial Sequence
  derived and/or modified sequence
atggtggacgacaaggagaagaacatgaagtgcctgaccttcttcctgatgctgcccgagaccgtgaagaacagaagcaagaagagcagcaagaaggccaacaccagcagcagcagcagcaacagcagcaagctgccccccgtgtgctacgagatcatcaccctgaagaccaagaagaagaagatggccgccgacatcttccccagaaagaagcccgccaacagcagcagcaccagcgtgcagcagtaccaccagcagaacctgagcaacaacaacctgatccccgcccccaactggcagggcctgtaccccaccatcagagagagaaacgccatgatgttcaacaacgacctgatggccgacgtgcacttcgtggtgggcccccccggcggcacccagagactgcccggccacaagtacgtgctggccgtgggcagcagcgtgttccacgccatgttctacggcgagctggccgaggacaaggacgagatcagaatccccgacgtggagcccgccgccttcctggccatgctgaagtacatctactgcgacgagatcgacctggccgccgacaccgtgctggccaccctgtacgccgccaagaagtacatcgtgccccacctggccagagcctgcgtgaacttcctggagaccagcctgagcgccaagaacgcctgcgtgctgctgagccagagctgcctgttcgaggagcccgacctgacccagagatgctgggaggtgatcgacgcccaggccgagctggccctgaagagcgagggcttctgcgacatcgacttccagaccctggagagcatcctgagaagagagaccctgaacgccaaggagatcgtggtgttcgaggccgccctgaactgggccgaggtggagtgccagagacaggacctggccctgagcatcgagaacaagagaaaggtgctgggcaaggccctgtacctgatcagaatccccaccatggccctggacgacttcgccaacggcgccgcccagagcggcgtgctgaccctgaacgagaccaacgacatcttcctgtggtacaccgccgccaagaagcccgagctgcagttcgtgagcaaggccagaaagggcctggtgccccagagatgccacagattccagagctgcgcctacagaagcaaccagtggagatacagaggcagatgcgacagcatccagttcgccgtggacaagagagtgttcatcgccggcttcggcctgtacggcagcagctgcggcagcgccgagtacagcgccaagatcgagctgaagagacagggcgtggtgctgggccagaacctgagcaagtacttcagcgacggcagcagcaacaccttccccgtgtggttcgagtaccccgtgcagatcgagcccgacaccttctacaccgccagcgtgatcctggacggcaacgagctgagctacttcggccaggagggcatgaccgaggtgcagtgcggcaaggtgaccgtgcagttccagtgcagcagcgacagcaccaacggcaccggcgtgcagggcggccagatccccgagctgatcttctacgcctag

SEQ ID NO: 183437 - DNA, 1386 bp, Artificial Sequence
  derived and/or modified sequence
atggcggctgacattttcccacgcaaaaaacccgcaaactcttcgtcaacctctgtgcagcaataccatcagcagaacctgagtaacaataacctcatccctgcccctaactggcagggcctgtacccaacaattagagaaaggaatgcaatgatgtttaataatgatctcatggcggatgtccatttcgtggtgggacctccgggcggaacccagagacttccgggacacaaatacgtgctggccgtcgggtcaagtgttttccacgcgatgttttacggagagctcgcggaagataaagacgaaattaggatacccgacgtagaacccgccgcctttctcgccatgctaaagtacatttattgcgacgaaattgacctggcagctgataccgttctggctaccctatatgctgctaagaaatacatcgtgccacatcttgcacgagcctgtgtgaactttctcgagacctccttaagcgctaagaacgcatgtgtactactttcacagtcatgcctatttgaggagccagatttgacccaacgttgctgggaggtgatcgatgcacaggccgagctagcactaaagtcagaaggcttttgtgacatcgatttccagactcttgagtccatcctgaggcgagaaacactgaacgccaaggagatcgtcgtgtttgaggccgctctgaactgggcagaggtggagtgccagaggcaagatttggcgctctccatagaaaataaaaggaaagtgctgggaaaggcactttatctaattcgcatcccaacaatggctctggatgacttcgcgaatggcgccgctcagtctggagtcctgacattaaacgagacaaacgatatattcctctggtatacggccgccaagaaaccagagctacagttcgtgagcaaagctagaaagggcttggtgccccaaaggtgccatcggtttcagtcttgtgcttatcgatctaaccaatggcgctaccgagggagatgcgatagcatccagttcgcggtggataagagggtttttatcgctggcttcggactttacggctcatcttgcggtagtgctgaatattcggctaaaattgagcttaagcgccagggagtggtccttggacagaacctgagtaaatatttttctgacgggtcttctaatacatttccggtgtggttcgagtatcccgtgcagatcgagcctgacacattttatacagcctcagtgattctggacggcaacgaactgtcttatttcggccaagaaggcatgaccgaagtgcagtgtggcaaagtcactgttcagttccagtgctcctccgacagcactaacggcaccggagtccaggggggacaaatccccgagctcattttctatgcatag

SEQ ID NO: 183438 - DNA, 1569 bp, Artificial Sequence
  derived and/or modified sequence
atggtcgatgacaaggaaaagaatatgaaatgcttgacgtttttcctcatgctccctgagacagtcaaaaacaggtccaagaagtccagtaagaaagccaataccagttctagctctagtaattcgtctaaactcccgcccgtgtgttacgaaattatcactttgaagactaagaagaaaaagatggccgcagatattttccccaggaagaagccagccaattccagctctacaagcgtacagcagtaccaccagcagaacctgagtaacaacaatctgattcctgcacctaattggcagggcctgtatcctactatccgcgagcgcaacgctatgatgtttaataacgaccttatggcggatgtgcacttcgtggttggaccccctggtggcacacaacggctccccggccacaagtacgtcctggccgttggctcaagtgtttttcacgcaatgttctacggagagctcgctgaagacaaggacgaaataagaatccctgacgttgaacctgcggcgtttttggctatgctgaaatatatttactgcgacgaaatcgaccttgccgcggatactgtgcttgcaactctgtacgccgccaagaaatacatagtgccccacctggcgcgtgcatgcgtcaacttcctggagacctccctgtcggcaaagaatgcttgcgttttgttgtctcaatcctgtctgttcgaggagcctgacctgactcagcgctgttgggaggtcattgacgctcaggcggagctggccctcaaatctgaggggttctgtgacattgatttccagacgttggaaagcatcttgcggcgggagacactgaacgctaaagaaattgtggtgtttgaggccgctctcaattgggctgaggtcgaatgccagcgtcaggacctggctttaagcattgagaacaagaggaaagtgttaggaaaagcgctttatttaattcgcatcccaactatggctctggatgatttcgcgaacggcgccgcccagtctggagtgctgacccttaacgaaacaaatgacatctttttatggtatacagctgctaaaaagcctgaactgcagttcgtcagcaaggcaaggaaagggctcgtacctcaaaggtgccatagatttcagtcatgcgcatatcgtagcaaccaatggaggtatcggggccgctgcgactcgattcagttcgcagtggacaaacgggtgttcatagcgggctttggactctacggatcatcttgtggatcggccgagtactctgcaaagattgaactcaaacggcagggcgtggttttagggcaaaatctaagtaaatatttctctgatggctccagcaatacattccctgtatggtttgaataccctgttcagattgagcctgacaccttctacaccgcatccgtaattcttgacggaaacgagttgtcatacttcggacaggaaggaatgacggaggtccagtgcggtaaggtaaccgtgcagttccagtgcagcagcgactccacaaatggaacaggagtgcaggggggtcaaattccagaattgattttctacgcctag

SEQ ID NO: 183439 - DNA, 1386 bp, Artificial Sequence
  derived and/or modified sequence
atggccgctgacatatttcccaggaaaaaaccagcaaactcttcttccactagcgtccaacagtatcatcagcaaaacctctctaataataacttaattccagccccgaattggcagggactttacccaaccatcagagagaggaatgctatgatgtttaacaatgatctcatggccgacgtccacttcgtagtggggcccccgggcggcacacagcggcttcccggacacaaatacgtgctcgccgtgggaagttcggtgttccacgcaatgttttatggcgagctggcggaggataaggacgaaataagaatcccggatgtagaacccgcggccttcctggccatgcttaaatatatctactgtgacgagatcgacctcgctgcagacactgtccttgccaccctctacgccgccaaaaaatacattgtgccacatctcgctcgagcctgtgtgaattttctcgagacctcattgtctgccaagaatgcctgtgtgctgctgagccagtcgtgtctgtttgaagagcccgacctgacccagagatgctgggaggtcatcgatgcgcaggctgagctggctctcaaatcagagggcttctgtgacattgatttccagacactggaatccattctgcggcgtgaaacgttaaatgccaaggagatcgttgtattcgaggctgctctgaactgggccgaagtggagtgccagcggcaggacttagcactcagcatagagaacaagaggaaagtcctgggcaaagcgctgtatttgatcagaattcccaccatggccctggacgactttgcgaatggcgctgcacagtcaggggtcctgaccctgaacgagaccaacgacatctttttgtggtatactgccgccaagaagccagaattgcaattcgtctcaaaagcccggaagggactggtaccccagcgttgtcaccgcttccaatcatgtgcatatcgatccaaccagtggagatatcggggccggtgcgattccatccaatttgccgtggataagcgggtgtttatcgccggctttggcctgtacggctcctcttgtggctcggccgaatactccgccaaaattgaactgaagcgacagggagtcgttttgggccaaaacctaagtaagtattttagcgacggatcttcgaatacattccccgtttggtttgaataccccgttcagattgagcctgataccttctacacagcgagtgtcatcttagatggaaacgaattatcatatttcgggcaagagggcatgaccgaggttcaatgtggcaaggtcactgtgcagtttcaatgctcatcagactcaacaaacggcacaggggtacaaggaggccagatccccgaacttatcttctatgcatag

SEQ ID NO: 183440 - DNA, 1569 bp, Artificial Sequence
  derived and/or modified sequence
atggtcgatgataaagagaagaacatgaagtgtctgacgttcttccttatgttgccagagaccgtcaaaaaccggagcaagaaatcgagcaagaaagctaataccagttcaagcagctcaaacagcagtaaattgcctccagtgtgttatgagattatcacattaaagaccaagaaaaagaagatggccgccgatatcttcccgagaaaaaaacccgcaaattcctctagtacctctgtccagcagtatcaccagcagaaccttagtaataataatctcatcccagcacccaactggcaggggctctatcctacaataagggaacgtaatgccatgatgtttaataacgatctaatggctgatgtccacttcgtggttgggccaccaggtggtacacaaagattacctggacacaagtacgtgctggccgttggatcttcagtgtttcacgcaatgttttatggggagctggcggaggacaaggatgagatcaggattccggatgttgagcctgccgcttttctggctatgttgaagtatatatattgtgatgagatagatctggcggcggacaccgtccttgccaccctgtacgccgctaagaaatatatagtcccccatctagctagagcatgcgtgaacttccttgagactagcctctccgccaaaaacgcttgtgtcctcctaagccagtcctgtttatttgaggaacccgaccttacacagcgatgctgggaagttattgatgctcaagcagagctcgccctgaaatcggaggggttttgcgacattgattttcagacattggagtctatcctgcgccgggaaacgcttaatgccaaggaaatcgtagtgttcgaggcagcgctcaattgggctgaagtggagtgtcagaggcaggatcttgcgctgagcatcgaaaacaagaggaaggtgctgggtaaagccctctatctgattcggattcccactatggccctggacgacttcgcaaatggagccgcccagagtggcgttcttacacttaacgagacaaacgacatcttcctgtggtacactgctgccaagaaaccggagttacagtttgtgtccaaggctcggaaggggttagtgccacagcgatgccaccgatttcagtcgtgcgcctatcgatcaaatcagtggaggtatcgcggcaggtgtgattctattcagtttgccgtggacaagagggtattcatcgccggatttgggttgtacggctcgagttgcgggtccgctgagtattcagcgaagattgagctgaagcggcagggagtagttctcggtcagaacctaagtaaatatttctccgatggctcttcaaacacatttcctgtgtggtttgagtatcctgttcagatcgagcccgacaccttttatacagcgtccgtgatcctcgacggtaatgagctgtcatactttgggcaggagggaatgacagaggtccagtgcggtaaagttactgtacaatttcagtgttcctcggactctactaacggtacaggtgtccaaggaggccagataccagagctgatcttttatgcctag

SEQ ID NO: 183441 - DNA, 1386 bp, Artificial Sequence
  derived and/or modified sequence
atggctgctgacatcttccccaggaagaagccagccaacagcagcagcacctctgtgcagcagtaccaccagcagaacctgagcaacaacaacctgatcccagcccccaactggcagggcctgtaccccaccatccgggagagaaatgccatgatgttcaacaatgacctgatggctgatgtgcactttgtggtgggccccccaggcggcacccagaggctgcccggccacaagtatgtgctggccgtgggcagcagcgtcttccacgccatgttttatggagagctggccgaggacaaggatgagatccgcatcccagatgtggagcctgctgccttcctggccatgctgaagtacatctactgtgatgaaattgacctggccgctgacacagtgctggccaccctgtatgctgccaagaagtacatcgtgccccacctggcccgggcctgtgtgaacttcctggagaccagcctgagcgccaagaatgcctgtgtgctgctgagccagagctgcctgtttgaggagccagacctgacccagcgctgctgggaggtgattgatgcccaggccgagctggccctgaagtctgagggcttctgtgacatcgacttccagaccctggagagcatcctgcggcgggagaccctgaatgccaaggagatcgtggtgtttgaagctgccctgaactgggccgaggtggagtgccagaggcaggacctggccctgagcattgagaacaagaggaaggtgctgggcaaggccctgtacctgatccgcatccccaccatggccctggatgactttgccaatggagctgcccagagcggcgtgctgaccctgaatgagaccaatgacatcttcctgtggtacacagctgccaagaagccagagctgcagtttgtgtccaaggccaggaagggcctggtgccccagcgctgccaccgcttccagagctgtgcctaccgcagcaaccagtggagataccggggccgctgtgacagcatccagtttgctgtggacaagagggtcttcatcgccggcttcggcctgtatggcagcagctgtggcagcgctgagtacagcgccaagattgagctgaagaggcagggcgtggtgctgggccagaacctgagcaagtacttcagtgatggcagcagcaacaccttccctgtgtggtttgagtaccctgtgcagatcgagccagacaccttctacacagccagcgtcatcctggatggaaatgagctgagctacttcggccaggagggcatgacagaggtgcagtgtgggaaggtgacagtgcagttccagtgcagcagtgacagcaccaatggaactggagtgcagggcggccagatccctgagctgatcttctacgcctag

SEQ ID NO: 183442 - DNA, 1569 bp, Artificial Sequence
  derived and/or modified sequence
atggtggatgacaaggagaagaacatgaagtgcctgaccttcttcctgatgctgcctgagaccgtgaagaacagaagcaagaagagcagcaagaaggccaacaccagcagcagcagcagcaacagcagcaagctgccccctgtgtgctatgagatcatcaccctgaagaccaagaagaagaagatggctgctgacatcttccccaggaagaagccagccaacagcagcagcacctctgtgcagcagtaccaccagcagaacctgagcaacaacaacctgatcccagcccccaactggcagggcctgtaccccaccatccgggagagaaatgccatgatgttcaacaatgacctgatggctgatgtgcactttgtggtgggccccccaggcggcacccagaggctgcccggccacaagtatgtgctggccgtgggcagctctgtgttccacgccatgttctacggggagctggccgaggacaaggatgagatccgcatcccagatgtggagcctgctgccttcctggccatgctgaagtacatctactgtgatgaaattgacctggccgctgacacagtgctggccaccctgtatgctgccaagaagtacatcgtgccccacctggcccgggcctgtgtgaacttcctggagaccagcctgagcgccaagaatgcctgtgtgctgctgagccagagctgcctgtttgaggagccagacctgacccagcgctgctgggaggtgattgatgcccaggccgagctggccctgaagtctgagggcttctgtgacatcgacttccagaccctggagagcatcctgcggcgggagaccctgaatgccaaggagatcgtggtgtttgaggccgccctgaactgggccgaggtggagtgccagaggcaggacctggccctgagcattgagaacaagaggaaggtgctgggcaaggccctgtacctgatccgcatccccaccatggccctggatgactttgccaacggggccgcccagagcggcgtgctgaccctgaatgagaccaatgacatcttcctgtggtacacagctgccaagaagccagagctgcagtttgtgtccaaggccaggaagggcctggtgccccagcgctgccaccgcttccagagctgtgcctaccgcagcaaccagtggagataccggggccgctgtgacagcatccagtttgctgtggacaagagggtcttcatcgccggcttcggcctgtatggcagcagctgtggcagcgctgagtacagcgccaagattgagctgaagaggcagggcgtggtgctgggccagaacctgagcaagtacttcagtgatggcagcagcaacaccttccctgtgtggtttgagtaccctgtgcagattgaaccagacaccttctacacagccagcgtcatcctggatggaaatgagctgagctacttcggccaggagggcatgacagaggtgcagtgtgggaaggtgacagtgcagttccagtgcagcagtgacagcaccaacggcaccggggtgcagggcggccagatccctgagctgatcttctacgcctag

SEQ ID NO: 183443 - DNA, 1386 bp, Artificial Sequence
  derived and/or modified sequence
atggccgccgacatcttcccccggaagaagcccgccaacagcagcagcactagtgtgcaacagtatcatcagcaaaatctgtctaataataacctgatacctgcccctaattggcaggggctctaccccactatccgggaacggaatgccatgatgtttaacaatgacctcatggcggatgtccacttcgtggtcgggccccccggagggactcaaagactccccgggcacaaatatgtcctggcagtggggagttccgttttccatgcaatgttctacggagagctcgccgaggataaagatgaaattcgaatcccagacgtggaaccagccgcttttctggcaatgctcaaatacatctactgcgacgagatcgacctcgccgctgatactgttctggctactctgtatgcagccaagaaatatatagtgccgcatctggcgagagcttgcgtgaatttcctagaaacgtcactcagtgctaaaaacgcctgcgtgttactgagtcaaagctgcttattcgaagaacccgatcttacccagcgatgttgggaggtgatagacgcacaggccgagctggccttgaagagcgaaggattctgcgatattgatttccagacactcgaatctattctgcggagggagaccctcaacgccaaggaaattgtcgtgttcgaggctgcattaaactgggcagaagtggaatgtcagcgccaggacctcgctctgagcatcgaaaataaacgaaaggtcctcggaaaggcactgtacctgattcgtatacccacgatggctttagacgactttgccaacggggccgctcaatccggcgtattaaccctgaatgagaccaatgacatctttctgtggtacaccgccgctaaaaaacccgaactccagtttgtgagcaaagcacggaaaggattggttcctcagcgctgtcatagatttcagagctgcgcatacaggtccaaccaatggcgctacaggggccggtgtgattcgatccagttcgccgttgacaaaagagtgtttattgcaggcttcggcctctatggatctagctgtggatcagctgaatacagcgccaagattgaactcaagcggcagggagtggttcttggccagaacttgtctaaatattttagcgacgggagctcaaatacctttcctgtgtggtttgaataccctgtgcaaatcgagcctgacacattctatacagcctctgttattcttgacggcaatgagttgtcctatttcggccaagaggggatgaccgaggtccagtgtgggaaagtgactgtgcagttccaatgttccagcgacagcaccaatggtaccggcgtgcagggcggccagatcccagaattgatcttttacgcatag

SEQ ID NO: 183444 - DNA, 1569 bp, Artificial Sequence
  derived and/or modified sequence
atggtggacgacaaggagaagaacatgaagtgcctgaccttcttcttaatgctacctgaaaccgtcaagaatcggtccaagaaatcctcaaagaaggccaacacaagtagcagttcgtcaaatagttccaagctccctcctgtgtgctacgagataattacgctgaaaaccaagaagaagaaaatggccgcagacatctttcccaggaagaaacccgccaactcctcttcaacgtccgtgcagcagtaccatcagcagaacctgagcaataacaaccttatccctgctccaaactggcagggcctctacccaactattcgggaaaggaatgccatgatgtttaataatgatctgatggcagatgtccactttgtggtggggcctccagggggcactcagaggttgcctggccacaaatacgtcctagctgtggggtccagcgtgttccacgctatgttctatggcgaactcgccgaggataaagatgaaattagaattcctgatgtggagccagccgcatttttggcaatgctcaagtacatctattgtgacgaaatcgatctcgccgcagatacagtcctggcaaccctgtacgctgccaagaagtatattgttccacacttagcccgcgcctgtgtaaacttcctcgagacttccttaagcgctaagaatgcttgcgttctgctctcacaatcttgcctctttgaggagcctgacctcacccagcggtgctgggaagtgatcgatgcgcaagctgagctggcccttaagtctgaggggttctgcgacatcgactttcagaccctggaatctattcttaggcgcgaaactctaaacgccaaagagattgtggttttcgaagccgccctgaactgggccgaagtcgaatgccaacggcaggatctcgcgctctccatcgagaataagcgaaaggtcttaggcaaagctctatacttgatacgcataccgaccatggccctcgacgacttcgctaatggagctgcccaaagcggggttttgaccctcaatgaaaccaatgacattttcctttggtacacagccgctaaaaaacccgaactgcagtttgtgagcaaagctagaaagggactggtcccccagaggtgccacaggtttcagtcttgcgcctaccgctccaatcagtggcgatatcgtgggcgctgtgacagcatccagttcgcggtagacaaacgagtgtttatcgccggcttcggcctgtatgggtcctcctgcgggagcgccgaatactcagccaaaattgagctgaagagacagggtgtggtgctgggccagaacctgtctaagtacttctccgatggaagctccaacacctttcccgtctggtttgaataccccgtacagattgaacctgacacattctatacagcttcagtcattctggacgggaatgagctcagttattttggacaggagggcatgaccgaggtgcagtgcgggaaggtcacagtacagttccagtgtagcagtgacagcacaaacgggacaggagttcagggcgggcagatcccggaacttatcttttacgcctag

SEQ ID NO: 183445 - DNA, 1386 bp, Artificial Sequence
  derived and/or modified sequence
atggccgccgacatcttcccccggaagaagcccgccaacagcagctctacgagtgttcaacagtatcatcaacaaaaccttagtaataacaacctgattcctgccccgaactggcagggactttacccgacgattcgggagagaaacgctatgatgttcaataacgacctcatggctgatgtgcattttgtggttggccctccagggggcacacagcgacttcccggtcacaagtacgtgctcgcggtcggcagtagtgtgttccacgcaatgttctacggtgagctcgcagaggataaggatgagattagaatacccgatgtcgaaccggctgcattcctggcaatgctgaaatacatttactgcgacgaaattgatctcgcagccgacactgtcctggccacgctctacgccgccaaaaaatatattgtcccacatcttgcgcgggcctgcgtgaatttcctggaaaccagccttagcgctaaaaatgcgtgtgttctgctgtcccagagttgtctcttcgaagagcccgatctcacacagcggtgctgggaggtgatcgacgctcaggctgagcttgccctgaagtctgaaggattctgtgacatcgactttcagacactagagtcaatcctcagaagagagaccctcaacgccaaggagatagtcgtgttcgaagctgcgctgaactgggctgaggtagagtgccagcgacaggatctggctttgtccatcgaaaataaaagaaaagtgctgggaaaggccctgtacttaatacgcatcccaaccatggccctcgatgatttcgctaacggagccgcgcaaagtggcgtgctcaccttaaatgaaacgaacgacattttcctctggtacactgccgcgaaaaaaccagaactccaatttgtcagtaaagcaagaaagggcctggtcccacagcggtgccacaggttccaaagctgcgcctatcgaagcaaccagtggaggtatcgcggtaggtgcgacagtatacagtttgcggtggacaagcgtgtgttcatcgccgggtttggtctctacggatcgagctgtggtagcgctgagtactcagcaaagatcgagctgaaacgccagggagttgtgctgggccagaacctcagtaagtactttagcgatggctctagtaataccttccccgtgtggttcgagtatcctgtgcaaatcgagcccgatactttttatacagcttctgtgatactggacggcaatgaactgagctattttggacaggagggtatgaccgaggtccagtgtggaaaggttactgttcagttccagtgcagcagtgactctaccaatggaactggcgtgcagggcggacagatacccgaattgatcttctacgcatag

SEQ ID NO: 183446 - DNA, 1569 bp, Artificial Sequence
  derived and/or modified sequence
atggtggacgacaaggagaagaacatgaagtgcctgaccttcttcctgatgctccccgagactgtgaagaaccgctcaaaaaaaagctccaaaaaagcaaatacgtccagtagtagtagcaatagctcaaagctgccacccgtctgctatgagatcatcacattgaaaacgaaaaagaaaaaaatggccgcagatatctttcctaggaaaaaacctgctaacagctctagtacctctgtgcagcagtatcatcagcagaatttgtctaacaataatctaatcccagcaccgaactggcaggggctttatccaactatcagggagcgtaacgcaatgatgttcaacaatgacctgatggccgacgttcactttgttgtcggccccccaggcgggacacagcggctgccgggccacaagtacgtgctcgcagttgggtctagcgtgttccatgccatgttctacggggaactagccgaagacaaggatgaaatccgcattccggatgtcgaacctgccgcctttctggcaatgttgaagtacatctactgcgatgagattgacctcgccgcagataccgtgctcgctaccctgtacgctgccaagaagtacatagtgccacatcttgcgcgagcctgtgtcaactttctggaaaccagtctgagcgccaaaaacgcctgcgtcttgctatctcaatcctgtttgttcgaggagcccgacttgacacaacgctgttgggaggtcatagatgcacaggccgagctcgctctgaagtctgaaggattctgcgatattgacttccagactcttgagtcgattctgcggcgtgaaaccctgaacgctaaagaaattgtggttttcgaggccgcgctaaattgggcagaggtcgagtgtcaaaggcaggacctagctctgtctatcgagaacaaacgcaaggtgctgggcaaggccctttacctcatccgcattcctaccatggctctagatgactttgccaatggagccgcccagtccggggtcctcaccctgaacgaaaccaacgatatatttttgtggtacaccgctgctaagaagcctgagcttcaattcgtcagcaaagcccgtaaaggtctcgtccctcagagatgtcacaggttccagtcctgtgcctatagaagtaatcagtggcgataccggggaaggtgcgattcaattcagttcgccgtggataaaagggtgtttatcgcaggcttcggcttgtacggatcaagctgtggctccgcagagtactccgcgaagatcgagctcaagcgccagggtgttgtcctggggcagaacctgtccaaatatttctccgatgggtcaagtaatacctttcccgtgtggttcgagtatcctgtgcagattgagccggataccttctataccgcctcagtgatcctagacgggaacgaattaagctatttcggtcaggaaggaatgactgaggtacagtgcgggaaggtgaccgttcaattccagtgcagtagcgactccacaaatggaactggagtgcaggggggtcaaattccagaactgatattctacgcttag

SEQ ID NO: 183447 - DNA, 1386 bp, Artificial Sequence
  derived and/or modified sequence
atggctgctgatatctttccccgaaagaagccggcaaacagctcttctacgtcagtgcagcagtaccaccaacagaatcttagtaataacaacctgatcccggctccaaattggcagggattatatccaaccattcgagaacgaaacgcaatgatgtttaataacgatctgatggctgacgtgcacttcgttgttgggcctcccggaggcacacagcggctgcccggacacaagtacgtgttggcagtcggaagctcagtctttcatgccatgttttatggcgagctagcggaagataaagacgaaatacgtattcctgacgttgagcccgctgcttttctcgccatgctgaaatatatctattgcgacgagatcgacctggccgcagataccgtgctggccaccctgtatgcagctaagaagtatatagtgccccatctcgcaagagcgtgtgtgaatttcctagagacttccctgagcgcgaagaacgcgtgtgttctattgagccagtcctgcttgtttgaagagccagacctcacccagcgatgctgggaagttatcgatgcgcaggccgagttagctctgaaaagtgagggcttttgcgacatcgactttcaaactctcgaatcaatcctgcgcagagaaacgctgaacgccaaggagatagtagttttcgaggccgctttgaactgggccgaggtggaatgccaaaggcaggacttggctctgagcattgaaaacaagcggaaggtgcttgggaaagcactgtacctcatccgcatcccgactatggcactggatgactttgccaacggggcagctcaatccggagtcctcaccctgaatgaaaccaatgacatctttctgtggtacacagccgctaagaagccagagttgcagtttgtaagcaaggcacgcaaagggctcgtcccacagcgatgccataggtttcagtcttgcgcctacaggagtaaccagtggaggtataggggtagatgcgacagcattcagttcgctgtggacaagagggtgtttatcgcagggttcggcctgtatggtagctcatgtggctcagcggagtactcagccaaaatcgagttaaagaggcagggggttgtgctaggccagaatctgtcaaaatatttttctgatggctcatctaacactttccccgtctggtttgagtatcctgtgcagatcgagccggatactttctatacggccagtgtgatcctggatggcaacgagcttagctatttcggtcaggaggggatgacagaggtgcagtgtggaaaagtgactgtccaattccagtgttctagcgattccaccaacggtacgggcgtacaggggggtcagatccctgagcttatattctacgcatag

SEQ ID NO: 183448 - DNA, 1569 bp, Artificial Sequence
  derived and/or modified sequence
atggttgacgacaaggagaaaaatatgaagtgtctcactttttttctaatgctccccgaaactgtgaagaaccggtccaagaagtcctcaaagaaggctaacaccagtagtagctcttccaacagttctaagttgcctcccgtctgttatgaaatcatcactctcaagacgaaaaaaaagaagatggcggcagatattttcccgcgaaaaaaaccagcaaattcatcaagcacctccgtgcaacagtaccatcagcagaacctgtccaataacaaccttattcctgccccaaactggcaggggctctaccccacgatcagggagagaaacgccatgatgttcaataatgacttgatggcggatgtacacttcgtggtggggcctcccggtggaacgcagcgcctgccgggtcacaagtacgtcctagccgttggcagttcggtgttccatgctatgttttacggtgagctggccgaggacaaggacgaaattcgcattcctgatgtagagccagcagcatttcttgctatgctcaagtacatttattgcgatgaaatcgacctggccgctgacacggtgttggcaacactttacgccgctaagaagtatatagttcctcatttggctcgcgcatgcgtcaacttcctggagaccagcctctcagccaagaacgcgtgtgtcctgctgagtcaaagctgtctgttcgaagagcccgatctgacacagaggtgttgggaggtgattgacgcgcaggccgaactagctttaaaatcggagggcttctgcgacatcgactttcagacccttgagtctattttgagacgggagacgctcaacgcaaaggagatcgtcgtgttcgaggcggctcttaattgggctgaagtcgagtgtcagagacaagatctagccctcagtatcgagaacaagcgtaaagtgctcggaaaagccctttacctcatcaggataccaaccatggccctagacgacttcgccaacggggctgcccagtcaggtgtgctgactctgaacgagacaaacgacatctttttatggtatactgccgcaaagaaacctgagctacaatttgtaagtaaagcaagaaaggggctggttccccagcgatgccacagattccaaagttgcgcctaccgtagcaatcagtggagatatcgaggtcgttgtgattccatacagttcgcagtggacaagcgcgtgtttatcgctggcttcggcctgtatgggtcctcatgcggctcagcagagtactcagccaagattgagctcaagagacagggggtagtgctggggcagaacctgtcaaaatattttagtgatggcagcagcaatacatttcccgtttggttcgagtatcccgtgcaaatagaaccagatactttctatactgcctccgtcattctggatggcaatgagttatcatactttgggcaggagggtatgacagaggtacagtgtgggaaggtgaccgtgcagttccagtgcagctccgactcgactaacggtaccggagtgcaaggcggacagatccccgagctgattttttacgcgtag

SEQ ID NO: 183449 - DNA, 1386 bp, Artificial Sequence
  derived and/or modified sequence
atggcggcagacatttttccgaggaagaaacctgctaattcctcctcgacttccgtccaacagtatcaccaacagaacctgagcaacaacaatctcattcctgcacctaattggcaggggctgtaccctactatcagggagagaaatgcaatgatgttcaacaatgacctgatggctgatgtgcactttgtggtcggccctcctggcggaactcagcgcctccccggtcataagtacgttctggccgtagggtcatccgtgtttcatgccatgttttatggagagctcgctgaagataaagacgaaataagaatacccgatgttgagcccgctgcttttcttgcgatgctcaaatatatttattgcgacgagatcgatttagccgctgatactgtcctcgcgacactgtacgccgcaaaaaaatatatcgtccctcatctggccagagcctgtgtgaacttccttgaaacttctttgtctgcgaaaaacgcatgtgttttgttgtcccagtcctgcttattcgaagagcccgacctgacacagagatgctgggaggtcattgatgcccaagcagagctcgcccttaagtcagagggattttgcgatatcgacttccagacgctcgaaagtatcctaaggagggagacactcaatgccaaggagatcgtcgttttcgaggctgctcttaactgggcggaggtagagtgccaacgccaggatcttgccttgagcatcgagaacaagcgaaaggtgctcgggaaggccctctacctcattaggatccccaccatggctctggacgactttgctaatggagccgctcagtccggggtgcttaccttgaacgagaccaatgacattttcctgtggtacactgccgctaagaagcccgagctccagttcgtcagcaaagcaagaaagggcttagtgccccagagatgtcatcgatttcagtcttgtgcttaccggtccaatcagtggaggtacagaggcaggtgtgattcaatacagtttgccgtcgataagcgcgtgtttatagccggattcgggttgtatggctctagctgtggcagcgctgaatattccgccaagatcgaactgaaaagacagggggtcgtgctgggtcagaacctcagcaaatacttttccgacggcagttcgaacacttttcctgtctggtttgaatatcctgtccagatagaaccagacacattctacaccgcgagtgtgattttagacgggaacgagctctcatattttggacaagaaggtatgacggaggtgcagtgcgggaaggtgacggttcagttccagtgcagttccgactctactaatggaacgggagtacaggggggacaaattccagagttaatattctacgcgtag

SEQ ID NO: 183450 - DNA, 1569 bp, Artificial Sequence
  derived and/or modified sequence
atggtggatgataaagaaaagaatatgaagtgtctgacctttttcctgatgctgcctgaaactgtcaagaataggtcaaagaagagttcaaagaaggctaacacctcttcctcaagctcgaatagttctaagctccccccagtgtgctatgaaataatcaccttaaagacgaaaaaaaagaagatggccgctgacatattcccaaggaagaaaccagcaaattctagtagcacctcagtgcagcaataccaccagcagaatcttagtaataacaacctgatccccgctcctaattggcaggggctctaccctaccatacgcgagaggaacgccatgatgtttaataacgacctcatggcagacgtccattttgtcgtgggtcctccagggggtactcaacggctccccggacacaagtatgtactggcagtgggctcgtccgtttttcacgctatgttctatggagaactagccgaggataaggatgagattaggatcccggacgtggaacccgctgctttcctggctatgctgaaatatatctactgtgatgagattgacctggcagcagatactgtcctggcaaccctgtatgcggctaagaaatatatcgtgccacatctcgctcgtgcatgcgtgaactttctggagaccagtctgtctgcaaagaacgcttgtgtgctgctctcacagtcatgccttttcgaggagcctgacctgactcaaaggtgttgggaagtgatcgacgcgcaggctgagctagccctaaagagtgaaggattctgcgacatagacttccagaccctcgagtcaattctacgtcgagagaccctgaacgctaaggaaatcgtggttttcgaagctgcgcttaattgggcagaggttgaatgtcagcgacaggacttagccttgtcaatcgaaaataagagaaaggtgctggggaaagcattataccttattcgaatcccaaccatggccctggacgatttcgccaacggagcagctcagtcgggggtgctcacattaaatgagacaaatgatatatttctctggtatacagccgctaagaaacccgaactgcagttcgtgtccaaagcaagaaagggcttagtcccccaacgatgccaccggtttcagtcctgcgcctaccgtagtaaccagtggcgctacagaggccgatgtgattccatccagttcgccgttgataaacgggtttttatagctggttttgggctctatggaagtagctgtggaagcgccgaatattcagcaaagatagagctcaaacgacagggtgttgtgctgggacagaatctctccaaatatttttctgacggaagcagtaacaccttcccagtgtggtttgaatatccagttcaaatcgaacctgatacattttatacggctagtgtgattctggacggcaacgagttgagctatttcggccaggaaggaatgacagaagtacagtgcgggaaggtcaccgtacaatttcagtgttccagcgacagtacaaatgggaccggggtgcaaggtggccagatccccgagctgatcttttacgcttag

SEQ ID NO: 183451 - DNA, 4857 bp, Artificial Sequence
  derived and/or modified sequence
cagactcacgcagctccagcccatcttgctgacctaattcagaaaagaagtgctacagctctgtgcctgtcatctttgcagtgtagcattttcaggtgatctaggaaacagttatttttatgagcaaataagagaaacaggaatcatgatggggatatatttaacagacccagtactggataaaacttaaagccagtttctattcaacatagtgaaaaggtcaccttgcctggctgagaaaagcagcaaaatatcagctttgttggtttcagttaacctcttagcccgggctaatctcttttccttgatgttcaaaccaatttgggatatctaactctaaagagagacacactgtactcatggtagatgacaaggaaaagaacatgaaatgtctcaccttcttcttgatgcttccagagacggtaaagaacaggtccaagaaaagctcaaagaaagcaaataccagcagcagcagtagcaacagcagcaagttgccaccagtttgttatgaaataattaccttgaagactaaaaagaagaagatggctgctgatatattcccccgtaaaaagccagccaactccagcagcaccagcgtccagcagtaccaccagcagaatctcagtaacaacaaccttatcccggccccaaactggcagggtctttatcccaccattagagagagaaatgcgatgatgttcaataatgatttgatggcagatgtacattttgtggttgggccaccaggtgggactcaacggttgccaggacacaaatatgttttagctgttgggagctctgtgttccatgcgatgttttacggagaacttgcagaggacaaagatgaaatccgtataccagatgtcgaacctgctgcttttctcgctatgctgaaatatatctattgtgatgaaattgacttggctgctgacacagtgctggccacactttatgctgccaaaaagtacattgtccctcaccttgccagagcctgtgttaatttcctggagaccagcctgagtgccaagaatgcctgtgtgctcctctcccagagctgcctgttcgaggagccagacctgacccagcgttgctgggaggtgattgatgcccaggctgagttagctctcaagtctgagggattctgcgatattgacttccagacactagaaagtattctccgtagggaaactctgaatgccaaagaaattgtggtttttgaggcagctctcaactgggctgaagtagaatgccaacgacaagatctggcgttgagcattgaaaataaacgcaaggttctaggaaaggcactttacttgatccgcatacccacaatggccctcgatgattttgcaaatggtgctgcacagtccggggtattaactctcaatgagaccaacgacatcttcctctggtatactgcagccaaaaagcctgagcttcagtttgtgagtaaagcccgtaagggccttgtcccccagcgctgtcaccgtttccagtcgtgtgcctatcgaagcaaccaatggcgctatcgtggtcgctgtgacagcatccagtttgcagttgataaaagagtgttcattgctggctttgggctgtatggctccagctgtggttctgcagaatacagtgccaagattgaacttaagcggcagggcgttgtcctggggcagaacttgagcaagtacttctcagatgggtccagcaatacctttcccgtatggtttgaatacccagtgcagatcgagccagacaccttctacacagccagtgtgatactggatggcaatgaactcagctactttggacaagaaggcatgacagaagttcagtgtggcaaagtgactgtccagtttcagtgctcctcagatagcaccaatggcactggggtacagggagggcagatccctgaacttatattctatgcttgaaaactcacttcctgaagcagcttgagctccaaagtgcacatctggttccaacttgcctgatgcttagctcatctgcaaatatgtgatcagtgccggtaatttgtaatgaatgaagcggtaggcaggttctaatttcttttaaccttttaattatgtacaggcaaaaatgcagcattccgcttttaactatctgcttaaaagagctaacgttcttattaaggctttgtggtttttagagttgcatctatgaacctggggagattatgtgctttcccaagcgttccaccaccctctcagttttgtccctctgaagataattttggatcaccttgaatttccttttggacgttatttgatgaacagaaataaagtgataacaagagttatttttaaacagaactcctcttaccccccaaaacagataaacctcagtgtacaattttgaaagaagttttgccttgtaatgagtaataatttagaaagtagacagtggttgtgtttggctctcgttttattccttttacatttgttgcttctgggatttaaaaaattactaaattcataagatagttaggtattaaacacttcagaatatcaatgtaaaattggaaaataaggaactgggggcatttgtttaggccatgacttctacaagcagatttcttttcttttagtttagaagacaaaaaatttcaatacagatacttcttttagaagtaaatttttagattttattgtcagtagaaaaaagttaaactcctactaatttaaactaagacagtttaaaaaggaagcctgaaaaagactcatactacaaataatttaattgatggcatataagaatatgcagtttgaaaaagccaaactcttctctccacttagcttttgatccccactgtttgcttatttgtataagtcatactgtgtagaatttctattttctttttccccattaaaagaggaccaaacaattctttatacaaatggagtagcaactagttttgtagcactacatttaatgtaatgagatacctttgttcatttttttaaatttgaaatatactttacctgatccactttgattgtatactatattctttgttaattttaattttgtcctgttcctagactgctagaatctggcccctggccatcttaaagtgccaacatatgcctgcagggtttataaaaaatggcctggagtgacacattttattatacctaatattcactgcatcagtatcacatctagctcccttacttgtccacagataatgtaaacaaaggagggaaaaacttattaaattctccttcgctgctggcttgtgctggtttagtgcctgtgtccctggcagtgtccagtgtgttcacttccagttgaagtatccatgtgtttctgggcagcttttctgctcagtgtgatcctgagatggcttccccgccgccacccagagtgtggtccttggccgcctcctgctcctgctctgcaagcctgaaactggcttgtctggagccaggagttagtcctggggtgtgtgtgtgcctgcgcacccatgcgcatgcaagtgtgtttgccagctcaggagctgtctcctctctacctggctagtaagaggtgggacagtaatggtcctcctgctggccccagcaaggcccatgagtgactgccctgacgtattcactgtgcctctgggccacttcttcccctgtagatgtgggcttgttgccttcagccggcttccctgagggaggagaacactggattattggaaatgttttaatcactcttgccattacctacatctattagcatagatgatgaaaagctgttactggtgattatagatgagtatttccaggacaacgttctaaaagtacaattatttcttattggggagattacaggtagtttggcaaagcattgaagtacaaaggtacattttcaattaaaaagcacacttctacaaaagatttggtttttaaattatggttacacatttcagtaactcatagctgctgtgcaaattggtagaccttataagaaggcacttgtttgtaagccagagaagaaactttaattgcatcctatcagattgttgaggtgggtgtgatagtcttcaggtgcagtgcgttcattcactaacgctcactgtcagtgcccatgtttgctagctgcctccatgtgactagtgagctgctggtgaaagtcgtgtgaaatcctgtacactgtgtatagaataatgtaattttatgttaattgttattactttaaaacatatctaccatctgattggctggtaccgagagctgtgggtaaaatttgaaaattgtatttagaataagaaattttacattttaaaccctattgtcctttatgcattttcaatgaaatggaatgaaggctaatatgcttgctttatttacttttgtaatcttggattttgtagcttttaaaactagaaaccattgttctaacaaagcaggcaactttattctataaacacaactttattaagcagaatacactgtagatgcttttccccaacgtatctggctggcagtctttgtcgttgttcattctggggataaaggggaactaggctagcagttctaatgtgacattctttaagcatatcttaaaatagtatttaagtaaatggtctaatttctacataattattgcactgaacttttttgtttattaaggtgtttaaataagctcagctaattcaagacactgtagccacttgtgcatcagtgtgcttgaatttagtagcttacagcattatttatgaaggaaaaaatacataaatatgaagtacctcatgttgaatgttattgtactgtatttttaatgtaacagtgcagatcttgttagacacatgaatgtgtataatcatgttaaatgcaaataaaactagttcataga

SEQ ID NO: 183452 - DNA, 4826 bp, Artificial Sequence
  derived and/or modified sequence
agagcgtgccctgcgtgcgggtgcccgccgagcccgccgggcgctggatctccgagtgccccggccggggcctgaggagcgggcacagggcaaggcggcggacggctgcgtcgcccgaggcgaggaggagcgctggcggtgtcactgttttgcttggtccaatcatgattggtgacttcagctattggctcggagcactggctgtctgactccatctgcagggctgtaatacctactctcctccgatccattcaccacacaacttcagccggctgaacagactcacgcagctccagcccatcttgctgacctaattcagaaaagaagtgctacagctctgtgcctgtcatctttgcagtgtagcattttcagagacggtaaagaacaggtccaagaaaagctcaaagaaagcaaataccagcagcagcagtagcaacagcagcaagttgccaccagtttgttatgaaataattaccttgaagactaaaaagaagaagatggctgctgatatattcccccgtaaaaagccagccaactccagcagcaccagcgtccagcagtaccaccagcagaatctcagtaacaacaaccttatcccggccccaaactggcagggtctttatcccaccattagagagagaaatgcgatgatgttcaataatgatttgatggcagatgtacattttgtggttgggccaccaggtgggactcaacggttgccaggacacaaatatgttttagctgttgggagctctgtgttccatgcgatgttttacggagaacttgcagaggacaaagatgaaatccgtataccagatgtcgaacctgctgcttttctcgctatgctgaaatatatctattgtgatgaaattgacttggctgctgacacagtgctggccacactttatgctgccaaaaagtacattgtccctcaccttgccagagcctgtgttaatttcctggagaccagcctgagtgccaagaatgcctgtgtgctcctctcccagagctgcctgttcgaggagccagacctgacccagcgttgctgggaggtgattgatgcccaggctgagttagctctcaagtctgagggattctgcgatattgacttccagacactagaaagtattctccgtagggaaactctgaatgccaaagaaattgtggtttttgaggcagctctcaactgggctgaagtagaatgccaacgacaagatctggcgttgagcattgaaaataaacgcaaggttctaggaaaggcactttacttgatccgcatacccacaatggccctcgatgattttgcaaatggtgctgcacagtccggggtattaactctcaatgagaccaacgacatcttcctctggtatactgcagccaaaaagcctgagcttcagtttgtgagtaaagcccgtaagggccttgtcccccagcgctgtcaccgtttccagtcgtgtgcctatcgaagcaaccaatggcgctatcgtggtcgctgtgacagcatccagtttgcagttgataaaagagtgttcattgctggctttgggctgtatggctccagctgtggttctgcagaatacagtgccaagattgaacttaagcggcagggcgttgtcctggggcagaacttgagcaagtacttctcagatgggtccagcaatacctttcccgtatggtttgaatacccagtgcagatcgagccagacaccttctacacagccagtgtgatactggatggcaatgaactcagctactttggacaagaaggcatgacagaagttcagtgtggcaaagtgactgtccagtttcagtgctcctcagatagcaccaatggcactggggtacagggagggcagatccctgaacttatattctatgcttgaaaactcacttcctgaagcagcttgagctccaaagtgcacatctggttccaacttgcctgatgcttagctcatctgcaaatatgtgatcagtgccggtaatttgtaatgaatgaagcggtaggcaggttctaatttcttttaaccttttaattatgtacaggcaaaaatgcagcattccgcttttaactatctgcttaaaagagctaacgttcttattaaggctttgtggtttttagagttgcatctatgaacctggggagattatgtgctttcccaagcgttccaccaccctctcagttttgtccctctgaagataattttggatcaccttgaatttccttttggacgttatttgatgaacagaaataaagtgataacaagagttatttttaaacagaactcctcttaccccccaaaacagataaacctcagtgtacaattttgaaagaagttttgccttgtaatgagtaataatttagaaagtagacagtggttgtgtttggctctcgttttattccttttacatttgttgcttctgggatttaaaaaattactaaattcataagatagttaggtattaaacacttcagaatatcaatgtaaaattggaaaataaggaactgggggcatttgtttaggccatgacttctacaagcagatttcttttcttttagtttagaagacaaaaaatttcaatacagatacttcttttagaagtaaatttttagattttattgtcagtagaaaaaagttaaactcctactaatttaaactaagacagtttaaaaaggaagcctgaaaaagactcatactacaaataatttaattgatggcatataagaatatgcagtttgaaaaagccaaactcttctctccacttagcttttgatccccactgtttgcttatttgtataagtcatactgtgtagaatttctattttctttttccccattaaaagaggaccaaacaattctttatacaaatggagtagcaactagttttgtagcactacatttaatgtaatgagatacctttgttcatttttttaaatttgaaatatactttacctgatccactttgattgtatactatattctttgttaattttaattttgtcctgttcctagactgctagaatctggcccctggccatcttaaagtgccaacatatgcctgcagggtttataaaaaatggcctggagtgacacattttattatacctaatattcactgcatcagtatcacatctagctcccttacttgtccacagataatgtaaacaaaggagggaaaaacttattaaattctccttcgctgctggcttgtgctggtttagtgcctgtgtccctggcagtgtccagtgtgttcacttccagttgaagtatccatgtgtttctgggcagcttttctgctcagtgtgatcctgagatggcttccccgccgccacccagagtgtggtccttggccgcctcctgctcctgctctgcaagcctgaaactggcttgtctggagccaggagttagtcctggggtgtgtgtgtgcctgcgcacccatgcgcatgcaagtgtgtttgccagctcaggagctgtctcctctctacctggctagtaagaggtgggacagtaatggtcctcctgctggccccagcaaggcccatgagtgactgccctgacgtattcactgtgcctctgggccacttcttcccctgtagatgtgggcttgttgccttcagccggcttccctgagggaggagaacactggattattggaaatgttttaatcactcttgccattacctacatctattagcatagatgatgaaaagctgttactggtgattatagatgagtatttccaggacaacgttctaaaagtacaattatttcttattggggagattacaggtagtttggcaaagcattgaagtacaaaggtacattttcaattaaaaagcacacttctacaaaagatttggtttttaaattatggttacacatttcagtaactcatagctgctgtgcaaattggtagaccttataagaaggcacttgtttgtaagccagagaagaaactttaattgcatcctatcagattgttgaggtgggtgtgatagtcttcaggtgcagtgcgttcattcactaacgctcactgtcagtgcccatgtttgctagctgcctccatgtgactagtgagctgctggtgaaagtcgtgtgaaatcctgtacactgtgtatagaataatgtaattttatgttaattgttattactttaaaacatatctaccatctgattggctggtaccgagagctgtgggtaaaatttgaaaattgtatttagaataagaaattttacattttaaaccctattgtcctttatgcattttcaatgaaatggaatgaaggctaatatgcttgctttatttacttttgtaatcttggattttgtagcttttaaaactagaaaccattgttctaacaaagcaggcaactttattctataaacacaactttattaagcagaatacactgtagatgcttttccccaacgtatctggctggcagtctttgtcgttgttcattctggggataaaggggaactaggctagcagttctaatgtgacattctttaagcatatcttaaaatagtatttaagtaaatggtctaatttctacataattattgcactgaacttttttgtttattaaggtgtttaaataagctcagctaattcaagacactgtagccacttgtgcatcagtgtgcttgaatttagtagcttacagcattatttatgaaggaaaaaatacataaatatgaagtacctcatgttgaatgttattgtactgtatttttaatgtaacagtgcagatcttgttagacacatgaatgtgtataatcatgttaaatgcaaataaaactagttcatagatttgttttccttta

SEQ ID NO: 183453 - DNA, 5137 bp, Artificial Sequence
  derived and/or modified sequence
tgcgtgcgggtgcccgccgagcccgccgggcgctggatctccgagtgccccggccggggcctgaggagcgggcacagggcaaggcggcggacggctgcgtcgcccgaggcgaggaggagcgctggcggtgtcactgttttgcttggtccaatcatgattggtgacttcagctattggctcggagcactggctgtctgactccatctgcagggctgtaatacctactctcctccgatccattcaccacacaacttcagccggctgaacagactcacgcagctccagcccatcttgctgacctaattcagaaaagaagtgctacagctctgtgcctgtcatctttgcagtgtagcattttcaggtgatctaggaaacagttatttttatgagcaaataagagaaacaggaatcatgatggggatatatttaacagacccagtactggataaaacttaaagccagtttctattcaacatagtgaaaaggtcaccttgcctggctgagaaaagcagcaaaatatcagctttgttggtttcagttaacctcttagcccgggctaatctcttttccttgatgttcaaaccaatttgggatatctaactctaaagagagacacactgtactcatggtagatgacaaggaaaagaacatgaaatgtctcaccttcttcttgatgcttccagagacggtaaagaacaggtccaagaaaagctcaaagaaagcaaataccagcagcagcagtagcaacagcagcaagttgccaccagtttgttatgaaataattaccttgaagactaaaaagaagaagatggctgctgatatattcccccgtaaaaagccagccaactccagcagcaccagcgtccagcagtaccaccagcagaatctcagtaacaacaaccttatcccggccccaaactggcagggtctttatcccaccattagagagagaaatgcgatgatgttcaataatgatttgatggcagatgtacattttgtggttgggccaccaggtgggactcaacggttgccaggacacaaatatgttttagctgttgggagctctgtgttccatgcgatgttttacggagaacttgcagaggacaaagatgaaatccgtataccagatgtcgaacctgctgcttttctcgctatgctgaaatatatctattgtgatgaaattgacttggctgctgacacagtgctggccacactttatgctgccaaaaagtacattgtccctcaccttgccagagcctgtgttaatttcctggagaccagcctgagtgccaagaatgcctgtgtgctcctctcccagagctgcctgttcgaggagccagacctgacccagcgttgctgggaggtgattgatgcccaggctgagttagctctcaagtctgagggattctgcgatattgacttccagacactagaaagtattctccgtagggaaactctgaatgccaaagaaattgtggtttttgaggcagctctcaactgggctgaagtagaatgccaacgacaagatctggcgttgagcattgaaaataaacgcaaggttctaggaaaggcactttacttgatccgcatacccacaatggccctcgatgattttgcaaatggtgctgcacagtccggggtattaactctcaatgagaccaacgacatcttcctctggtatactgcagccaaaaagcctgagcttcagtttgtgagtaaagcccgtaagggccttgtcccccagcgctgtcaccgtttccagtcgtgtgcctatcgaagcaaccaatggcgctatcgtggtcgctgtgacagcatccagtttgcagttgataaaagagtgttcattgctggctttgggctgtatggctccagctgtggttctgcagaatacagtgccaagattgaacttaagcggcagggcgttgtcctggggcagaacttgagcaagtacttctcagatgggtccagcaatacctttcccgtatggtttgaatacccagtgcagatcgagccagacaccttctacacagccagtgtgatactggatggcaatgaactcagctactttggacaagaaggcatgacagaagttcagtgtggcaaagtgactgtccagtttcagtgctcctcagatagcaccaatggcactggggtacagggagggcagatccctgaacttatattctatgcttgaaaactcacttcctgaagcagcttgagctccaaagtgcacatctggttccaacttgcctgatgcttagctcatctgcaaatatgtgatcagtgccggtaatttgtaatgaatgaagcggtaggcaggttctaatttcttttaaccttttaattatgtacaggcaaaaatgcagcattccgcttttaactatctgcttaaaagagctaacgttcttattaaggctttgtggtttttagagttgcatctatgaacctggggagattatgtgctttcccaagcgttccaccaccctctcagttttgtccctctgaagataattttggatcaccttgaatttccttttggacgttatttgatgaacagaaataaagtgataacaagagttatttttaaacagaactcctcttaccccccaaaacagataaacctcagtgtacaattttgaaagaagttttgccttgtaatgagtaataatttagaaagtagacagtggttgtgtttggctctcgttttattccttttacatttgttgcttctgggatttaaaaaattactaaattcataagatagttaggtattaaacacttcagaatatcaatgtaaaattggaaaataaggaactgggggcatttgtttaggccatgacttctacaagcagatttcttttcttttagtttagaagacaaaaaatttcaatacagatacttcttttagaagtaaatttttagattttattgtcagtagaaaaaagttaaactcctactaatttaaactaagacagtttaaaaaggaagcctgaaaaagactcatactacaaataatttaattgatggcatataagaatatgcagtttgaaaaagccaaactcttctctccacttagcttttgatccccactgtttgcttatttgtataagtcatactgtgtagaatttctattttctttttccccattaaaagaggaccaaacaattctttatacaaatggagtagcaactagttttgtagcactacatttaatgtaatgagatacctttgttcatttttttaaatttgaaatatactttacctgatccactttgattgtatactatattctttgttaattttaattttgtcctgttcctagactgctagaatctggcccctggccatcttaaagtgccaacatatgcctgcagggtttataaaaaatggcctggagtgacacattttattatacctaatattcactgcatcagtatcacatctagctcccttacttgtccacagataatgtaaacaaaggagggaaaaacttattaaattctccttcgctgctggcttgtgctggtttagtgcctgtgtccctggcagtgtccagtgtgttcacttccagttgaagtatccatgtgtttctgggcagcttttctgctcagtgtgatcctgagatggcttccccgccgccacccagagtgtggtccttggccgcctcctgctcctgctctgcaagcctgaaactggcttgtctggagccaggagttagtcctggggtgtgtgtgtgcctgcgcacccatgcgcatgcaagtgtgtttgccagctcaggagctgtctcctctctacctggctagtaagaggtgggacagtaatggtcctcctgctggccccagcaaggcccatgagtgactgccctgacgtattcactgtgcctctgggccacttcttcccctgtagatgtgggcttgttgccttcagccggcttccctgagggaggagaacactggattattggaaatgttttaatcactcttgccattacctacatctattagcatagatgatgaaaagctgttactggtgattatagatgagtatttccaggacaacgttctaaaagtacaattatttcttattggggagattacaggtagtttggcaaagcattgaagtacaaaggtacattttcaattaaaaagcacacttctacaaaagatttggtttttaaattatggttacacatttcagtaactcatagctgctgtgcaaattggtagaccttataagaaggcacttgtttgtaagccagagaagaaactttaattgcatcctatcagattgttgaggtgggtgtgatagtcttcaggtgcagtgcgttcattcactaacgctcactgtcagtgcccatgtttgctagctgcctccatgtgactagtgagctgctggtgaaagtcgtgtgaaatcctgtacactgtgtatagaataatgtaattttatgttaattgttattactttaaaacatatctaccatctgattggctggtaccgagagctgtgggtaaaatttgaaaattgtatttagaataagaaattttacattttaaaccctattgtcctttatgcattttcaatgaaatggaatgaaggctaatatgcttgctttatttacttttgtaatcttggattttgtagcttttaaaactagaaaccattgttctaacaaagcaggcaactttattctataaacacaactttattaagcagaatacactgtagatgcttttccccaacgtatctggctggcagtctttgtcgttgttcattctggggataaaggggaactaggctagcagttctaatgtgacattctttaagcatatcttaaaatagtatttaagtaaatggtctaatttctacataattattgcactgaacttttttgtttattaaggtgtttaaataagctcagctaattcaagacactgtagccacttgtgcatcagtgtgcttgaatttagtagcttacagcattatttatgaaggaaaaaatacataaatatgaagtacctcatgttgaatgttattgtactgtatttttaatgtaacagtgcagatcttgttagacacatgaatgtgtataatcatgttaaatgcaaataaaactagttcatagatttgttttccttta

SEQ ID NO: 183454 - DNA, 583 bp, Artificial Sequence
  derived and/or modified sequence
cttttcggaagaatttttgaatcaccctttttcatttcttggcctcagcagagacggtaaagaacaggtccaagaaaagctcaaagaaagcaaataccagcagcagcagtagcaacagcagcaagttgccaccagtttgttatgaaataattaccttgaagactaaaaagaagaagatggctgctgatatattcccccgtaaaaagccagccaactccagcagcaccagcgtccagcagtaccaccagcagaatctcagtaacaacaaccttatcccggccccaaactggcagggtctttatcccaccattagagagagaaatgcgatgatgttcaataatgatttgatggcagatgtacattttgtggttgggccaccaggtgggactcaacggttgccaggacacaaatatgttttagctgttgggagctctgtgttccatgcgatgttttacggagaacttgcagaggacaaagatgaaatccgtataccagatgtcgaacctgctgcttttctcgctatgctgaaatatatctattgtgatgaaattgacttggctgctgacacagtgctggccacact

SEQ ID NO: 183455 - DNA, 485 bp, Artificial Sequence
  derived and/or modified sequence
ggaggtggcggaggtccaggcagggggcgcggtcgggaagcctcggcgcctagcaggtggcgggggccgcgcccctctcccggggaggcgcgcggtgggaagcggagcaaacttcccctaagtgtcactgttttgcttggtccaatcatgattggtgacttcagctattggctcggagcactggctgtctgactccatctgcagggctgtaatacctactctcctccgatccattcaccacacaacttcagccggctgaacagactcacgcagctccagcccatcttgctgacctaattcagaaaagaagtgctacagctctgtgcctgtcatctttgcagtgtagcattttcagagacggtaaagaacaggtccaagaaaagctcaaagaaagcaaataccagcagcagcagtagcaacagcagcaagttgccaccagtttgttatgaaataattaccttgaagactaaaaagaagaagatggc

SEQ ID NO: 183456 - protein, 1366 aa, Artificial Sequence
  derived and/or modified sequence
MLAVGPAMDRDYPQHEPPPAGSLLYSPPPLQSAMLHCPYWNTFSLPPYPAFSSDSRPFMSSASFLGSQPCPDTSYAPVATASSLPPKTCDFAQDSSYFEDFSNISIFSSSVDSLSDIVDTPDFLPADSLNQVSTIWDDNPAPSTHDKLFQLSRPFAGFEDFLPSHSTPLLVSYQEQSVQSQPEEEDEAEEEEAEELGHTETYADYVPSKSKIGKQHPDRVVETSTLSSVPPPDITYTLALPSDSGALSALQLEAITYACQQHEVLLPSGQRAGFLIGDGAGVGKGRTVAGVILENHLRGRKKALWFSVSNDLKYDAERDLRDIEATGIAVHALSKIKYGDTTTSEGVLFATYSALIGESQAGGQHRTRLRQILDWCGEAFEGVIVFDECHKAKNAGSTKMGKAVLDLQNKLPLARVVYASATGASEPRNMIYMSRLGIWGEGTPFRNFEEFLHAIEKRGVGAMEIVAMDMKVSGMYIARQLSFSGVTFRIEEIPLAPAFECVYNRAALLWAEALNVFQQAADWIGLESRKSLWGQFWSAHQRFFKYLCIAAKVRRLVELAREELARDKCVVIGLQSTGEARTREVLGENDGHLNCFVSAAEGVFLSLIQKHFPSTKRKRDRGAGSKRKRRPRGRGAKAPRLACETAGVIRISDDSSTESDPGLDSDFNSSPESLVDDDVVIVDAVGLPSDDRGPLCLLQRDPHGPGVLERVERLKQDLLDKVRRLGRELPVNTLDELIDQLGGPQRVAEMTGRKGRVVSRPDGTVAFESRAEQGLSIDHVNLREKQRFMSGEKLVAIISEASSSGVSLQADRRVQNQRRRVHMTLELPWSADRAIQQFGRTHRSNQVSAPEYVFLISELAGERRFASIVAKRLESLGALTHGDRRATESRDLSKYNFENKYGTRALHCVLTTILSQTENKVPVPQGYPGGVPTFFRDMKQGLLSVGIGGRESRNGCLDVEKDCSITKFLNRILGLEVHKQNALFQYFSDTFDHLIEMDKREGKYDMGILDLAPGIEEIYEESQQVFLAPGHPQDGQVVFYKISVDRGLKWEDAFAKSLALTGPYDGFYLSYKVRGNKPSCLLAEQNRGQFFTVYKPNIGRQSQLEALDSLRRKFHRVTAEEAKEPWESGYALSLTHCSHSAWNRHCRLAQEGKDCLQGLRLRHHYMLCGALLRVWGRIAAVMADVSSSSYLQIVRLKTKDRKKQVGIKIPEGCVRRVLQELRLMDADVKRRQAPALGCPAPPAPRPLALPCGPGEVLDLTYSPPAEAFPPPPHFSFPAPLSLDAGPGVVPLGTPDAQADPAALAHQGCDINFKEVLEDMLRSLHAGPPSEGALGEGAGAGGAAGGGPERQSVIQFSPPFPGAQAPL

SEQ ID NO: 183457 - DNA, 4101 bp, Artificial Sequence
  derived and/or modified sequence
atgctggccgtgggccccgccatggacagagactacccccagcacgagcccccccccgccggcagcctgctgtacagccccccccccctgcagagcgccatgctgcactgcccctactggaacaccttcagcctgcccccctaccccgccttcagcagcgacagcagacccttcatgagcagcgccagcttcctgggcagccagccctgccccgacaccagctacgcccccgtggccaccgccagcagcctgccccccaagacctgcgacttcgcccaggacagcagctacttcgaggacttcagcaacatcagcatcttcagcagcagcgtggacagcctgagcgacatcgtggacacccccgacttcctgcccgccgacagcctgaaccaggtgagcaccatctgggacgacaaccccgcccccagcacccacgacaagctgttccagctgagcagacccttcgccggcttcgaggacttcctgcccagccacagcacccccctgctggtgagctaccaggagcagagcgtgcagagccagcccgaggaggaggacgaggccgaggaggaggaggccgaggagctgggccacaccgagacctacgccgactacgtgcccagcaagagcaagatcggcaagcagcaccccgacagagtggtggagaccagcaccctgagcagcgtgcccccccccgacatcacctacaccctggccctgcccagcgacagcggcgccctgagcgccctgcagctggaggccatcacctacgcctgccagcagcacgaggtgctgctgcccagcggccagagagccggcttcctgatcggcgacggcgccggcgtgggcaagggcagaaccgtggccggcgtgatcctggagaaccacctgagaggcagaaagaaggccctgtggttcagcgtgagcaacgacctgaagtacgacgccgagagagacctgagagacatcgaggccaccggcatcgccgtgcacgccctgagcaagatcaagtacggcgacaccaccaccagcgagggcgtgctgttcgccacctacagcgccctgatcggcgagagccaggccggcggccagcacagaaccagactgagacagatcctggactggtgcggcgaggccttcgagggcgtgatcgtgttcgacgagtgccacaaggccaagaacgccggcagcaccaagatgggcaaggccgtgctggacctgcagaacaagctgcccctggccagagtggtgtacgccagcgccaccggcgccagcgagcccagaaacatgatctacatgagcagactgggcatctggggcgagggcacccccttcagaaacttcgaggagttcctgcacgccatcgagaagagaggcgtgggcgccatggagatcgtggccatggacatgaaggtgagcggcatgtacatcgccagacagctgagcttcagcggcgtgaccttcagaatcgaggagatccccctggcccccgccttcgagtgcgtgtacaacagagccgccctgctgtgggccgaggccctgaacgtgttccagcaggccgccgactggatcggcctggagagcagaaagagcctgtggggccagttctggagcgcccaccagagattcttcaagtacctgtgcatcgccgccaaggtgagaagactggtggagctggccagagaggagctggccagagacaagtgcgtggtgatcggcctgcagagcaccggcgaggccagaaccagagaggtgctgggcgagaacgacggccacctgaactgcttcgtgagcgccgccgagggcgtgttcctgagcctgatccagaagcacttccccagcaccaagagaaagagagacagaggcgccggcagcaagagaaagagaagacccagaggcagaggcgccaaggcccccagactggcctgcgagaccgccggcgtgatcagaatcagcgacgacagcagcaccgagagcgaccccggcctggacagcgacttcaacagcagccccgagagcctggtggacgacgacgtggtgatcgtggacgccgtgggcctgcccagcgacgacagaggccccctgtgcctgctgcagagagacccccacggccccggcgtgctggagagagtggagagactgaagcaggacctgctggacaaggtgagaagactgggcagagagctgcccgtgaacaccctggacgagctgatcgaccagctgggcggcccccagagagtggccgagatgaccggcagaaagggcagagtggtgagcagacccgacggcaccgtggccttcgagagcagagccgagcagggcctgagcatcgaccacgtgaacctgagagagaagcagagattcatgagcggcgagaagctggtggccatcatcagcgaggccagcagcagcggcgtgagcctgcaggccgacagaagagtgcagaaccagagaagaagagtgcacatgaccctggagctgccctggagcgccgacagagccatccagcagttcggcagaacccacagaagcaaccaggtgagcgcccccgagtacgtgttcctgatcagcgagctggccggcgagagaagattcgccagcatcgtggccaagagactggagagcctgggcgccctgacccacggcgacagaagagccaccgagagcagagacctgagcaagtacaacttcgagaacaagtacggcaccagagccctgcactgcgtgctgaccaccatcctgagccagaccgagaacaaggtgcccgtgccccagggctaccccggcggcgtgcccaccttcttcagagacatgaagcagggcctgctgagcgtgggcatcggcggcagagagagcagaaacggctgcctggacgtggagaaggactgcagcatcaccaagttcctgaacagaatcctgggcctggaggtgcacaagcagaacgccctgttccagtacttcagcgacaccttcgaccacctgatcgagatggacaagagagagggcaagtacgacatgggcatcctggacctggcccccggcatcgaggagatctacgaggagagccagcaggtgttcctggcccccggccacccccaggacggccaggtggtgttctacaagatcagcgtggacagaggcctgaagtgggaggacgccttcgccaagagcctggccctgaccggcccctacgacggcttctacctgagctacaaggtgagaggcaacaagcccagctgcctgctggccgagcagaacagaggccagttcttcaccgtgtacaagcccaacatcggcagacagagccagctggaggccctggacagcctgagaagaaagttccacagagtgaccgccgaggaggccaaggagccctgggagagcggctacgccctgagcctgacccactgcagccacagcgcctggaacagacactgcagactggcccaggagggcaaggactgcctgcagggcctgagactgagacaccactacatgctgtgcggcgccctgctgagagtgtggggcagaatcgccgccgtgatggccgacgtgagcagcagcagctacctgcagatcgtgagactgaagaccaaggacagaaagaagcaggtgggcatcaagatccccgagggctgcgtgagaagagtgctgcaggagctgagactgatggacgccgacgtgaagagaagacaggcccccgccctgggctgccccgccccccccgcccccagacccctggccctgccctgcggccccggcgaggtgctggacctgacctacagcccccccgccgaggccttccccccccccccccacttcagcttccccgcccccctgagcctggacgccggccccggcgtggtgcccctgggcacccccgacgcccaggccgaccccgccgccctggcccaccagggctgcgacatcaacttcaaggaggtgctggaggacatgctgagaagcctgcacgccggcccccccagcgagggcgccctgggcgagggcgccggcgccggcggcgccgccggcggcggccccgagagacagagcgtgatccagttcagcccccccttccccggcgcccaggcccccctgtag

SEQ ID NO: 183458 - DNA, 4101 bp, Artificial Sequence
  derived and/or modified sequence
atgctggctgttgggccggccatggaccgggactacccacagcatgagcccccacctgccggatcactgttgtactccccaccacctctgcagtccgcaatgttgcactgtccctactggaacacgttcagcctacctccttatccagctttttcctcggattccaggccctttatgagctcagcatccttcttgggcagccagccttgcccagatacctcctacgcccctgtggcaactgcatcaagtctcccccccaagacatgcgatttcgcccaggattcttcctactttgaggacttcagtaacattagcatctttagctcttccgtggactcactttcggatattgtcgacacacctgatttcttgccagctgattcccttaatcaggtttctacaatttgggacgataaccctgctccatctacgcacgacaagctgttccagctgtccaggccctttgccggcttcgaggacttcttgccatctcactcaacaccactcttagtgagttatcaggaacagtcggtgcaatcccagcccgaggaagaggacgaagcggaagaggaagaagctgaggaattgggccataccgagacctatgcagactatgttccaagcaaatccaagatcggcaaacagcaccccgatcgagtggtagaaacatctaccttgtcttcagtcccgccacccgacatcacttatacactggcgctgccttccgacagtggtgcgctaagtgcactccagctcgaggccataacctacgcctgtcagcagcatgaggtactcctgccatcaggccaacgcgctggatttctcattggcgatggcgctggtgtgggtaaaggaagaactgtggcaggggtcattttggaaaaccacctccgcggcaggaaaaaagctctgtggtttagcgtgtcaaacgatctgaagtacgacgccgagagggacctgcgagatatcgaggccactgggattgcagttcatgcattatctaaaatcaagtacggggacaccacaacttctgaaggggtcctattcgctacatatagtgcactaataggcgaatcccaggctgggggccaacatcgcactagactgaggcaaatcctcgactggtgcggcgaagcttttgaaggtgtcatcgtttttgacgaatgtcacaaggcaaagaacgctggatccaccaagatgggcaaagcggttctggacctacagaacaagcttcctctggcgcgggtcgtctatgcatctgcgacgggagccagcgaaccgaggaatatgatctatatgagccggctcggcatttggggggaaggaacaccatttcgtaatttcgaggaatttctccacgccatagagaagcgcggcgtcggcgccatggagatcgtggccatggacatgaaagtgtcaggcatgtatatcgccagacaactcagcttttcgggcgtaaccttccggatagaggaaatcccactggccccagcattcgagtgcgtgtacaaccgggcagccctcttgtgggcggaggccttgaatgtgtttcagcaagccgcagactggatcggcctggagtcccgaaaaagtctgtggggccagttctggagcgctcaccagaggttctttaagtatctgtgtatagctgccaaggtgcgcagactcgtggagcttgcccgagaggagttggccagagacaaatgcgtggttatcggactgcaatctacaggggaggcccgcactagggaagtccttggagaaaatgatggtcacctaaattgttttgtgtccgctgctgaaggagtcttccttagtctcatccagaagcatttcccatctactaagcgcaagagggatcggggcgccggtagtaagaggaagcggagacctcgggggcgaggggccaaggccccccgactggcatgcgaaaccgccggtgtaatccggatcagtgatgacagcagcacagagagtgatcccgggcttgactcagactttaactccagcccagagtcactggtggacgacgatgtcgtgattgtcgatgcagtcgggctccccagtgatgacagaggtcctctttgcttgttgcagagggatccccacggcccaggcgtccttgaaagagtggaacggctgaagcaggacctgctcgataaggtcagacggctggggcgcgagctgcccgtaaatacactagacgaactgatcgatcaactggggggccctcagcgggtcgccgaaatgacaggacggaaaggaagagtcgtttcccgccctgatgggactgtggctttcgaatccagggcggaacagggactgtccatagatcatgtgaacctgcgcgaaaagcagcgttttatgtctggggagaagctcgtggccattatcagcgaggcatccagctccggcgtgagcctccaggctgatcgccgagtgcagaaccagaggcgtagggtacacatgacactggagctcccctggagtgcggaccgtgcgattcaacagtttggtcgaacccacaggtctaaccaggtctctgccccagagtacgtcttccttattagcgagttggctggcgaaagaagattcgcttctatagtagcaaaaaggttggaaagcttaggagcccttacccatggtgatcgcagggcaactgaatctagggacctgtctaagtataattttgagaataaatatggcactcgcgcactccattgcgttttgacaactatcttgtcacagaccgagaacaaagtgcctgtgccacaaggttaccccggcggtgtgcctacgttctttagggatatgaagcagggtctgcttagcgttggtatcgggggtagggagagcaggaacggatgcttggacgtggagaaggattgtagtatcacaaaatttctgaatcgaattctggggcttgaggtgcacaagcagaacgcactgttccagtacttctcagatactttcgaccatctgatcgagatggacaagcgggaaggaaagtacgacatgggtatcctcgacctcgcccccggcatcgaggaaatttacgaagagtcacagcaggtttttctcgcccctggccatccacaggacggccaagtggtgttctataaaataagcgttgatcggggactcaaatgggaagacgcttttgctaaatcactagcattaaccggtccatacgatggattttacctgagctataaagtgagggggaacaagccttcttgtttactcgccgagcaaaacagaggacagttctttactgtgtacaagcccaacattggtcggcaatcacagctggaagctctggattccttgaggcgtaagtttcatcgcgtgacggccgaagaggcgaaggaaccctgggagtccgggtacgcactgtccctgacacactgtagtcattctgcctggaatagacactgcagactggcccaggagggcaaggattgcctgcagggtctaaggttgcgccatcactatatgctgtgtggggccttgctgcgcgtctggggaagaatcgccgccgttatggccgatgtctcttcgtctagctatctgcagatcgtgaggctgaaaaccaaggatcgcaagaagcaggtcggcatcaagatccccgagggctgcgtgagaagggtgctgcaggagttaaggcttatggacgccgatgttaagcggcgccaagcccctgccctgggctgccccgcacctccagcgcctcgacccttggccctcccctgcggacccggggaggtcctcgacctgacttactcgccacctgcagaggcttttcctcctcctccccacttttcgttccccgcgccactgtcacttgacgctggtccaggcgtcgtgcccctcgggacaccagacgcccaggctgatcctgcagcactggcccaccaaggctgtgatatcaattttaaggaggtgcttgaggacatgctccgttccctacatgctggccctccatctgagggggcgcttggagagggcgctggggctggcggcgccgcagggggcgggcccgagcggcagagcgtcatccagttcagtccccctttccccggtgctcaagctccgctgtag

SEQ ID NO: 183459 - DNA, 4101 bp, Artificial Sequence
  derived and/or modified sequence
atgctggccgtgggccctgccatggaccgggactacccccagcacgagcccccacctgctggcagcctgctgtacagccccccacccctgcagagcgccatgctgcactgcccctactggaacaccttcagcctgcccccctacccagccttcagcagtgacagccggcccttcatgagcagcgccagcttcctgggcagccagccctgcccagacaccagctatgcccctgtggccacagccagcagcctgccccccaagacctgtgactttgcccaggacagcagctactttgaggacttcagcaacatcagcatcttcagcagctctgtggacagcctgagtgacatcgtggacaccccagacttcctgcctgctgacagcctgaaccaggtgtccaccatctgggatgacaacccagcccccagcacccatgacaagctgttccagctgagccggccctttgctggctttgaggacttcctgcccagccacagcacccccctgctggtgtcctaccaggagcagagcgtgcagagccagcctgaggaggaggatgaggccgaggaggaggaggccgaggagctgggccacacagagacctatgctgactatgtgcccagcaagagcaagattggcaagcagcacccagacagagtggtggagaccagcaccctgagctctgtgcccccaccagacatcacctacaccctggccctgcccagcgacagcggggccctgagcgccctgcagctggaggccatcacctacgcctgccagcagcacgaggtgctgctgcccagcggccagagagctggcttcctgattggagatggagctggggtgggcaagggccgcacagtggccggggtcatcctggagaaccacctgcggggcaggaagaaggccctgtggttctctgtgtccaatgacctgaagtatgatgctgagcgggacctgcgggacatcgaggccaccggcattgctgtgcacgccctgagcaagatcaagtacggggacaccaccaccagcgagggcgtgctgtttgccacctacagcgccctgattggagagagccaggccggcggccagcacaggacccggctgcggcagatcctggactggtgtggggaggcctttgagggcgtcatcgtgtttgatgagtgccacaaggccaagaatgccggcagcaccaagatgggcaaggctgtgctggacctgcagaacaagctgcccctggcccgggtggtgtatgccagcgccaccggggccagcgagcccaggaacatgatctacatgagccggctgggcatctggggcgagggcacccccttcaggaactttgaggagttcctgcacgccatcgagaagaggggcgtgggcgccatggagatcgtggccatggacatgaaggtgtctggcatgtacatcgcccggcagctgtccttcagcggcgtgaccttccgcatcgaggagatccccctggccccagcctttgaatgtgtgtacaacagagctgccctgctgtgggccgaggccctgaatgtgttccagcaggccgctgactggattggcctggagagcaggaagagcctgtggggccagttctggagcgcccaccagcgcttcttcaagtacctgtgcatcgccgccaaggtgcggcggctggtggagctggcccgggaggagctggcccgggacaagtgtgtggtgattggcctgcagagcactggagaggcccggacccgggaggtgctgggggagaatgatggccacctgaactgctttgtgtctgctgctgagggcgtcttcctgagcctcatccagaagcacttccccagcaccaagaggaagagggacagaggagctggcagcaagaggaagagaagaccccggggccgcggggccaaggccccccggctggcctgtgaaacagctggggtcatccgcatcagtgatgacagcagcacagaaagtgaccccggcctggacagcgacttcaacagcagccctgagagcctggtggatgatgatgtggtgattgtggatgctgtgggcctgcccagtgatgaccggggccccctgtgcctgctgcagagggacccccacggccctggggtgctggagcgggtggagcggctgaagcaggacctgctggacaaggtgcggcggctgggccgggagctgcctgtgaacaccctggatgagctgattgaccagctgggcggcccccagagggtggccgagatgactggaaggaagggccgggtggtgtccaggccagatggcaccgtggcctttgagagcagagctgagcagggcctgagcattgaccacgtgaacctgcgggagaagcagcgcttcatgtctggagagaagctggtggccatcatcagcgaggccagcagcagcggcgtgtccctgcaggccgaccggcgggtgcagaaccagaggagaagagtgcacatgaccctggagctgccctggagcgctgaccgggccatccagcagtttggccgcacccacaggagcaaccaggtgtctgccccagaatatgtgttcctgatcagcgagctggccggggagaggagatttgccagcatcgtggccaagaggctggagagcctgggcgccctgacccatggagaccggcgggccacagagagccgggacctgagcaagtacaactttgagaacaagtatggcacccgggccctgcactgtgtgctgaccaccatcctgagccagacagagaacaaggtgcctgtgccccagggctacccaggcggcgtgcccaccttcttccgggacatgaagcagggcctgctgtctgtgggcattggaggccgggagagcagaaatggctgcctggatgtggagaaggactgcagcatcaccaagttcctgaaccgcatcctgggcctggaggtgcacaagcagaatgccctcttccagtacttcagtgacacctttgaccacctgattgagatggacaagcgggagggcaagtatgacatgggcatcctggacctggcccctggcatcgaggagatctatgaggagagccagcaggtgttcctggcccctggccacccccaggacggccaggtggtgttctacaagatctctgtggaccggggcctgaagtgggaggatgcctttgccaagagcctggccctgaccggcccctatgatggcttctacctgagctacaaggtgcggggcaacaagcccagctgcctgctggccgagcagaacagaggccagttcttcaccgtgtacaagcccaacatcggccggcagagccagctggaggccctggacagcctgcggaggaagttccaccgggtgacagctgaggaggccaaggagccctgggagagcggctacgccctgagcctgacccactgcagccacagcgcctggaacagacactgccgcctggcccaggagggcaaggactgcctgcagggcctgcggctgcggcaccactacatgctgtgtggggccctgctgcgggtgtggggcagaattgctgctgtgatggctgatgtgagcagcagcagctacctgcagatcgtgcggctgaagaccaaggacaggaagaagcaggtgggcatcaagatccctgagggctgtgtgagaagagtgctgcaggagctgcggctgatggatgctgatgtgaagaggcggcaggccccagccctgggctgcccagcccccccagccccccggcccctggccctgccctgtggccctggagaggtgctggacctgacctacagccccccagctgaggccttccccccaccaccccacttctccttccctgcccccctgagcctggatgctggccctggggtggtgcccctgggcaccccagatgcccaggccgaccctgctgccctggcccaccagggctgtgacatcaacttcaaggaggtgctggaggacatgctgcggagcctgcatgctggccccccatctgagggcgccctgggggagggcgctggggccggcggcgctgctgggggcggccctgagcggcagagcgtcatccagttcagcccccccttccctggggcccaggcccccctgtag

SEQ ID NO: 183460 - DNA, 4101 bp, Artificial Sequence
  derived and/or modified sequence
atgctggccgtgggccccgccatggaccgggactacccccagcacgagcctccaccagcaggaagtctcttgtactctccacctcccctgcaatcggcaatgctgcactgtccttactggaataccttctccctgcccccatatcccgctttttcttccgatagcaggccctttatgtcttccgcgagtttccttggctcccagccctgtccagatacgagctatgcccccgttgctaccgcatctagcctgcctccgaagacctgtgatttcgcacaggactcatcttactttgaagacttctctaacatatcgatattctcaagttctgtggactccctatctgatatagttgacacgcctgactttttacccgccgacagcctgaatcaggtgtcgaccatctgggatgataatcctgcaccatccactcacgataagttatttcagttgtcacggcctttcgctggctttgaagacttcttgccaagccatagcacgccgttgctcgtctcatatcaggagcagtctgttcagtcacagcccgaagaagaagacgaggccgaagaggaggaagccgaggaactcgggcacaccgagacttatgcagactatgtgccttctaaaagtaaaatcggcaagcagcaccctgatcgcgtggtggaaaccagcacactctctagcgtccctccacccgacatcacttatactctcgcattgccatctgactcaggggcactttccgcactgcagctcgaggctatcacatatgcttgccaacagcatgaggtgttactaccaagcgggcagagggccggctttctgattggtgacggggctggcgtgggtaaaggcaggacggtcgccggcgtgattctcgaaaatcatttacgtggtaggaaaaaggccctgtggttttctgtctctaacgacttaaaatatgatgccgaacgtgacttgagagatattgaagccacaggcatcgcagtgcacgcgctctctaagattaaatacggagacactaccacctcagagggtgttctcttcgccacttactccgctctgatcggcgagagtcaagctgggggtcagcaccgcaccagactgaggcagatcttagactggtgcggagaagctttcgaaggggtgatagtgtttgatgaatgtcataaagcaaagaatgcgggctccacgaaaatggggaaagccgtactagatcttcagaacaagctgcccctggctagggtggtttatgcaagcgctacaggcgccagtgagcctcggaatatgatctacatgtccaggcttgggatttggggagaggggacacctttccgcaattttgaggaatttttgcatgctatagaaaaacgtggggtcggcgctatggagatcgtagccatggacatgaaagtctcaggaatgtacattgcaagacagttgtccttcagcggagtgacctttcgcattgaagagatccccttggcccccgccttcgagtgtgtgtacaaccgggccgccctgctttgggcagaggcacttaacgtttttcagcaggctgccgactggatagggctggaatcaaggaagtctttgtggggtcagttttggtccgcccatcagcggttcttcaaatacctatgtattgctgctaaagttcggaggctggtagagctggctcgtgaagagctcgcccgggataaatgcgtcgtgatcgggttgcagtccactggagaggcccgcactagggaagtgttgggtgagaatgatggccaccttaactgtttcgtgtcagccgctgagggggtctttctgagcctaatccaaaagcatttcccctccacaaagagaaagcgggaccggggcgccggttccaaacggaaaagacgtccaaggggaaggggcgccaaggctccaagattagcttgtgagaccgccggtgtgatcagaatttccgacgactcgagtacggagtccgacccaggcctggatagcgactttaactccagccccgagagtctggtggacgatgacgtggttatcgtcgacgcggtagggctgccatccgatgatagaggtccactttgtcttctacaaagagacccccacggtcccggcgtccttgagagagtggaaaggctgaaacaagatcttctggacaaagtgcggaggctcggcagagaactgcctgttaatacactcgatgagctaatcgaccaattgggaggccctcagcgcgtcgctgagatgacaggcaggaagggccgtgtggtatctcggccagatggaactgtagcctttgaatcccgtgctgagcagggattatcaattgatcatgttaacctacgggaaaagcaacgattcatgtccggcgagaaactggttgcgattatttctgaagccagttcatctggcgttagtctacaggccgataggcgagtgcagaaccagcgtcgccgcgtgcacatgaccctggagctgccatggtccgctgacagggcgattcaacagttcggtagaactcatcgatctaaccaggtgagcgcgccagagtacgtgtttttgataagtgagcttgctggcgagcgccggttcgcatcgatcgtagctaaacgcctagaatctctaggcgcattgacgcacggagatcgtcgcgcaacggaatccagagacttgagtaagtataacttcgaaaacaagtacgggacacgcgcccttcattgcgtgttgacaacaattctgagccagaccgagaacaaagtcccagtgccgcagggctacccaggcggtgttccaaccttttttcgagacatgaagcagggtttgctgtccgtgggcataggcggtcgcgaaagcagaaacggatgcttggacgtggagaaggattgcagcatcacgaagtttttgaaccgcatcctcgggctagaagttcataagcagaacgccctatttcagtacttctctgataccttcgaccacctgatcgaaatggacaagagagaaggcaagtacgatatgggaattctggacctggcacctggtatcgaagaaatatacgaggaatcccagcaggtgtttctggcaccaggacatccccaggacgggcaagttgtgttttataaaataagcgtggatcggggactgaaatgggaagacgcctttgctaaatctttggcacttacgggtccatacgacggcttttacctgagttacaaagtgcgtggaaataagcctagttgcctgttagcggaacagaacagagggcagttcttcactgtgtacaagccaaatatcggccgccaatctcagctcgaggctctggacagcctcagaagaaaattccacagagtgaccgcagaggaggcaaaagaaccctgggaatccgggtacgccctgtcgcttactcattgctcacatagcgcttggaatcggcactgccggctggcacaggaagggaaggactgcctgcaggggcttcgcctacgtcaccattatatgctgtgcggcgccctcctcagggtgtggggcaggattgctgccgtgatggccgatgtgagttccagctcttacctgcagattgtgcggctgaagacaaaagataggaagaagcaggtgggcatcaagattccagaggggtgtgtaagaagggttctccaggagctgagactcatggatgcagacgtgaaacggaggcaagccccagctctcggatgtcccgctccccctgcaccccgccctttggccctgccttgcggcccaggggaggtgttggacttaacgtactcccccccagctgaggcctttcctccaccgccccacttcagcttcccagccccattgtccctggatgccgggccaggggtagtgccactgggaactcccgacgctcaggccgaccccgcagccctggcgcaccagggctgcgacatcaactttaaggaagtgctggaagacatgcttcgttcattacatgccggaccccccagtgagggtgcacttggtgaaggtgccggggccggaggcgctgccggcggtggcccagagcgccagagcgtcatccagtttagccctccttttcctggcgcccaagcgccactatag

SEQ ID NO: 183461 - DNA, 4101 bp, Artificial Sequence
  derived and/or modified sequence
atgctagccgtgggtccagccatggatcgcgattacccacagcatgagccaccacccgcaggaagcctactgtattcccctccaccgctccaaagtgcgatgctgcactgtccttattggaatacattttccctcccaccctacccagcctttagcagcgattccaggccttttatgtcaagtgctagtttcctagggtcccaaccttgcccagatactagctacgctcctgtagccacagcttcctccctgcccccaaagacatgcgactttgcccaagattctagttacttcgaggacttcagcaatatttctatcttctcttctagcgtggatagcctgagtgatatcgtagatacacctgattttctgccagcggactctctcaaccaggtgagtacaatttgggatgacaatccagctccctcaacacacgataaactctttcagttatccaggccattcgcagggtttgaggatttccttcccagccactctacaccccttctcgtctcctaccaagaacaaagtgtacagtcccaacctgaagaggaggacgaggcagaagaagaagaggccgaagaactgggccatacagagacatacgctgattatgttccaagcaagtcaaaaattgggaaacaacaccctgaccgggtggtcgagacttccactctgagtagtgtcccaccacctgacattacatatactctcgctctgccttctgacagtggtgccctgtccgcgctgcagctggaagccattacctacgcatgccagcagcacgaagtgctcctcccctcaggacagcgagccggatttttgattggagacggcgcaggggtcggtaaaggcaggactgtggccggagtgattctggagaatcatcttagagggaggaaaaaagctctgtggttcagtgtttccaatgacctgaaatacgacgccgagagagacttgagagatattgaagcaaccgggatcgcagtgcacgctctaagtaagataaagtacggggacaccactactagcgagggagtcctctttgctacctatagcgccctgattggtgagagtcaggcaggagggcagcacaggactaggcttagacagatccttgactggtgtggcgaggcctttgaaggggtcattgtgttcgacgaatgtcataaggccaaaaacgccggatcgacaaagatgggtaaggcagtgttagacctacagaacaagttgcctcttgcccgtgtagtctacgcctccgctacaggagcctcagaacctagaaacatgatctacatgtcacgcctcggcatctggggagaggggaccccatttcggaacttcgaggagtttttgcacgctattgagaaaagaggcgtcggcgcaatggagattgtggctatggacatgaaggtgtctggaatgtatatcgctcggcagctatctttctccggtgtgactttccgaattgaggagatcccacttgcacccgcattcgaatgcgtatataaccgcgcagcgctattgtgggcagaagctctgaatgttttccaacaagccgcagactggattggcctggagtccagaaaaagcctctggggccaattctggtctgctcaccagcgtttctttaagtatctttgcattgccgctaaggtcagaagactggtcgagctggccagggaggaactggccagggataagtgcgtcgtgatcggcttacagtcgactggggaggcacgcacccgcgaggtgctcggtgaaaacgatggtcaccttaattgctttgtcagcgcagctgagggcgtgttcctctcgctcatccaaaagcactttccgagcactaagaggaagcgtgaccgcggagcaggctctaagcggaagcgcagaccgagagggaggggagcaaaggcaccacggctggcctgtgaaacggctggggtcatacgcatctcagatgattcatctactgagtctgatcccggtctcgattcggattttaatagctctcctgagtcactcgttgacgatgatgtcgtcattgtggacgccgtagggctgcccagtgacgatcgaggacccctgtgtcttctgcaaagagatccacacggcccaggtgtgttagaaagggttgagcggctcaagcaagacctattggataaggtgcgccgtctgggacgcgagctacccgtcaataccttggatgagctaatcgatcagctgggcggaccacagcgtgtcgcggaaatgaccgggagaaaaggtcgtgtggtgtccagaccggatgggactgtggcttttgaaagccgcgctgagcagggcctgagtattgatcacgttaatttgagagagaagcaaaggtttatgtcaggagaaaagctggtggcgataatcagtgaggcctccagttcaggagtctcactacaggctgacaggcgtgtgcagaatcagaggcgtagggttcacatgacactcgaactcccctggagcgccgaccgagccatccaacagtttggtagaactcatcggagcaaccaggtgtcggcccctgagtatgtttttcttatctccgagctggccggtgagcggcgattcgccagtatcgtggcaaagaggttagagtctctcggtgcactgacccatggcgatcgccgagcaaccgaatcgcgcgacctaagtaaatataactttgagaacaaatacgggacacgcgcactccattgcgtcctgacaacgattctgagtcagaccgagaataaggtgccagtgccccagggctacccaggtggcgtccccacattcttccgtgatatgaagcagggtctgcttagcgtcggaattgggggtagggagagtcgcaatggttgtctcgacgtggaaaaggattgtagcattaccaaattcctgaaccgcattcttggcctggaagttcacaagcagaatgctctgttccagtacttctccgacacttttgaccaccttatcgagatggacaaaagggaggggaagtatgatatgggcattctggatctggctcctggtattgaagagatctacgaggaaagccagcaagtcttcctcgcccctgggcaccctcaggatggacaagttgtgttctacaagatttccgtcgataggggcctcaagtgggaggacgcctttgccaagtctctggctctgaccggcccatacgacggcttctatttgagctacaaggtccgcggaaataaaccaagttgtttacttgcggaacagaatagagggcagttctttacagtgtacaaacctaacattggacggcagtctcaattggaggctctggactctttgcgtcggaaatttcatcgcgtgaccgccgaagaggctaaggagccatgggaaagtggttacgccctctcactgacgcattgctcccattcggcatggaatcgtcattgcagattagctcaggaggggaaagactgcctccagggcctgcgcctcagacatcactacatgctatgcggggcattactcagagtgtgggggaggattgctgccgtgatggctgacgtgtcaagttctagctatctgcaaatcgttcgcctcaagaccaaagaccggaagaaacaggtggggatcaaaatccccgaagggtgcgtccggcgagtcctgcaggagctcaggctaatggatgctgatgtgaaaagacggcaggcccctgccctagggtgtccggctccacccgctccacgacccctcgctctgccatgcggccctggagaggttctcgacttaacatactctcctcccgctgaagcctttcccccacccccacacttcagttttcctgccccactgtctctagacgctggtcccggagtcgtgcctctcggtacgccagatgcccaggcggaccctgccgctcttgcacaccagggctgtgacattaacttcaaggaggttctggaggatatgctgagaagcctgcacgccggacctccttctgagggcgcattgggagaaggcgctggcgcaggaggcgctgcgggaggaggccctgagagacaatccgttatacagttcagcccaccatttccgggagcacaagctcccctatag

SEQ ID NO: 183462 - DNA, 4924 bp, Artificial Sequence
  derived and/or modified sequence
gtgcgcggggcccccaagatggcgcccgaaacccggaagtgagcggcggcagctgcgaggctcggagaaacaggcgccgcgggctccgcgcccggccggacccgggcccgagatcatgatgctgccgccaccgccgccaccacggagcgagaagcccagatagacgccccggcggccccgggtcctggagtcccgccgcctgctgcccggccgaggaccccaccccgcctgccgcccgatgcttgcagtggggcccgccatggacagggattacccgcagcatgaacccccgccggcgggcagcctcctgtacagcccgccgcccctgcagagcgccatgctgcactgcccctactggaacaccttctcgctgccgccataccctgccttctccagcgacagccgcccgttcatgagctccgcctccttcctcggcagccagccctgcccagacaccagctatgcccccgtggccaccgcctccagcttgccaccaaagacctgcgactttgctcaggactcctcctattttgaggacttctccaacatctccatcttctcctcgtccgtggactccctgtcggacatcgtggacacgcccgacttcctgccggctgacagcctcaaccaggtgtccaccatctgggacgataaccctgccccctccacccacgataagctgttccagctcagcaggccgtttgcaggcttcgaggactttctgccctcccacagcaccccgcttctcgtcagctaccaggagcagagtgtgcagagccagccagaggaggaggacgaggctgaggaggaggaggcggaggagctggggcacacagagacctacgccgactacgtgccgtccaagtccaagatcgggaagcagcacccagaccgcgtggtggagaccagcacactgtccagcgtcccacccccagacatcacctacaccctggccctgccctcggacagcggggccctgtctgccctgcagctagaggccatcacctacgcctgccagcaacacgaggtcctgctccccagcgggcagcgcgcgggctttctcatcggcgatggggccggcgtgggcaaaggccggacggtggccggagtcatcctggagaaccacctgcgcggccggaagaaagcattgtggttcagcgtctccaacgacctcaagtacgatgcggagcgcgacctgcgggacatcgaagccacgggcatcgcggtgcacgcgctcagcaagatcaagtacggtgacaccactacctcagagggcgtcctcttcgccacctactccgccctgattggggagagccaggccggcggccagcaccgcactcgcctccggcagatcctggactggtgtggggaggccttcgagggcgtcatcgtgttcgacgagtgtcacaaagccaagaatgccggctccaccaagatgggcaaggctgtgctagacctgcagaacaagctgcccctggcccgcgtggtctacgccagcgccacaggtgcctctgagcctcggaacatgatctacatgagccgcttgggtatctggggcgagggcacacccttccggaactttgaggagttcctgcacgccatcgagaagaggggcgttggcgccatggagatcgtggccatggacatgaaggtcagcggcatgtacatcgcacgccagctcagcttctccggcgtcaccttccgcatcgaggagatcccgctggccccagccttcgagtgcgtctacaaccgcgcggccctgctgtgggccgaggccctgaacgtgttccagcaggcggccgactggatcggcctggagtcgcgcaagtccctgtggggccagttctggtcggcacaccagcgcttcttcaagtatctgtgcatcgcagccaaggtgcgccggctggtggagctggcccgagaggagctggcgcgagacaagtgcgtggtcatcgggctgcagtccacgggcgaggcgcgcacgcgggaggtgctgggggagaacgatgggcacctcaactgcttcgtctcggccgctgaaggcgtgttcctgtcgctaattcagaagcactttccgtccaccaagagaaagcgggacagaggagcgggcagcaagcggaaacggcgacctcggggacgcggggccaaagccccccggctggcgtgcgagacagcgggcgtcatccgcatcagtgacgacagcagcacggagtcggaccctggcctggacagcgacttcaactcctcccccgagtccctggtggatgacgacgttgtcatcgttgatgcagtcgggctccccagtgacgaccggggacccctgtgcctcctgcagagagacccgcatggccccggggtcctggagcgggtggagcggctgaagcaggatctgctggacaaagtgcggcggctgggccgggaactgccagtcaacaccctggacgagctcatcgaccagctgggcggcccccagcgggtggcggagatgaccggcaggaaaggccgcgtggtgtccaggcccgacgggacggtggccttcgagtcgcgggcagagcagggtctgtccatcgaccacgtgaacctcagggagaagcagcgcttcatgagcggcgagaagctcgtggccatcatctcggaggcctccagctcgggtgtctccctccaagccgaccgccgtgtccagaaccagcggcgccgcgtgcacatgaccttggagctgccgtggagcgccgaccgcgccatccagcagttcggccgcacccaccggtccaaccaggtctccgcgccagagtatgtcttcctcatctcggagctggccggggagcgccggttcgcctccatcgtggccaagcgcctggagagtctgggggccctgacccacggagaccgccgcgccacggagtcccgtgacctcagcaagtacaactttgagaacaagtatggcacccgggccctgcactgtgtcctcaccaccatcctgagccagactgagaacaaagtgcctgtgccccagggataccctggaggggtccccaccttcttccgggacatgaagcagggcctgctgtctgtgggcattggtggccgggagtcccggaatggctgcctggacgtggagaaggactgttccatcaccaagttcctgaaccgcatcctggggctggaggtgcacaagcagaacgccctgttccagtacttctcagacaccttcgaccacctcatcgagatggacaagcgggagggcaaatacgacatgggcatcctggaccttgctcccggtatcgaggagatctacgaggagagccagcaggtgttcctggctcccgggcacccgcaggacgggcaggtggtcttctacaagatcagcgtggaccgcggcctgaagtgggaggacgcctttgccaagtcgctggcgctgacgggcccctatgacggcttctacctctcctacaaggtccgcggtaacaagcccagctgcctgctggcggagcagaaccgcggccagttcttcacggtgtacaagcccaacatcggccggcagagccagctggaggccctggacagcctccgccgcaagttccaccgggtcaccgcggaggaggccaaggagccctgggagagtggctacgctttgtcgctgacgcactgcagccacagcgcctggaaccggcactgccggctggcgcaggagggtaaggactgcctgcaggggctgcggctgcggcaccactacatgctgtgcggcgcgctgctgcgcgtgtggggccgcatcgccgccgtcatggccgacgtcagcagcagcagctacctgcagatcgtgcggctgaagaccaaggacaggaagaagcaagtgggcatcaagatccccgagggctgcgtgcgccgggtgctgcaggagctgcggctgatggatgcggacgtgaagcgcaggcaggcgcccgccctgggctgccccgccccgcccgccccgcgcccgctggcgctgccttgcggccccggagaggtgctggacctcacctacagccccccggccgaggccttcccgccgcccccgcacttctctttcccggcgccgctgtccctggacgccggccccggcgtcgtgccgctgggcacccccgacgcccaggccgaccctgcggccctcgcgcaccagggctgcgacatcaacttcaaggaggtgctggaggacatgctgcgctcgctgcacgcggggccgccctccgagggcgcgctgggggagggcgcgggggcggggggcgcggcgggcggtggtcccgagcggcagagcgtgatccagttcagcccacccttccccggcgcccaggctcctctctgacacgcctttaggcgaaacatgccccaagacacagggaccgtttctcccctaggagcagcggtggggagcagggccaaggtcccctgaccactgctcagaggagccctaggccctggccgcagtgccttcagcgcccgacccgggcccccacctggtcagccctggcggggcccactcaggacagctgggggccggggcgtggcagggccctctctgtgcctctcctcccaagtaggaaggggctccgggtggctgctctgggactgggcacccacaagggctcagtgggcccaaacccttgaaatccgtgaaaccgggtggtcccaagagctagaaactcaggaaaccccaggtgctcagggccccgcgtctcgggggctccgtggggcagacccctgctaatatatgcaattctccctcccccagcccttccctgacccctaagttattgcccgctcacctctcccaggccccaggccgcggagctggcagggtggcgcctgcggtttctatgtatttatagcaagttctgatgtacatatgtaaaggacttttttaaatatatgtgccttttgcctacttccc

SEQ ID NO: 183463 - protein, 686 aa, Artificial Sequence
  derived and/or modified sequence
MSLRDKGGEEECFEYDCQDEERKPTHRQHDTQDLLEEVLCAERVGQMTKTYNDIDAVTRLLEEKERDLELAARIGQSLLKKNKTLTERNELLEEQVEHIREEVSQLRHELSMKDELLQFYTSAAEESEPESVCSTPLKRNESSSSVQNYFHLDSLQKKLKDLEEENVVLRSEASQLKTETITYEEKEQQLVNDCVKELRDANVQIASISEELAKKTEDAARQQEEITHLLSQIVDLQKKAKACAVENEELVQHLGAAKDAQRQLTAELRELEDKYAECMEMLHEAQEELKNLRNKTMPNTTSRRYHSLGLFPMDSLAAEIEGTMRKELQLEEAESPDITHQKRVFETVRNINQVVKQRSLTPSPMNIPGSNQSSAMNSLLSSCVSTPRSSFYGSDIGNVVLDNKTNSIILETEAADLGNDERSKKPGTPGTPGSHDLETALRRLSLRRENYLSERRFFEEEQERKLQELAEKGELRSGSLTPTESIMSLGTHSRFSEFTGFSGMSFSSRSYLPEKLQIVKPLEGSATLHHWQQLAQPHLGGILDPRPGVVTKGFRTLDVDLDEVYCLNDFEEDDTGDHISLPRLATSTPVQHPETSGERSQARVTVSGSRSYPSRPQASPEEMQEPPAATEEEEEEEEEEGSGEGTTISPVNLAPFPEAEFWAILTSVPGTIRSGSLSVASARLCG

SEQ ID NO: 183464 - DNA, 2061 bp, Artificial Sequence
  derived and/or modified sequence
atgagcctgagagacaagggcggcgaggaggagtgcttcgagtacgactgccaggacgaggagagaaagcccacccacagacagcacgacacccaggacctgctggaggaggtgctgtgcgccgagagagtgggccagatgaccaagacctacaacgacatcgacgccgtgaccagactgctggaggagaaggagagagacctggagctggccgccagaatcggccagagcctgctgaagaagaacaagaccctgaccgagagaaacgagctgctggaggagcaggtggagcacatcagagaggaggtgagccagctgagacacgagctgagcatgaaggacgagctgctgcagttctacaccagcgccgccgaggagagcgagcccgagagcgtgtgcagcacccccctgaagagaaacgagagcagcagcagcgtgcagaactacttccacctggacagcctgcagaagaagctgaaggacctggaggaggagaacgtggtgctgagaagcgaggccagccagctgaagaccgagaccatcacctacgaggagaaggagcagcagctggtgaacgactgcgtgaaggagctgagagacgccaacgtgcagatcgccagcatcagcgaggagctggccaagaagaccgaggacgccgccagacagcaggaggagatcacccacctgctgagccagatcgtggacctgcagaagaaggccaaggcctgcgccgtggagaacgaggagctggtgcagcacctgggcgccgccaaggacgcccagagacagctgaccgccgagctgagagagctggaggacaagtacgccgagtgcatggagatgctgcacgaggcccaggaggagctgaagaacctgagaaacaagaccatgcccaacaccaccagcagaagataccacagcctgggcctgttccccatggacagcctggccgccgagatcgagggcaccatgagaaaggagctgcagctggaggaggccgagagccccgacatcacccaccagaagagagtgttcgagaccgtgagaaacatcaaccaggtggtgaagcagagaagcctgacccccagccccatgaacatccccggcagcaaccagagcagcgccatgaacagcctgctgagcagctgcgtgagcacccccagaagcagcttctacggcagcgacatcggcaacgtggtgctggacaacaagaccaacagcatcatcctggagaccgaggccgccgacctgggcaacgacgagagaagcaagaagcccggcacccccggcacccccggcagccacgacctggagaccgccctgagaagactgagcctgagaagagagaactacctgagcgagagaagattcttcgaggaggagcaggagagaaagctgcaggagctggccgagaagggcgagctgagaagcggcagcctgacccccaccgagagcatcatgagcctgggcacccacagcagattcagcgagttcaccggcttcagcggcatgagcttcagcagcagaagctacctgcccgagaagctgcagatcgtgaagcccctggagggcagcgccaccctgcaccactggcagcagctggcccagccccacctgggcggcatcctggaccccagacccggcgtggtgaccaagggcttcagaaccctggacgtggacctggacgaggtgtactgcctgaacgacttcgaggaggacgacaccggcgaccacatcagcctgcccagactggccaccagcacccccgtgcagcaccccgagaccagcggcgagagaagccaggccagagtgaccgtgagcggcagcagaagctaccccagcagaccccaggccagccccgaggagatgcaggagccccccgccgccaccgaggaggaggaggaggaggaggaggaggagggcagcggcgagggcaccaccatcagccccgtgaacctggcccccttccccgaggccgagttctgggccatcctgaccagcgtgcccggcaccatcagaagcggcagcctgagcgtggccagcgccagactgtgcggctag

SEQ ID NO: 183465 - DNA, 2061 bp, Artificial Sequence
  derived and/or modified sequence
atgtcacttagggacaagggcggagaagaggagtgcttcgagtacgactgtcaggacgaggagcgaaagcccacccaccggcaacacgatacacaggatttacttgaagaagtactatgtgcagagcgcgtgggccagatgactaagacgtataacgatattgatgccgtgacccgactcctcgaggagaaagaacgcgaccttgagcttgccgccaggataggccagagtctgcttaagaaaaataagactctgacagaaaggaacgaactgttggaggagcaagtggaacacattcgcgaggaggttagccagctcaggcatgaactttcgatgaaagacgaactcctgcagttttacactagtgccgccgaggagagcgagccggagtccgtgtgctctacccctcttaaacgtaatgagtcaagctcatccgtccaaaactacttccatctcgactccttgcagaaaaaacttaaagatctcgaagaagagaatgtggttctgcggagtgaggctagccagctgaagactgaaactattacttatgaggagaaagagcagcagttggtgaacgattgcgtgaaggaactaagggacgctaacgtacagattgcctccatcagcgaggagctggctaagaaaacagaggacgccgctcgccagcaggaagaaatcacacatctgctcagtcagatcgtggatctgcagaaaaaagccaaggcctgtgctgtggaaaacgaggaactggtccagcaccttggggccgctaaagacgcacagaggcagttaactgcagagctgcgggagctggaagacaaatatgcagagtgtatggaaatgctacacgaggcccaagaggagcttaaaaatctgagaaacaagaccatgcctaatacgactagccgtagataccacagcctcggtctcttccccatggacagtttagcagccgagatcgaaggcaccatgcggaaggagcttcaactggaagaagcagaatccccagatattacccaccagaagcgcgtgttcgagacggtccgaaatattaatcaggtggtgaagcaacgaagcctgacaccgtccccaatgaacatacctggctctaatcaatctagtgctatgaactctttgttatcctcttgcgtaagtacacctcgaagctctttctacgggtccgatatcgggaatgtggtactcgacaataagactaactccattatcctcgaaacggaggccgcagatttgggcaatgacgagaggagtaagaagcccggaacacctgggacaccgggttcccatgacctcgagacagctttgcgccggctgagtttgcgtagagagaattacctgagcgaaagaaggttttttgaagaggagcaggagagaaaattacaggagcttgctgagaaaggtgaactccggtccggtagtctgaccccgactgagagcattatgagcctcgggacccactccagattcagcgagttcaccggcttttccgggatgagcttctcctcccggagctacttgcccgagaagttacagattgtcaagccgctggaggggtcagccacactccatcactggcagcagctcgctcagccacatttaggcggcattcttgatcccaggcccggagtagtgacaaagggcttcagaaccttagacgtggacctcgacgaagtgtattgtttgaacgatttcgaagaggacgataccggtgatcacatttccttgccacgcctggccacatcgacaccagttcagcaccctgaaacttcaggagagcggtctcaggcccgtgtgacagtgtccggctcaagaagttatcctagccggccccaggcaagccctgaggaaatgcaggaaccaccagctgctaccgaagaggaagaggaggaggaagaggaagaaggctctggtgaaggcaccactatcagcccggtcaatctggcgcccttccctgaggctgaattttgggctatcctcacatccgtgccaggcacgatccggtcagggtctctcagcgtggcatctgcgcgcctgtgtggctag

SEQ ID NO: 183466 - DNA, 2061 bp, Artificial Sequence
  derived and/or modified sequence
atgagcctgcgggacaagggcggggaggaggagtgctttgaatatgactgccaggatgaggagaggaagcccacccaccggcagcacgacacccaggacctgctggaggaggtgctgtgtgccgagcgggtgggccagatgaccaagacctacaatgacattgatgctgtgacccggctgctggaggagaaggagcgggacctggagctggccgcccgcatcggccagagcctgctgaagaagaacaagaccctgacagaaagaaatgagctgctggaggagcaggtggagcacatccgggaggaggtgtcccagctgcggcatgagctgtccatgaaggatgagctgctgcagttctacaccagcgctgctgaggagagcgagcctgagagcgtgtgcagcacccccctgaagagaaatgaaagcagcagctctgtgcagaactacttccacctggacagcctgcagaagaagctgaaggacctggaggaggagaatgtggtgctgcggtctgaggccagccagctgaagacagagaccatcacctatgaggagaaggagcagcagctggtgaatgactgtgtgaaggagctgagagatgccaacgtgcagatcgccagcatcagcgaggagctggccaagaagacagaagatgctgcccggcagcaggaggagatcacccacctgctgagccagatcgtggacctgcagaagaaggccaaggcctgtgctgtggagaatgaggagctggtgcagcacctgggcgccgccaaggatgcccagaggcagctgacagctgagctgcgggagctggaggacaagtatgcagagtgcatggagatgctgcacgaggcccaggaggagctgaagaacctgaggaacaagaccatgcccaacaccaccagccgccgctaccacagcctgggcctcttccccatggacagcctggccgctgagattgagggcaccatgaggaaggagctgcagctggaggaggccgagagcccagacatcacccaccagaagagggtgtttgaaacagtgaggaacatcaaccaggtggtgaagcagaggagcctgacccccagccccatgaacatccctggcagcaaccagagcagcgccatgaacagcctgctgagcagctgtgtgtccacccccaggagcagcttctacggcagtgacattggaaatgtggtgctggacaacaagaccaacagcatcatcctggagacagaggccgctgacctgggcaatgatgagaggagcaagaagccaggcaccccaggcaccccaggcagccatgacctggagacagccctgcggcggctgagcctgcggcgggagaactacctgtctgaaagacgcttctttgaggaggagcaggagaggaagctgcaggagctggccgagaagggggagctgcggagcggcagcctgacccccacagagagcatcatgagcctgggcacccacagccgcttcagcgagttcaccggcttcagcggcatgtccttcagcagccgcagctacctgcctgagaagctgcagatcgtgaagcccctggagggcagcgccaccctgcaccactggcagcagctggcccagccccacctgggcggcatcctggaccccaggcctggggtggtgaccaagggcttccgcaccctggatgtggacctggatgaggtgtactgcctgaatgactttgaggaggatgacacaggagaccacatcagcctgccccggctggccaccagcacccctgtgcagcaccctgagaccagcggggagaggagccaggcccgggtgacagtgtctggcagccgcagctaccccagccggccccaggccagccctgaggagatgcaggagcccccagctgccacagaggaggaggaggaggaggaggaggaggagggcagcggggagggcaccaccatcagccctgtgaacctggcccccttccctgaggccgagttctgggccatcctgacctctgtgcccggcaccatccgcagcggcagcctgtctgtggccagcgcccggctgtgtggctag

SEQ ID NO: 183467 - DNA, 2061 bp, Artificial Sequence
  derived and/or modified sequence
atgagcctgcgggacaagggcggcgaggaggagtgcttcgagtacgactgtcaagacgaagaacgtaaacctacacaccgccagcacgatacccaggatcttcttgaagaggttttatgcgcagaaagagttggccaaatgaccaaaacttacaatgacatcgacgccgttacacggctactggaggagaaggagagagatctggagctcgcagcacgtatcggacagtctctgcttaagaagaataagaccctgaccgagcgaaatgagttactcgaagaacaagtcgaacacattagggaggaagtgagtcagctacgccatgaattgtctatgaaggatgagctgctgcagttctacacaagtgctgccgaggagtcagagcctgagtccgtgtgctccacacctctcaaacggaacgagtcttcttcaagtgttcagaactactttcacctggatagtctgcaaaagaagctgaaggacctggaagaagagaacgtggtgcttagatctgaggcgtcccagttaaagacggaaaccatcacatatgaggagaaagagcagcagcttgtcaatgactgtgtaaaagagctcagagatgccaacgtgcagatcgcctctatcagcgaagaactggcaaaaaagacagaggacgcagcgagacagcaggaagagatcacacaccttttgtcccagatcgtggacctccagaagaaagctaaggcatgcgcggtggaaaacgaggagttggtgcagcacctgggcgccgcgaaggatgcacaacgccagctcaccgctgaactgagagaattggaggacaaatatgccgagtgcatggaaatgctgcatgaagctcaggaggaacttaaaaacctgcgaaacaagacgatgcccaacacgacctctagaaggtatcactcactggggctgtttccaatggacagcttggccgctgagattgagggcacaatgcgtaaggagctgcagctggaggaggccgaatctccagatataacccatcagaagcgggtgtttgaaactgtaagaaacattaatcaggttgtgaaacagaggtctctcaccccgtcaccaatgaacattcctggcagcaatcagtccagcgccatgaactctctgttatcgtcttgtgtcagtacaccccgctcaagcttctacggctccgatatagggaatgtggtcctggacaacaagacaaacagcattatcctggaaaccgaggccgccgatctggggaacgatgaaagaagtaagaagcctgggacgcccggaacacccgggtcccatgatctcgagacggccctcaggcggctctctctccggcgcgagaattacctttctgagcggcgcttttttgaggaggagcaggaaagaaagctccaggagctggccgagaagggtgagttacgctctggcagcttgacacccactgagtcaataatgtcgctcgggacccactccaggtttagtgagttcactggcttttctggtatgtctttttcttctagatcttacttacccgaaaaactgcagattgtaaaacctttggaaggatccgctactcttcaccattggcagcagctggcccagcctcatctgggaggaatcctggatccccgtcctggggtagtcaccaaggggttccggactcttgacgtggatctggatgaggtatattgcctcaatgattttgaagaagatgacactggagaccacatcagcctgcctagactggcgacgagcactccggtacagcatcccgagacatccggggaaagaagtcaagctcgtgtgactgtgagtggatcccgcagctatccatccaggccacaagcctcacccgaggaaatgcaagagcctccggccgccacagaagaagaggaggaggaagaggaagaggaaggtagcggtgaagggactacaatttccccagtaaacctggcccctttccccgaggcagaattttgggcgatattgacttcggtgcccggaaccattcggtcagggagcctgtccgtcgcctcggcccgactgtgcggctag

SEQ ID NO: 183468 - DNA, 2061 bp, Artificial Sequence
  derived and/or modified sequence
atgagcctgagagataagggcggagaagaggagtgtttcgagtacgactgtcaagatgaggaacggaaaccaacccaccggcaacatgacactcaggatctcctggaggaggttctctgcgcggagcgagtcggccagatgaccaagacctacaacgatattgacgccgtgaccaggctgctggaggagaaagaacgtgacctggagctcgctgctcggataggacagagcctgttgaagaagaacaagaccctcacggagcggaatgaactgttagaggagcaggttgaacacatccgagaggaggtctcgcaactccgccatgagctgtctatgaaagatgagctgctccaattttacacgtccgccgcagaagagtccgagccagagagtgtatgttcgacccccctgaaaaggaacgaatcttcgtctagcgtccagaactatttccacctggattccctgcaaaagaagctcaaagaccttgaagaagaaaacgtggtactaagatcagaagcatcccaactcaagactgagacgatcacttacgaggaaaaagaacaacagcttgtcaatgactgtgtaaaggagttgcgcgatgccaacgtccagatcgcaagtatttccgaggaactggcaaagaaaactgaggacgcagctcggcagcaggaagaaatcactcacctactttcccagatagtcgatctgcagaagaaggcaaaggcttgtgccgtcgaaaatgaggagttggttcaacatctgggtgccgcaaaggacgcccagagacagttgaccgctgagctcagagagctggaagataaatacgcggaatgtatggagatgttgcacgaggcccaggaggagctgaagaacctgagaaacaagaccatgcccaatacaacaagcagaaggtatcactccctgggactgtttcccatggactctctggcggcagagatcgaggggacgatgaggaaggagttacagttggaggaagccgagagtcctgacattacacaccaaaagagggtgtttgagactgtcagaaacatcaatcaggtcgttaagcaaaggtcattaaccccgtccccaatgaatatccccggttcgaatcagagctctgccatgaactcattactgagctcctgtgttagcacaccgagaagttccttctatgggagtgatatcgggaacgtagtgttggacaataaaaccaatagcatcatacttgaaacagaggctgctgacctgggcaatgacgagaggtccaaaaaaccaggcacgcccggaactcctggatcccatgacctggagacagcactccggaggctatcactcaggagggaaaactacctcagcgaaagacgcttctttgaggaagagcaggagagaaagctccaggagctggccgaaaaaggcgagctgcggtccggttctctaactcctaccgaaagcattatgagcttagggactcacagcagattctcagagtttacagggtttagcggtatgtcattttccagtcggtcataccttccggagaaactacagatagtcaagcctcttgaaggcagcgccacacttcatcactggcaacagcttgctcagccccatttgggcggtattctcgaccccagacctggagtggtgactaagggatttcgcaccctggatgttgatctcgatgaggtgtattgcctgaatgatttcgaggaggatgacaccggcgaccatatttcccttcctcgcctcgcaactagtacacccgttcaacaccctgaaacctctggtgaacggagccaggccagggtgaccgtgtcaggatcacgttcctacccaagcagaccccaagcgagtcccgaggaaatgcaggaacccccagcagcgactgaagaagaagaagaggaggaagaggaagagggttctggagagggaacgacaatcagccctgtgaacctagcacccttccctgaagctgagttctgggcgattctcactagcgttccagggactatccggagtggatctctgtctgtggcaagtgcccgtttgtgtggatag

SEQ ID NO: 183469 - DNA, 4620 bp, Artificial Sequence
  derived and/or modified sequence
gggtgatgctgggccaggagctttgtgtacacccctccacttcagctgagccagggcatgtctgcggcccaggccagggcgcagtgtgtgccctgggggcccaggcctgcatggctcctctgggtagggggtcgggggcacccccaaggatggtcccttagggtgatgttttggctttggggtgacttcagcaatgtccctgcgagacaagggcggggaagaagaatgttttgaatacgactgccaggatgaagagaggaagccaacccacaggcagcatgacacccaggacctcttggaagaggttttatgtgctgaaagagttggccagatgactaagacatataatgacatagatgctgtcactcggcttcttgaggagaaagagcgggatttagaattggccgctcgcatcggccagtcgttgttgaagaagaacaagaccctaaccgagaggaacgagctgctggaggagcaggtggaacacatcagggaggaggtgtctcagctccggcatgagctgtccatgaaggatgagctgcttcagttctacaccagcgctgcggaggagagtgagcccgagtccgtttgctcaaccccgttgaagaggaatgagtcgtcctcctcagtccagaattactttcatttggattctcttcaaaagaagctgaaagaccttgaagaggagaatgttgtacttcgatccgaggccagccagctgaagacagagaccatcacctatgaggagaaggagcagcagctggtcaatgactgcgtgaaggagctgagggatgccaatgtccagattgctagtatctcagaggaactggccaagaagacggaagatgctgcccgccagcaagaggagatcacacacctgctatcgcaaatagttgatttgcagaaaaaggcaaaagcttgcgcagtggaaaatgaagaacttgtccagcatctgggggctgctaaggatgcccagcggcagctcacagccgagctgcgtgagctggaggacaagtacgcagagtgcatggagatgctgcatgaggcgcaggaggagctgaagaacctccggaacaaaaccatgcccaataccacgtctcggcgctaccactcactgggcctgtttcccatggattccttggcagcagagattgagggaacgatgcgcaaggagctgcagttggaagaggccgagtctccagacatcactcaccagaagcgtgtctttgagacagtaagaaacatcaaccaggttgtcaagcagagatctctgaccccttctcccatgaacatccccggctccaaccagtcctcggccatgaactccctcctgtccagctgcgtcagcaccccccggtccagcttctacggcagcgacataggcaacgtcgtcctcgacaacaagaccaacagcatcattctggaaacagaggcagccgacctgggaaacgatgagcggagtaagaagccggggacgccgggcaccccaggctcccacgacctggagacggcgctgaggcggctgtccctgcgccgggagaactacctctcggagaggaggttctttgaggaggagcaagagaggaagctccaggagctggcggagaagggcgagctgcgcagcggctccctcacacccactgagagcatcatgtccctgggcacgcactcccgcttctccgagttcaccggcttctctggcatgtccttcagcagccgctcctacctgcctgagaagctccagatcgtgaagccgctggaaggttccgccacacttcaccactggcagcagttggcccaacctcaccttgggggcatcctggacccccggcccggtgtggtcaccaagggcttccggacgctggatgttgacctggacgaagtgtactgccttaacgactttgaagaagatgacacaggtgaccacatttctctcccacgcctagctacctccactccagttcagcacccagagacctcaggtgagaggtcccaagcacgtgtgactgtctcaggcagcagaagttacccgagccggcctcaggcttccccagaggagatgcaggagccgccagcggccacggaggaggaggaggaggaggaggaggaggaggggtctggtgagggcaccacgataagtcctgtaaacttggcacctttcccggaggcagagttttgggccattctcacctctgttccaggcaccatccgtagtggttctctgtctgtagcttccgctcgtctgtgtgggtgatgattaaagcattctcattgcacagttctgtttttaaatacagagtctgatgcctcctatttgtaacaatgggtgtagctcccctgcccatcttggaggtgcatggcccatcagggatctttaaagtgggagcaggaaaggctgctaaaaaaaaaaaaaaaaaaaaaagtgggcttttgggtccctgaaaacatcagtgcccttcttcctggtctgggtgtctccctgagtctaaggggaagattctcaagtcccctggtgatttccaagtggagctgagcagttttagggaaattgagtgctgggtcattcagaaggtaaatgagatcatctgttacctgtacgctgtattaaaatagaaccaggaaaggctcaggatttcagacatttcatcagccttttcactttcccagcttcaatggaggtatatatgtcattttcttttcagcttacacatgtgttcaaagtggatttttaaaaagtgttttagcaatactccttaaccaaataaaccttcggagaacgtcactaagcttttccagagagaagaccctagatgaagttggaaaagagctctggctgactccacccactgtccccaagcattaaaggtgtggccatgagtttacagaattacccacattccagttgccactgggatgaaaagctttgtgctcagagctctgggaatcatgggatcacatggttactgtttaccccaacagcatgctctgtctagactggacctcccagccccttgtgttgggaaggcaaagcttttgtggagtcaggggggagactgagaaaaaatgaattaaccctgtgttgtcatcctcatgacattcctgaggattcaccaggttagaagtgaggacgtttatctttgtgattcataattttcatttgtgaaggccacaacactccccttgaaatacagggcaggaaagagctgaggttcttggtggtgtctcccattcccctggctaatttcagacagctgtggtcaagggattttacttgggatcaacttttccttttttccttgacattaattttagagaagtcatcaagtcatgtgatttgtttagcacataggtttatttatggtttgattttttttaggcagttatattactagattaagcttgtgagggaatgaaaatgttttttatttgttatctacacactcgaaaaagagaaaccagctgcggtactgtcccatttttgtcatcagcaccagtgtccgtcaggaaggcaggtggtggtgcagaaacatgatgcctggctgattttcgtggctaaaggggtaggccttatgttgattgggatgctcccctacagccttacaggtagaatagaaggtgagttctggaagtgcaaagaagcaccattaagtgcatcttctagaagttgtacagaaggactaaagcttatcaagtcaacaaagaacttaccttggaggatagagagagagaagggaccaattatgaggactgacatcctggccactctccttaaaataaacactgacatttttcttgcttgttctctctgtactcaaacctgtggcaaattcatcctagcaacgttatttgacgaggggcatgaacatttatagttgaaactgtagaaagggtcaggttggaggtgtgtaataaaaaagaattacctaggttgccaaaggtaatttaggaagggtctgatcatttagatgagagttctttggggcttattttctgggtaaggctcatctttaaaaactggcttcagaggggagaggggagaacaatgaattggctctattttctctattgggaattacaggaccattttgattcttagaatgtaaaaagcatatcgctaagtaaatcatcctggaggtcccaagtagctctatgcctgcaatcatggagacacaggcagacagataagcttcatggggaaggcatggggcatcctctgtcttgggatttgtatccatggtggtctggtccctgccttttaatccgtcctctacgcttgggcttttctgttaccaaacagcactatcccaggaactattgtctgcctgggaacactcagtagggagacactttggagacaggaggtgatgaacctttttatgtgcagctggtatgatagaaggaaattgggaaaacttgtatgctaggcacttttgtccagagcctgctgtcccatggagaaaaagttttaagcactgaaaaaatttgattaatgtatttaaatgtattatttgaagcatcattcacttgttgatttttacaatcccatgtcttaaaaaggatgaatccatgttattgtattgtaaataatttagatgattaaaatggattgtttaaaaagtt

SEQ ID NO: 183470 - protein, 1017 aa, Artificial Sequence
  derived and/or modified sequence
MMSEGKPPDKKRPRRSLSISKNKKKASNSIISCFNNAPPAKLACPVCSKMVPRYDLNRHLDEMCANNDFVQVDPGQVGLINSNVSMVDLTSVTLEDVTPKKSPPPKTNLTPGQSDSAKREVKQKISPYFKSNDVVCKNQDELRNRSVKVICLGSLASKLSRKYVKAKKSIDKDEEFAGSSPQSSKSTVVKSLIDNSSEIEDEDQILENSSQKENVFKCDSLKEECIPEHMVRGSKIMEAESQKATRECEKSALTPGFSDNAIMLFSPDFTLRNTLKSTSEDSLVKQECIKEVVEKREACHCEEVKMTVASEAKIQLSDSEAKSHSSADDASAWSNIQEAPLQDDSCLNNDIPHSIPLEQGSSCNGPGQTTGHPYYLRSFLVVLKTVLENEDDMLLFDEQEKGIVTKFYQLSATGQKLYVRLFQRKLSWIKMTKLEYEEIALDLTPVIEELTNAGFLQTESELQELSEVLELLSAPELKSLAKTFHLVNPNGQKQQLVDAFLKLAKQRSVCTWGKNKPGIGAVILKRAKALAGQSVRICKGPRAVFSRILLLFSLTDSMEDEDAACGGQGQLSTVLLVNLGRMEFPSYTINRKTHIFQDRDDLIRYAAATHMLSDISSAMANGNWEEAKELAQCAKRDWNRLKNHPSLRCHEDLPLFLRCFTVGWIYTRILSRFVEILQRLHMYEEAVRELESLLSQRIYCPDSRGRWWDRLALNLHQHLKRLEPTIKCITEGLADPEVRTGHRLSLYQRAVRLRESPSCKKFKHLFQQLPEMAVQDVKHVTITGRLCPQRGMCKSVFVMEAGEAADPTTVLCSVEELALAHYRRSGFDQGIHGEGSTFSTLYGLLLWDIIFMDGIPDVFRNACQAFPLDLCTDSFFTSRRPALEARLQLIHDAPEESLRAWVAATWHEQEGRVASLVSWDRFTSLQQAQDLVSCLGGPVLSGVCRHLAADFRHCRGGLPDLVVWNSQSRHFKLVEVKGPNDRLSHKQMIWLAELQKLGAEVEVCHVVAVGAKSQSLS

SEQ ID NO: 183471 - DNA, 3054 bp, Artificial Sequence
  derived and/or modified sequence
atgatgtcagagggaaagccccccgataaaaagagacccaggcggtctctgtccatttccaagaataagaagaaagcgagcaactcaattatctcatgttttaataatgcaccaccagccaagctcgcatgtcccgtctgctctaagatggttccacggtacgacctgaaccgccatctggatgaaatgtgcgcgaataacgacttcgtccaagtcgacccaggccaggttggcctgattaactctaacgtgagcatggttgatctgacctcagtcacgctggaagacgtgacccctaaaaaatctccccccccaaaaactaacctgacaccagggcaatcggactccgcaaaacgagaagtgaagcagaagatttctccttactttaagtcaaacgacgtggtgtgcaaaaatcaggacgaactgaggaaccgtagtgttaaggtgatatgcttaggcagccttgcaagtaagttatctcgcaaatatgtgaaggccaagaagtcgatagataaagatgaggaatttgcagggtccagtccacagagctctaaatccacagtggtcaagagcctgatcgacaactcaagcgaaatcgaagatgaggatcaaattctggagaactcatcccagaaggagaatgtcttcaaatgcgacagcctcaaggaggaatgtatccccgagcatatggtcagaggaagcaagatcatggaggccgaatcccaaaaggcgacgcgcgaatgcgaaaagagtgccctcacacctgggtttagtgacaacgcaatcatgctgttctccccagactttacactgaggaatacactaaagtccacatccgaggattctctagtgaagcaggaatgcatcaaagaggtggtcgagaagagagaagcctgccattgtgaagaagtcaaaatgactgtggcaagcgaggcaaaaattcagctctctgacagcgaggccaaatctcattcttccgctgatgacgcaagtgcttggtctaatatacaagaagcgcctttgcaggacgattcctgcctgaataacgatatccctcatagcattccgctagagcaaggatctagctgcaatggccctggtcagaccaccggccatccatactacctgcgttcctttctcgtggttctgaagaccgtgcttgagaatgaagatgacatgctgctcttcgacgagcaggagaagggcattgttaccaagttttaccagctaagcgccaccgggcagaagctatacgttaggctctttcagagaaaactctcttggattaaaatgactaaactggaatacgaagaaattgctctcgatctgacaccagtcattgaggaactgacaaatgcgggttttctgcagactgagagcgaactgcaggaattgagcgaagtcctggagttgctgtcagctcctgagctcaaaagcctggccaagaccttccacctggtaaaccctaacggccagaagcaacagttggtcgatgcattcctgaagctagccaagcagcggagtgtgtgcacttggggaaagaataaaccgggtatcggcgctgttatcctcaaaagagccaaggcactggcaggacagagcgtgcgaatttgcaagggccctagggcggttttttctagaatccttctgctcttcagtctaacggacagcatggaggacgaggatgctgcctgcgggggtcagggccaactatctaccgtcctgcttgtaaacctgggtagaatggagtttccatcttacactattaacagaaaaacacacatcttccaggatcgagatgacctgattaggtacgccgcggcaacccacatgctgagcgatattagctccgctatggccaacggaaactgggaagaagcaaaagaactggcccagtgtgctaaacgagactggaacaggctgaaaaaccatccaagcctgcgttgccacgaagatctaccgttgtttttgcggtgctttaccgtgggctggatatatacacgaatcctctccagatttgtcgaaattttgcagcgactgcatatgtacgaggaagcagtgcgcgaattggaatctttgctcagtcaacggatctactgccccgacagccggggccggtggtgggataggctcgctctgaatctccaccagcacctcaaacgccttgagccgacaataaaatgcattaccgaagggctggcagacccagaagtaagaacagggcatcgcctgtctttgtaccaacgagcagtccgattgcgggagtcacccagttgcaaaaaatttaagcatctgtttcagcagctcccagagatggcggttcaagacgtgaaacatgtaaccattaccggaagactgtgtccccaacgaggcatgtgcaagtctgtcttcgtcatggaagctggcgaagctgctgacccaactaccgtgttgtgctctgtggaggaactggccctggcacactatcgcagatccggtttcgaccagggcatccatggtgaggggagcactttcagtacgctgtatggcctgctgctgtgggatatcatcttcatggacggaattcctgatgtgtttcgtaacgcttgtcaggcatttcccctggacctgtgtacagactccttctttacctcacgcagacctgccctggaagccaggcttcagctgatccacgacgctccggaagaatccctgcgcgcctgggtagcagcaacctggcatgagcaggaaggaagagtggcatctttggtgtcttgggatcggtttacttcacttcaacaagcccaggatctggtcagctgcctaggtggccccgtcctgtctggagtgtgccgccaccttgctgcagactttagacactgccgcgggggcctgccagacctggtggtgtggaacagccagtcacggcatttcaagcttgtggaggtgaagggaccaaatgaccggttaagccataagcaaatgatttggcttgctgagcttcagaaactgggagccgaggtagaagtttgtcatgttgtcgccgtaggcgccaaatctcaaagtctctcttag

SEQ ID NO: 183472 - DNA, 3054 bp, Artificial Sequence
  derived and/or modified sequence
atgatgtctgagggcaagcccccagacaagaagaggccccggcgcagcctgagcatcagcaagaacaagaagaaggccagcaacagcatcatcagctgcttcaacaatgcccccccagccaagctggcctgccctgtgtgcagcaagatggtgcccaggtatgacctgaacagacacctggatgagatgtgtgccaacaatgactttgtgcaggtggaccccggccaggtgggcctcatcaacagcaatgtgtccatggtggacctgacctctgtgaccctggaggatgtgacccccaagaagagccccccacccaagaccaacctgaccccaggccagagcgacagcgccaagcgggaggtgaagcagaagatcagcccctacttcaagagcaatgatgtggtgtgcaagaaccaggatgagctgaggaacagatctgtgaaggtgatctgcctgggcagcctggccagcaagctgagcaggaaatatgtgaaggccaagaagagcattgacaaggatgaggagtttgctggcagcagcccccagagcagcaagagcacagtggtgaagagcctgattgacaacagcagcgagattgaagatgaggaccagatcctggagaacagcagccagaaggaaaatgtgttcaagtgtgacagcctgaaggaggagtgcatccctgagcacatggtgcggggcagcaagatcatggaggccgagagccagaaggccaccagagaatgtgagaagagcgccctgaccccaggcttcagtgacaatgccatcatgctgttctccccagacttcaccctgaggaacaccctgaagagcaccagcgaggacagcctggtgaagcaggagtgcatcaaggaggtggtggagaagcgggaggcctgccactgtgaggaggtgaagatgacagtggccagcgaggccaagatccagctgagtgacagcgaggccaagagccacagcagcgcagatgatgccagcgcctggagcaacatccaggaggcccccctgcaggatgacagctgcctgaacaatgacatcccccacagcatccccctggagcagggcagcagctgcaatggacctggccagaccaccggccacccctactacctgcggagcttcctggtggtgctgaagacagtgctggagaatgaagatgacatgctgctgtttgatgagcaggagaagggcatcgtgaccaagttctaccagctgagcgccaccggccagaagctgtatgtgcggctcttccagaggaagctgtcctggatcaagatgaccaagctggagtatgaggagatcgccctggacctgacccctgtgattgaggagctgaccaatgccggcttcctgcagacagagagcgagctgcaggagctgtctgaggtgctggagctgctgagcgcccctgagctgaagagcctggccaagaccttccacctggtgaaccccaacggccagaagcagcagctggtggatgccttcctgaagctggccaagcagaggtctgtgtgcacctggggcaagaacaagccaggcattggagctgtgatcctgaagagggccaaggccctggccggccagagcgtgcgcatctgcaagggccccagggctgtgttcagccgcatcctgctgctcttcagcctgacagacagcatggaggatgaagatgctgcctgtggcggccagggccagctgagcacagtgctgctggtgaacctgggccgcatggagttccccagctacaccatcaacaggaagacccacatcttccaggacagagatgacctgatccgctatgctgctgccacccacatgctgagtgacatcagcagcgccatggccaatggaaactgggaggaggccaaggagctggcccagtgtgccaagagggactggaaccggctgaagaaccaccccagcctgcgctgccacgaggacctgcccctcttcctgcgctgcttcaccgtgggctggatctacacccgcatcctgagcagatttgtggagatcctgcagaggctgcacatgtatgaggaggccgtgcgggagctggagagcctgctgagccagaggatctactgcccagacagccggggccgctggtgggaccggctggccctgaacctgcaccagcacctgaagaggctggagcccaccatcaagtgcatcacagagggcctggccgaccctgaggtgaggacaggccaccggctgagcctgtaccagagagctgtgcggctgcgggagagccccagctgcaagaagttcaagcacctgttccagcagctgcctgagatggctgtgcaggatgtgaagcacgtgaccatcaccggccgcctgtgcccccagaggggcatgtgcaagtctgtgtttgtgatggaggccggggaggccgctgaccccaccaccgtgctgtgcagcgtggaggagctggccctggcccactacagaagaagtggctttgaccagggcatccacggggagggcagcaccttcagcaccctgtatggcctgctgctgtgggacatcatcttcatggatggcatcccagatgtgttcagaaatgcctgccaggccttccccctggacctgtgcacagacagcttcttcaccagcagaagacctgccctggaggcccggctgcagctgattcatgatgcccctgaggagagcctgcgggcctgggtggccgccacctggcatgagcaggagggccgggtggccagcctggtgtcctgggaccgcttcaccagcctgcagcaggcccaggacctggtgtcctgcctgggcggccctgtgctgtctggagtgtgccgccacctggccgctgacttccgccactgccggggcggcctgcctgacctggtggtgtggaacagccagagccgccacttcaagctggtggaggtgaagggccccaatgaccggctgagccacaagcagatgatctggctggccgagctgcagaagctgggcgctgaggtggaggtgtgccacgtggtggccgtgggcgccaagagccagagcctgtcctag

SEQ ID NO: 183473 - DNA, 3054 bp, Artificial Sequence
  derived and/or modified sequence
atgatgagcgagggcaagccccccgacaagaagcggccccggcggagtctctccatatcaaagaataaaaagaaggcatctaacagtataatctcctgtttcaacaatgccccaccggccaaattagcatgccctgtgtgttctaaaatggttcctagatatgatcttaatcgccacctcgacgagatgtgcgccaataatgatttcgtccaggtggaccctggccaggttgggctgatcaactcaaatgttagcatggtcgatcttacttccgtgaccctggaagatgtgactccaaagaagtccccccccccgaaaaccaacctgactcctggccagtccgatagcgccaaaagagaagtgaagcaaaagatctctccttacttcaaaagtaacgacgtggtttgcaaaaaccaggacgagctcaggaaccggtctgtcaaggtgatttgcctgggatctctggccagcaaactgagtcggaagtacgtgaaagccaagaagagcatcgacaaggatgaagaattcgctggttcctcccctcagtctagtaaaagcaccgtggtcaaatctctgatcgataactcctccgaaatagaggacgaagaccaaatcctcgaaaattcttctcagaaagagaatgtcttcaaatgtgactccttgaaggaggaatgtattcccgaacatatggtgcgaggttccaaaattatggaagctgaatcgcagaaagctactcgagagtgcgagaagtccgctttaactcctggtttcagcgataatgccataatgcttttttcccctgactttacgctgcggaatacgcttaagagtacaagtgaagactcacttgtcaagcaagagtgtattaaagaggtggtagagaaacgcgaagcttgccactgtgaggaggtgaagatgactgtggcatccgaggctaagatacagttaagtgactctgaagcgaaaagtcacagtagtgctgatgatgccagtgcatggagcaacatacaggaggccccactgcaggacgactcttgcctgaacaacgacatcccacatagtataccactcgaacagggatctagctgtaacggacccggccaaactacaggccacccgtattatctccgctcgttccttgtcgtgttgaagacggtgctggagaacgaagatgacatgcttctgtttgatgaacaggagaagggtatcgttaccaagttctatcagctgagtgctactggccaaaaattatatgtgcgcctgttccagcgtaaactaagctggatcaaaatgacaaagctcgagtacgaagagatcgcgttggatctgaccccagtgatcgaggaactaaccaacgcaggcttcctgcagactgagtcggagctgcaggagctgagtgaggttctggaactcctttccgccccagagctgaaaagcttggctaaaacattccatctggtgaatcccaatggtcagaaacagcagctcgtcgatgcctttttaaaattagcaaagcagaggtccgtgtgtacctggggcaagaataaacctggaattggagccgtgatccttaagcgcgctaaggcactggcaggccagtctgtgaggatttgtaaaggtccacgtgctgtgttcagtcgcattctcctgcttttttccctaaccgactccatggaggacgaggatgctgcttgcggcggccaggggcaactaagcacggtgcttctcgtaaacttaggcaggatggaattcccatcctacactatcaatagaaagactcacatttttcaagatcgtgacgacctgattaggtatgccgccgctacccatatgctgtctgatatctcctctgctatggctaacggcaactgggaggaagccaaagagctcgctcagtgcgccaagcgagattggaataggcttaagaaccacccgtccctgaggtgtcatgaagaccttcctctgttcctgagatgcttcacagtgggatggatatacactcgcatccttagccggtttgtggagattctgcagagactacatatgtatgaggaagccgtgagagagctcgagagcctgctgtcacaacggatctattgccccgacagcaggggacgctggtgggaccgcctcgcgcttaaccttcaccagcatctgaaacggctggaaccaaccattaaatgcatcacagagggtcttgcagaccccgaggttcgcaccgggcaccggcttagtctgtaccaacgggccgtccgccttcgagagtctccttcctgtaagaagtttaaacacctcttccagcagttgccagaaatggctgtgcaggacgtgaaacacgtaaccatcactggaaggctgtgtcctcagcgggggatgtgcaaatctgtgttcgttatggaggcaggagaggctgctgatcctaccacagtcctttgcagcgtagaggagctcgccctagctcactaccggagaagcggatttgaccagggcatccacggtgaagggagtacattctcaactctttacggcctgctgctatgggatattatcttcatggatgggattcctgatgtgtttcgaaacgcctgccaggctttcccactcgatctctgcaccgatagcttttttaccagcagacgccccgctctggaggcaagactgcagctgatccacgatgctccggaggaatccttacgggcttgggtggccgccacttggcacgaacaggaagggcgggtagcgagtctggtgtcatgggaccggttcacctccctgcagcaggctcaagacctggtttcatgtctagggggccccgtgctgtccggcgtgtgccggcatcttgccgccgatttcaggcactgcagaggggggctgcctgatttggtggtctggaattctcagagtcggcattttaaactagtcgaagtaaagggaccgaatgatcggctttcccacaagcagatgatctggctagctgagctccagaagctgggtgctgaggttgaagtgtgtcacgtggtcgccgtgggagccaaaagccagagtctcagttag

SEQ ID NO: 183474 - DNA, 3054 bp, Artificial Sequence
  derived and/or modified sequence
atgatgtcagagggtaagcctcctgacaaaaaacggcctcggagatccttatcaatttcaaagaacaagaagaaggcttcaaatagtataatatcctgcttcaataatgcacccccagctaaattagcgtgcccagtttgctccaagatggtgccccgttacgaccttaacaggcacctggacgagatgtgcgcaaataatgatttcgtgcaagtagatccaggccaggttggactgattaactctaatgtgtcaatggtcgatttgacgtcagttactctagaggatgtcaccccaaagaagagccccccaccaaagactaatctgacacctggtcagtcggattctgccaagcgggaggtcaagcagaagatctccccttattttaagtctaatgatgtcgtttgcaaaaaccaggacgaattgcggaataggagtgtgaaagtcatttgtctaggcagcctggcatcgaagctgtctcgaaagtacgtgaaagctaaaaagtctatcgacaaagacgaggagtttgccggatcaagcccccagtccagcaaatccacagtcgtaaaatcgctcatcgacaattcatctgagatcgaagacgaagatcagatcctcgagaattcaagtcagaaggaaaacgtattcaagtgcgactctctgaaggaggaatgtatccctgaacacatggtgcgaggatctaaaatcatggaagctgagagtcagaaggctacccgagaatgcgagaaatccgctctcacacccggattttccgataatgccatcatgcttttttcccccgactttactctccggaataccctgaaaagtacctcggaagacagccttgttaagcaagaatgcattaaagaagttgtagaaaaacgtgaagcttgtcactgcgaggaggtcaagatgactgtggcctccgaagccaaaatccagctgtctgattcagaggccaagagccactcatcagccgatgatgcttctgcctggagcaacatccaagaagctccactgcaggacgactcatgtctgaataatgatattcctcatagtattccccttgaacagggctctagttgtaacggcccaggacagaccacgggccacccatactacctcaggtctttcctggtagtcctgaaaaccgttttagaaaacgaggatgacatgttactgttcgatgaacaggagaagggcatcgttactaagttctatcagctgagtgcaactggacagaagctctacgttcgcctttttcaaaggaagctgtcctggattaagatgaccaaactagaatacgaggagatcgcactggacctcaccccagtcatagaagagctgaccaacgcaggtttcctccagactgaatccgaactgcaagagctgtcagaggttctggaactcctatctgccccagagctcaaatccctcgcaaaaacctttcatctcgtaaaccccaacgggcagaagcagcaactcgtcgatgcattcctgaagttggccaaacagcgctctgtttgtacttggggtaagaacaagcccggtattggcgcagtcatcctgaagagggcaaaggccctggctggccagtctgtgcgcatttgcaagggccctagggcggtgttcagccgcatccttttgctcttttcccttacagacagcatggaggacgaggatgcagcatgcgggggacaggggcagctgagtactgtcctgttggtgaatctggggaggatggagttcccatcgtatactattaatagaaagacccatatttttcaggaccgagatgatctaatcagatacgccgctgccacgcacatgctctcggacatatcctccgctatggcaaatgggaattgggaggaagcaaaagagctggctcagtgtgccaagagggattggaacagacttaagaaccatcccagcctccgctgtcatgaagacctcccattgttcctaaggtgttttacagtcggctggatctacacacggatcctttcaaggtttgtggagatactacaacggctgcatatgtatgaagaagccgtgcgggagcttgagtcccttttaagtcagcggatttattgccccgatagtagaggcagatggtgggatcgcctcgctctgaaccttcaccaacatttgaagcgcctcgaacccactatcaaatgtataacagagggactggccgacccagaggtcagaactggccaccggctgagcctctatcagcgcgctgttcgtctgcgggagtcccccagttgtaaaaagttcaaacacctcttccagcagttacccgaaatggcagtgcaggatgtcaagcacgttacaatcaccggcaggctgtgtccacagcggggaatgtgtaagtctgtcttcgtcatggaagctggcgaggccgcagatcctacaactgttttgtgcagcgtggaagagctggccctcgcgcattaccgccgttcgggtttcgatcagggcatacatggggaaggtagtactttcagtaccctctacgggttgctcctctgggatataatctttatggatggcattcccgacgtctttcgcaatgcctgccaggcctttccactagacctgtgcaccgattccttctttacttcgaggaggcctgccctcgaagctagactgcaacttattcatgacgccccagaagaaagcttgagggcatgggtggccgctacctggcacgagcaggaaggcagagtggcatcattggtttcttgggatcggtttacgtctcttcagcaagctcaagatctggtcagctgccttggcggaccggtcctctccggtgtatgccggcacttggcagctgacttcaggcactgtaggggaggcctccctgatcttgtcgtatggaatagccagtccaggcactttaaactggtcgaggtgaaaggtcctaatgataggctctcccacaagcagatgatttggttagccgagttgcaaaagcttggggctgaggtggaggtctgtcatgtggtcgccgtgggtgctaagtctcagtcactgagctag

SEQ ID NO: 183475 - DNA, 4888 bp, Artificial Sequence
  derived and/or modified sequence
ggcgcgcggagccaggtgggaggtgcgaggtggccgcgcggggatcttgggtgacagggcaccgagggaaggaggacgcgagggcagccaggccctagggagcagggagagtggctcgggctcagtcgcgtggccccaggaagaagaaattgtcgagacgaataacatgaggtcatatagaatcccacttttggtgatttcaagtcaagaaagtaaaagtaaaccattgctatctttcaccttaaatatcctgtgttttattgctcagaacatccagtttttctaatactcatgatgtcagaagggaaacctcctgacaaaaaaaggcctcgtagaagcttatcaatcagcaagaataagaaaaaagcatctaattctattatttcgtgttttaacaatgcaccacctgctaaacttgcctgccccgtttgcagtaaaatggtgcctagatatgacttaaaccggcaccttgatgaaatgtgtgctaacaatgacttcgttcaagtggatccagggcaggttggcttaataaattcaaatgtgtctatggtagatttaaccagtgttaccttagaagatgtaacacctaagaagtcaccaccaccaaagacaaatttaacccctggccaaagtgattcagcaaaaagggaagtaaagcagaagatcagtccctactttaaaagtaatgatgtggtgtgcaaaaatcaagatgagctgagaaatcgtagtgtgaaagtcatttgtttgggaagcctagcatctaaattgtccagaaaatacgtaaaggctaaaaaatcaatagataaggatgaagaatttgccggttctagtccacagagttccaaatccacagttgttaagagcctgattgataactcttcagaaattgaggacgaggatcaaattttggagaacagttctcaaaaagaaaacgtgtttaaatgtgattctctaaaggaagagtgcattcctgaacatatggtaagaggaagtaaaataatggaagccgaaagccaaaaggctacccgggaatgtgagaaatcagccctcacccctggattctcagataatgcgatcatgttattctcaccagatttcactcttaggaatacattaaagtctacttcagaagacagtcttgtaaagcaagagtgtatcaaagaagtggttgaaaaacgtgaggcatgtcattgtgaagaagtaaaaatgactgttgcttcagaagctaaaatacagctgtcagattcagaggcaaaatctcatagttctgcagatgatgcttctgcatggagtaacatccaagaggctcctctgcaggatgacagttgcttaaacaatgatatccctcacagcattcctttggagcaggggtcaagctgcaatggtcctggtcaaacaaccggtcatccttactaccttcggagtttccttgtggtgctgaaaaccgtacttgagaatgaagatgatatgttgctctttgatgagcaggagaagggaattgtaactaaattttatcagttatcagctactggtcagaagttatatgtaaggctctttcaacgtaaattaagctggattaagatgaccaaattagagtatgaagagattgccttagacttaacacctgtgattgaagaattgacgaatgcaggctttctacagacagaatctgagttgcaagaactctctgaagtgcttgaactcctttctgctcctgaactaaaatccctagccaagaccttccacttggtgaatcccaatggacagaaacagcagctggtggacgcctttctcaaattggccaaacagcgttcagtctgcacttggggcaagaataagcctggaattggtgcagtgattttaaaaagagccaaagccttggctggacagtcagtacgaatctgtaaaggccccagggctgtgttttcccgcatcttgctactgttttcgttgaccgactcaatggaagatgaagacgccgcttgtggaggtcagggacagctttcaacagtcctgttggtcaacctcggccgaatggagtttcctagttacaccatcaatcggaaaacccacatcttccaagacagagatgatcttatcagatatgcagcagccacgcacatgctgagtgacatttcttccgcaatggccaatgggaactgggaagaagctaaggagctcgctcagtgtgcaaaaagggattggaacagactgaaaaaccacccttctctgagatgccacgaagatttaccactcttcctgcggtgtttcactgttgggtggatttatacaaggattttgtctcggtttgtggaaatactgcagagacttcacatgtatgaggaagccgtcagagaacttgaaagccttttgtctcagagaatttattgtcctgacagcagaggccgatggtgggatcgactggcccttaatttacaccagcacttgaagcgcctggaaccgactatcaagtgcatcacagaggggctggcggatccggaagtcagaacgggacaccgcctttcactgtatcagcgagccgtgcgcctgcgagagtctccgagctgtaaaaagttcaagcacctcttccagcagctcccagaaatggctgtgcaagatgtgaaacacgtgaccatcacaggcaggctgtgcccacagcgtgggatgtgcaagtctgtgtttgtgatggaggccggggaggccgctgaccccaccacggtcctgtgctctgtggaggagctggcactggcccattacagacgcagcggttttgaccaggggattcatggcgaagggtccaccttcagcaccctgtatggcctcctcctgtgggacatcatcttcatggatgggattccggatgtcttcagaaacgcctgtcaggcattccccctggacttgtgcacagacagcttcttcacaagcagacgcccagcccttgaggccaggctgcagctgattcatgatgcccccgaggagagcctgcgggcctgggtggcagccacgtggcatgagcaggaaggcagagtggcttcccttgtcagctgggatcgcttcacgtctcttcagcaagctcaggatcttgtctcctgcctggggggccctgtgctcagtggtgtgtgcaggcacctggctgctgactttcgacactgtcgagggggcctccccgacctggtggtgtggaactcccagagccgtcactttaagctggtggaagttaaaggccccaatgatcgtctttcacataagcagatgatctggctggctgaactgcagaagctgggggctgaagtagaagtctgccatgtggttgcagttggagctaagagccaaagccttagctaaaagattccctacaggagaaaatggaaatgaggaggagagaaactccggtgtccccgaggtgtcggtgtggtgagggccgctggcgttgaagtacatcctgctctggcccagctccccatagcaggcctccagggggccactgcgctgttgccgcagcatcctgctcagtacgtcgacttcatcagccaggagggagagcttgtgaaaggctgtgatggagccacccaggctgatctgggcctcgggaacccagcggaagtagcacagtttccacagttttatgtgtgttccagagacacgtggcagaataacaccgtgcaggttggcgggtttggaaaaccattctctaaaatactgctccgtatcactgttctggctgtcggtttgctgagctggatctggctttggttttaatatcaatgaatttctccttggaagtaattcttggtcactgatgattccattctttaaggcagacggcattcctcttagtgtggagctgtagcttttctatacagaagagattttattatgttccggggattccctttttagaaagattgaaggatgcaatggcaaatataaactcaatactatgaaaaattaatggaatttcagcctcaaagaacattttcctcccttcctttgtgtccttattctaatcctcctcccctggaattacacttttttatgtgttgactctacctaggctgttactatcagcctgaatgggggcgggatgagagtacctcctatccactaatttgcttaaggataagttctaagacgggctagaaaaaacactagacctggccgattctatcaagaacaatggcaaactgaacagaggcagtcaggaggccaaatgtctgattctttgttctgtacctttcagtagtctgcaaattttctaccaaaaaaaatcccaagaatttatttgggaattattaaaaaggcaaacaatgaatgttattaggacaagaatatagcagtcaggaggccatgactacatcacagccaggcggcattccctgccacagtggcggcttgaatcatcaagaaatggataaatggggctttagtaaatcaggcttgcaggctcaaagctgcaatctgcccactctcaggtactgagactttgtgggcctcagacaccaggaagaaagctgggatacagtcatttgagttaaaaagggaatgacccctcagaaacccgcattagcagtgttactcttggaagtgcctttacttttaacgctctctgttctgaaaaagaggtgtttggttacgtgtgagccaacatcacgttttgttagctgtgatttacctttgtccgtttaaaagacttcacggagccattctgtatacaaggtgtgctctttccaatgtagaaggggttatggaaaagggtgcgatcctttgctgtaaactggagagaccagtcccaaacagaggggaattttaagcccttctcatcacccaattggatgtttttgcttatagcaaattcctgcaaaataaataaataaatatttgcaaaact

SEQ ID NO: 183476 - DNA, 3054 bp, Artificial Sequence
  derived and/or modified sequence
atgatgagcgagggcaagccccccgacaagaagagacccagaagaagcctgagcatcagcaagaacaagaagaaggccagcaacagcatcatcagctgcttcaacaacgccccccccgccaagctggcctgccccgtgtgcagcaagatggtgcccagatacgacctgaacagacacctggacgagatgtgcgccaacaacgacttcgtgcaggtggaccccggccaggtgggcctgatcaacagcaacgtgagcatggtggacctgaccagcgtgaccctggaggacgtgacccccaagaagagccccccccccaagaccaacctgacccccggccagagcgacagcgccaagagagaggtgaagcagaagatcagcccctacttcaagagcaacgacgtggtgtgcaagaaccaggacgagctgagaaacagaagcgtgaaggtgatctgcctgggcagcctggccagcaagctgagcagaaagtacgtgaaggccaagaagagcatcgacaaggacgaggagttcgccggcagcagcccccagagcagcaagagcaccgtggtgaagagcctgatcgacaacagcagcgagatcgaggacgaggaccagatcctggagaacagcagccagaaggagaacgtgttcaagtgcgacagcctgaaggaggagtgcatccccgagcacatggtgagaggcagcaagatcatggaggccgagagccagaaggccaccagagagtgcgagaagagcgccctgacccccggcttcagcgacaacgccatcatgctgttcagccccgacttcaccctgagaaacaccctgaagagcaccagcgaggacagcctggtgaagcaggagtgcatcaaggaggtggtggagaagagagaggcctgccactgcgaggaggtgaagatgaccgtggccagcgaggccaagatccagctgagcgacagcgaggccaagagccacagcagcgccgacgacgccagcgcctggagcaacatccaggaggcccccctgcaggacgacagctgcctgaacaacgacatcccccacagcatccccctggagcagggcagcagctgcaacggccccggccagaccaccggccacccctactacctgagaagcttcctggtggtgctgaagaccgtgctggagaacgaggacgacatgctgctgttcgacgagcaggagaagggcatcgtgaccaagttctaccagctgagcgccaccggccagaagctgtacgtgagactgttccagagaaagctgagctggatcaagatgaccaagctggagtacgaggagatcgccctggacctgacccccgtgatcgaggagctgaccaacgccggcttcctgcagaccgagagcgagctgcaggagctgagcgaggtgctggagctgctgagcgcccccgagctgaagagcctggccaagaccttccacctggtgaaccccaacggccagaagcagcagctggtggacgccttcctgaagctggccaagcagagaagcgtgtgcacctggggcaagaacaagcccggcatcggcgccgtgatcctgaagagagccaaggccctggccggccagagcgtgagaatctgcaagggccccagagccgtgttcagcagaatcctgctgctgttcagcctgaccgacagcatggaggacgaggacgccgcctgcggcggccagggccagctgagcaccgtgctgctggtgaacctgggcagaatggagttccccagctacaccatcaacagaaagacccacatcttccaggacagagacgacctgatcagatacgccgccgccacccacatgctgagcgacatcagcagcgccatggccaacggcaactgggaggaggccaaggagctggcccagtgcgccaagagagactggaacagactgaagaaccaccccagcctgagatgccacgaggacctgcccctgttcctgagatgcttcaccgtgggctggatctacaccagaatcctgagcagattcgtggagatcctgcagagactgcacatgtacgaggaggccgtgagagagctggagagcctgctgagccagagaatctactgccccgacagcagaggcagatggtgggacagactggccctgaacctgcaccagcacctgaagagactggagcccaccatcaagtgcatcaccgagggcctggccgaccccgaggtgagaaccggccacagactgagcctgtaccagagagccgtgagactgagagagagccccagctgcaagaagttcaagcacctgttccagcagctgcccgagatggccgtgcaggacgtgaagcacgtgaccatcaccggcagactgtgcccccagagaggcatgtgcaagagcgtgttcgtgatggaggccggcgaggccgccgaccccaccaccgtgctgtgcagcgtggaggagctggccctggcccactacagaagaagcggcttcgaccagggcatccacggcgagggcagcaccttcagcaccctgtacggcctgctgctgtgggacatcatcttcatggacggcatccccgacgtgttcagaaacgcctgccaggccttccccctggacctgtgcaccgacagcttcttcaccagcagaagacccgccctggaggccagactgcagctgatccacgacgcccccgaggagagcctgagagcctgggtggccgccacctggcacgagcaggagggcagagtggccagcctggtgagctgggacagattcaccagcctgcagcaggcccaggacctggtgagctgcctgggcggccccgtgctgagcggcgtgtgcagacacctggccgccgacttcagacactgcagaggcggcctgcccgacctggtggtgtggaacagccagagcagacacttcaagctggtggaggtgaagggccccaacgacagactgagccacaagcagatgatctggctggccgagctgcagaagctgggcgccgaggtggaggtgtgccacgtggtggccgtgggcgccaagagccagagcctgagctag

SEQ ID NO: 183477 - protein, 792 aa, Artificial Sequence
  derived and/or modified sequence
MQGEDARYLKRKVKGGNIDVHPSEKALIVHYEVEATILGEMGDPMLGERKECQKIIRLKSLNANTDITSLARKVVEECKLIHPSKLNEVEQLLYYLQNRRDSLSGKEKKEKSSKPKDPPPFEGMEIDEVANINDMDEYIELLYEDIPDKVRGSALILQLARNPDNLEELLLNETALGALARVLREDWKQSVELATNIIYIFFCFSSFSQFHGLITHYKIGALCMNIIDHELKRHELWQEELSKKKKAVDEDPENQTLRKDYEKTFKKYQGLVVKQEQLLRVALYLLLNLAEDTRTELKMRNKNIVHMLVKALDRDNFELLILVVSFLKKLSIFMENKNDMVEMDIVEKLVKMIPCEHEDLLNITLRLLLNLSFDTGLRNKMVQVGLLPKLTALLGNDNYKQIAMCVLYHISMDDRFKSMFAYTDCIPQLMKMLFECSDERIDLELISFCINLAANKRNVQLICEGNGLKMLMKRALKFKDPLLMKMIRNISQHDGPTKNLFIDYVGDLAAQISNDEEEEFVIECLGTLANLTIPDLDWELVLKEYKLVPYLKDKLKPGAAEDDLVLEVVIMIGTVSMDDSCAALLAKSGIIPALIELLNAQQEDDEFVCQIIYVFYQMVFHQATRDVIIKETQAPAYLIDLMHDKNNEIRKVCDNTLDIIAEYDEEWAKKIQSEKFRWHNSQWLEMVESRQMDESEQYLYGDDRIEPYIHEGDILERPDLFYNSDGLIASEGAISPDFFNDYHLQNGDVVGQHSFPGSLGMDGFGQPVGILGRPATAYGFRPDEPYYYGYGS

SEQ ID NO: 183478 - protein, 752 aa, Artificial Sequence
  derived and/or modified sequence
MGDPMLGERKECQKIIRLKSLNANTDITSLARKVVEECKLIHPSKLNEVEQLLYYLQNRRDSLSGKEKKEKSSKPKDPPPFEGMEIDEVANINDMDEYIELLYEDIPDKVRGSALILQLARNPDNLEELLLNETALGALARVLREDWKQSVELATNIIYIFFCFSSFSQFHGLITHYKIGALCMNIIDHELKRHELWQEELSKKKKAVDEDPENQTLRKDYEKTFKKYQGLVVKQEQLLRVALYLLLNLAEDTRTELKMRNKNIVHMLVKALDRDNFELLILVVSFLKKLSIFMENKNDMVEMDIVEKLVKMIPCEHEDLLNITLRLLLNLSFDTGLRNKMVQVGLLPKLTALLGNDNYKQIAMCVLYHISMDDRFKSMFAYTDCIPQLMKMLFECSDERIDLELISFCINLAANKRNVQLICEGNGLKMLMKRALKFKDPLLMKMIRNISQHDGPTKNLFIDYVGDLAAQISNDEEEEFVIECLGTLANLTIPDLDWELVLKEYKLVPYLKDKLKPGAAEDDLVLEVVIMIGTVSMDDSCAALLAKSGIIPALIELLNAQQEDDEFVCQIIYVFYQMVFHQATRDVIIKETQAPAYLIDLMHDKNNEIRKVCDNTLDIIAEYDEEWAKKIQSEKFRWHNSQWLEMVESRQMDESEQYLYGDDRIEPYIHEGDILERPDLFYNSDGLIASEGAISPDFFNDYHLQNGDVVGQHSFPGSLGMDGFGQPVGILGRPATAYGFRPDEPYYYGYGS

SEQ ID NO: 183479 - DNA, 2379 bp, Artificial Sequence
  derived and/or modified sequence
atgcaaggagaggatgcccggtatcttaagaggaaagttaaggggggaaatatcgacgttcatccttccgaaaaagctctgatcgttcactatgaagttgaggctaccatcttgggtgaaatgggcgaccctatgttgggcgagcgcaaagaatgtcagaagatcatcagattaaagtccctgaatgcgaacaccgatatcactagtcttgcccgaaaggtcgtggaagaatgtaagctgattcacccttcgaagctgaatgaagtggagcagcttttgtactacttgcagaataggagagattccctgtcaggcaaggaaaagaaagagaagtccagcaagcctaaggaccccccgccttttgaaggcatggagatagacgaggtggctaacataaacgacatggacgaatacatagagttgttgtatgaagacattccagacaaggtgcgggggagcgccctaattctgcagctggctcgcaatccggacaatctcgaggaattgctgctcaacgaaacagccctcggcgccctcgcgcgggttctccgagaggactggaagcaaagcgtggaacttgcaacgaacatcatctacatcttcttctgtttcagctccttctcccagttccatgggctcattacccactacaaaatcggcgcgctctgcatgaatataatcgaccacgaactcaaaaggcacgagctctggcaggaggaattgagtaaaaaaaagaaggccgtcgacgaggatccagagaaccagactctgaggaaagactatgaaaaaacctttaaaaagtaccaggggctggtggtcaaacaggaacagcttctgagggtggccttgtaccttttgctcaatctggctgaggatacccgtactgaactgaaaatgcggaacaaaaatatcgttcacatgctggtcaaagctttagaccgcgacaacttcgagctgctgatcttggtcgtgagcttcctcaaaaagctctcaatttttatggagaataagaatgacatggtagagatggatattgtggaaaagcttgtgaagatgattccctgcgaacacgaggacctacttaatatcacactacgcctcctgttaaatctctctttcgacacagggctcagaaataagatggtccaggtgggactgcttcccaaactgacagcgcttctgggaaatgataactacaaacagatcgccatgtgtgtgttgtaccatatttcgatggatgatcgatttaaatctatgtttgcctataccgattgcatcccgcagctgatgaagatgttgtttgagtgtagcgatgaaaggatcgacctggagcttatttcattctgtattaacctagccgccaataagaggaatgtccagctcatatgcgaggggaatggcctgaagatgctgatgaagcgggccttgaagttcaaagatccactcctaatgaagatgatccggaacatctcccagcacgatgggccaaccaagaacctattcattgattacgtgggcgacctcgcggcccagatttcaaacgacgaggaggaagagttcgtcatcgaatgcctagggacactggccaacctgaccattcccgacctagactgggaactggtcctgaaggagtataaactcgtcccttacctcaaggataagctgaaacccggggcagcagaggatgacctggtgcttgaggtcgttatcatgatcggaaccgtgagcatggatgactcgtgcgcggccttgctagccaaaagtgggattattcctgcgctaatagagctcttgaacgcacagcaagaagatgatgagttcgtgtgccaaattatctacgtattctatcagatggtattccaccaggctactcgcgacgtcatcatcaaagaaacccaggcccctgcgtatctaatcgacctgatgcacgacaaaaacaatgaaattagaaaggtgtgtgacaacaccctggacatcatagctgaatatgacgaagaatgggccaagaagattcagtccgagaagttcagatggcacaacagccagtggctggagatggtcgagtctaggcaaatggatgagtcagagcaatatctgtatggggacgacagaatagagccctacatccacgaaggagacattcttgagcgtcccgacctgttctataactccgatggacttatcgctagtgagggtgccatctccccggacttttttaatgattatcatttgcagaacggagacgtcgtcggccagcattcattcccaggatctctaggcatggacggatttggccagcccgtgggcattcttggccggccagctacagcttatggatttagaccagacgaaccatattattatggatacggatcttag

SEQ ID NO: 183480 - DNA, 2957 bp, Artificial Sequence
  derived and/or modified sequence
aggcgactctgggcgggtctgggccgctccagtgttttggggcacagaagctgtgggaggagctggaggcttcaccgtggtaaccacagcgccgctgctgccccgccttgcaggcctcaggactgtcatcgcctctgggtgtgagggtactttggccaccgtccccggaaataaccgcgcctgcctctcaagataccccatcctctccacgccgctgccgctgccgccatgcaaggggaggacgccagatacctcaaaaggaaagttaaaggagggaatatagatgtacatccatcagaaaaagcactcattgttcactatgaagtggaagctaccattcttggagaaatgggggaccccatgttgggagaacgaaaagaatgtcaaaaaatcattcgacttaagagtctcaatgccaacacagatataacttccctggcaaggaaggtggttgaagaatgtaaactcattcatccttcaaaactaaatgaggtagaacagctgttgtactatctacagaaccgccgtgattcattgtcaggaaaagagaaaaaagaaaaatcaagcaagcctaaagatccacctccttttgaaggaatggagattgatgaagttgctaacattaatgacatggatgaatatattgagttattatatgaagatattcctgacaaagttcggggttctgctttgatcctgcagcttgctcgaaatcctgataacttggaagaactactattgaatgaaactgcccttggtgcattagcaagggtcctgagagaagactggaagcaaagtgtcgagttagctacaaacataatttacatctttttttgtttctccagcttttctcaatttcatggacttattactcactataaaattggagctctgtgtatgaatattattgatcatgagttaaaaagacatgagctttggcaagaagaactctcaaagaagaagaaagctgttgatgaagaccctgaaaaccaaaccttgagaaaggattatgaaaaaacctttaaaaagtaccaggggcttgtggtaaaacaggaacagctattacgagttgctctttatttgcttctgaatcttgctgaggatactcgtaccgaactgaaaatgaggaacaagaacatagttcacatgttggtgaaagcccttgatcgggacaattttgagctgctaattttagttgtgtcattcttgaagaaactcagcatttttatggagaataaaaatgatatggtggaaatggatattgttgaaaaactggtgaaaatgataccttgtgagcatgaagacctgctgaatatcaccctccgacttttactaaacctatcctttgacacaggactgaggaataagatggtacaagttggactgcttcccaagctcactgcactcctaggcaatgacaactacaaacaaatagcaatgtgtgttctttaccacataagcatggatgaccgctttaaatcaatgtttgcatacactgactgtataccacagttaatgaagatgctgtttgaatgttcagatgaacgaattgacttggaactcatttctttctgcattaatcttgctgctaacaaaagaaatgtacagcttatctgtgaaggaaatgggctgaagatgctcatgaagagggctctgaagtttaaggatccattgctgatgaaaatgattagaaacatttctcagcatgatggaccaactaaaaatctgtttattgattatgttggggaccttgcagcccagatctctaatgatgaagaagaggagtttgtgattgaatgtttgggaactcttgcaaacttgaccattccagacttagactgggaattggttcttaaagaatataagttggttccatacctcaaggataaactaaaaccaggtgctgcagaagatgatcttgttttagaagtggttataatgattggaactgtatccatggatgactcttgtgctgcattgctagccaaatctggcataatccctgcactcattgaattgctaaatgctcaacaagaagatgatgaatttgtgtgtcagataatttatgtcttctaccagatggttttccaccaagccacaagagacgtcataatcaaggaaacacaggctccagcatatctcatagacctaatgcatgataagaataatgaaatccgaaaggtctgtgataatacattagatattatagcggaatatgatgaagaatgggctaagaaaattcagagtgaaaagtttcgctggcataactctcagtggctggagatggtagagagtcgtcagatggatgagagtgagcagtacttgtatggtgatgatcgaattgagccatacattcatgaaggagatattctcgaaagacctgaccttttctacaactcagatggattaattgcctctgaaggagccataagtcccgatttcttcaatgattaccaccttcaaaatggagatgttgttgggcagcattcatttcctggcagccttggaatggatggctttggccaaccagttggcattcttggacgccctgccacagcatatggattccgccctgatgaaccttactactatggctatggatcttgataaagtatctgtttccatgtgtaatctcagcttagaagaaatctgtgtgggttgggttaattttggatctttgcctaataatgcatgttgatgttattgtgggtctgtgtttgtttttatttttatatgttgttagctgcagattaaccccagcccctctgtcttctgttaagtacagttgatactgacattgttcactcatcaaaccacatcttgatgctaagtaacatttcccatgagccacaaaactgaatgctgaaaagctactagactggaaaacaaacactgcattatgtatgttaagtgactaatttaatttcaattaaaaagcgtaaagtgaaaatgaataa

SEQ ID NO: 183481 - DNA, 4111 bp, Artificial Sequence
  derived and/or modified sequence
attctttttctagtctctgttgctgctttttattatttccttctgctagcttggggttttgtttgctcttctttttctagccccttaaggtgtaaaattaggttattaattcaaaatcttttatttatttttttaaatagagcgtcagtatagagtgtcttattgtggatctgtttgagtttatctttgaatttcattgagcttcttggatgtgtaagtttgtctttggtctaatttgggaagtttttgactgttttttctcccagtattctctatgtttctttcttcctctcctttcataccctcattatgcatatgttggtatactagatggtgttccataagtctcttaggttctgtttatttttcttcattctgttttctttctgtgcctcaaaatggacagtttcatttgacatatcttcaagtttgctgattcttttctctctctgctcagatctgctgttaaaaaccctgtagtgatttttttatttcagttattgtacttttcagatctagtgtttttgtttggatccttatgataatatatttttaaactatttatgtgttgagacattgtgtttctcctttttcttagttatttgcactggtttctttttgctctttggacatatttaagacagttgatttaaagtctttgataagtccagtgtttgtgctgtagcatggacagtttctgttaattttttttattgtgagaatgagaatgagtttcttgtttctttgcatgtttcatattttgttttgttgaaaactgggtattttgaatattatggtatccaaaggaaaaaaagaaaagaaaaaaatactcttcagatctttgtaggttgactcagtgtttggatatggcttcaacacttagccaggcaatttacaattttaccttagccttcatttgctgcttgcacagagcctgaagaccagccagaggtaaaagcttatgatcttcccaggttttttctgggtatgtattctgccctgagcatgctcatggatttctagatttctctttatatgcaatagcttttcaaagcatctattcccccaaaatgtctgactccctggactttcctcttgggctttcagcttgtgttttgtttgacccagctattactatttatcccaggggccagcagcttgtatgcttggctttcactgatttcagtgactgcatagctgcactatcctgataagagtttaaaattagtcaaaacaaaggaaagccccttgcagctgacctcaaaggaaacttcagtcagttgcaaaacaatcagacaaaattccttgggagcaaggtccacttgactcctctagaaccaagtattaacagtgggaacgtgggctgccatcttgaagactgccactgtgcttgagagtggggtggatgtctagggaaagttaaaggagggaatatagatgtacatccatcagaaaaagcactcattgttcactatgaagtggaagctaccattcttggagaaatgggggaccccatgttgggagaacgaaaagaatgtcaaaaaatcattcgacttaagagtctcaatgccaacacagatataacttccctggcaaggaaggtggttgaagaatgtaaactcattcatccttcaaaactaaatgaggtagaacagctgttgtactatctacagaaccgccgtgattcattgtcaggaaaagagaaaaaagaaaaatcaagcaagcctaaagatccacctccttttgaaggaatggagattgatgaagttgctaacattaatgacatggatgaatatattgagttattatatgaagatattcctgacaaagttcggggttctgctttgatcctgcagcttgctcgaaatcctgataacttggaagaactactattgaatgaaactgcccttggtgcattagcaagggtcctgagagaagactggaagcaaagtgtcgagttagctacaaacataatttacatctttttttgtttctccagcttttctcaatttcatggacttattactcactataaaattggagctctgtgtatgaatattattgatcatgagttaaaaagacatgagctttggcaagaagaactctcaaagaagaagaaagctgttgatgaagaccctgaaaaccaaaccttgagaaaggattatgaaaaaacctttaaaaagtaccaggggcttgtggtaaaacaggaacagctattacgagttgctctttatttgcttctgaatcttgctgaggatactcgtaccgaactgaaaatgaggaacaagaacatagttcacatgttggtgaaagcccttgatcgggacaattttgagctgctaattttagttgtgtcattcttgaagaaactcagcatttttatggagaataaaaatgatatggtggaaatggatattgttgaaaaactggtgaaaatgataccttgtgagcatgaagacctgctgaatatcaccctccgacttttactaaacctatcctttgacacaggactgaggaataagatggtacaagttggactgcttcccaagctcactgcactcctaggcaatgacaactacaaacaaatagcaatgtgtgttctttaccacataagcatggatgaccgctttaaatcaatgtttgcatacactgactgtataccacagttaatgaagatgctgtttgaatgttcagatgaacgaattgacttggaactcatttctttctgcattaatcttgctgctaacaaaagaaatgtacagcttatctgtgaaggaaatgggctgaagatgctcatgaagagggctctgaagtttaaggatccattgctgatgaaaatgattagaaacatttctcagcatgatggaccaactaaaaatctgtttattgattatgttggggaccttgcagcccagatctctaatgatgaagaagaggagtttgtgattgaatgtttgggaactcttgcaaacttgaccattccagacttagactgggaattggttcttaaagaatataagttggttccatacctcaaggataaactaaaaccaggtgctgcagaagatgatcttgttttagaagtggttataatgattggaactgtatccatggatgactcttgtgctgcattgctagccaaatctggcataatccctgcactcattgaattgctaaatgctcaacaagaagatgatgaatttgtgtgtcagataatttatgtcttctaccagatggttttccaccaagccacaagagacgtcataatcaaggaaacacaggctccagcatatctcatagacctaatgcatgataagaataatgaaatccgaaaggtctgtgataatacattagatattatagcggaatatgatgaagaatgggctaagaaaattcagagtgaaaagtttcgctggcataactctcagtggctggagatggtagagagtcgtcagatggatgagagtgagcagtacttgtatggtgatgatcgaattgagccatacattcatgaaggagatattctcgaaagacctgaccttttctacaactcagatggattaattgcctctgaaggagccataagtcccgatttcttcaatgattaccaccttcaaaatggagatgttgttgggcagcattcatttcctggcagccttggaatggatggctttggccaaccagttggcattcttggacgccctgccacagcatatggattccgccctgatgaaccttactactatggctatggatcttgataaagtatctgtttccatgtgtaatctcagcttagaagaaatctgtgtgggttgggttaattttggatctttgcctaataatgcatgttgatgttattgtgggtctgtgtttgtttttatttttatatgttgttagctgcagattaaccccagcccctctgtcttctgttaagtacagttgatactgacattgttcactcatcaaaccacatcttgatgctaagtaacatttcccatgagccacaaaactgaatgctgaaaagctactagactggaaaacaaacactgcattatgtatgttaagtgactaatttaatttcaattaaaaagcgtaaagtgaaaatgaataa

SEQ ID NO: 183482 - DNA, 2379 bp, Artificial Sequence
  derived and/or modified sequence
atgcagggagaagatgcccgctacctgaagaggaaggtgaagggcggcaacattgatgtgcaccccagcgagaaggccctgattgtgcactatgaggtggaggccaccatcctgggggagatgggagaccccatgctgggggagaggaaagaatgccagaagatcatccggctgaagagcctgaatgccaacacagacatcaccagcctggccaggaaggtggtggaggagtgcaagctgatccaccccagcaagctgaatgaggtggagcagctgctgtactacctgcagaacagaagagacagcctgagcggcaaggagaagaaggagaagagcagcaagcccaaggaccccccaccatttgagggcatggagattgatgaggtggccaacatcaatgacatggatgagtacatcgagctgctgtatgaggacatcccagacaaggtgcggggcagcgccctgatcctgcagctggccagaaatccagacaacctggaggagctgctgctgaatgaaacagccctgggcgccctggcccgggtgctgcgggaggactggaagcagagcgtggagctggccaccaacatcatctacatcttcttctgcttcagcagcttcagccagttccacggcctcatcacccactacaagattggagccctgtgcatgaacatcatcgaccacgagctgaagagacatgagctgtggcaggaggagctgagcaagaagaagaaggctgtggatgaggaccctgagaaccagaccctgaggaaggactatgagaagaccttcaagaagtaccagggcctggtggtgaagcaggagcagctgctgcgggtggccctgtacctgctgctgaacctggccgaggacaccaggacagagctgaagatgaggaacaagaacatcgtgcacatgctggtgaaggccctggaccgggacaactttgagctgctgatcctggtggtgtccttcctgaagaagctgagcatcttcatggagaacaagaatgacatggtggagatggacatcgtggagaagctggtgaagatgatcccctgtgaacatgaggacctgctgaacatcaccctgcggctgctgctgaacctgagctttgacaccggcctgaggaacaagatggtgcaggtgggcctgctgcccaagctgacagccctgctgggcaatgacaactacaagcagatcgccatgtgtgtgctgtaccacatctccatggatgaccgcttcaagtccatgtttgcctacacagactgcatcccccagctgatgaagatgctgtttgaatgttctgatgaaagaattgacctggagctgatctccttctgcatcaacctggccgccaacaagagaaatgtgcagctgatctgtgagggcaatggcctgaagatgctgatgaagagggccctgaagttcaaggaccccctgctgatgaagatgatccggaacatcagccagcatgatggccccaccaagaacctcttcatcgactatgtgggggacctggccgcccagatcagcaatgatgaggaggaggagtttgtgattgaatgtctgggcaccctggccaacctgaccatcccagacctggactgggagctggtgctgaaggagtacaagctggtgccctacctgaaggacaagctgaagccaggagctgctgaagatgacctggtgctggaggtggtgatcatgattggcaccgtgtccatggatgacagctgtgccgccctgctggccaagagcggcatcatcccagccctgattgagctgctgaatgcccagcaggaggatgatgaatttgtgtgccagatcatctacgtgttctaccagatggtgttccaccaggccaccagagatgtgatcatcaaggagacccaggccccagcctacctgattgacctgatgcatgacaagaacaatgagatcaggaaggtgtgtgacaacaccctggacatcatcgccgagtatgatgaggagtgggccaagaagatccagagcgagaagttccgctggcacaacagccagtggctggagatggtggagagccggcagatggatgaaagtgagcagtacctgtatggagatgacagaattgagccctacatccacgagggggacatcctggagaggccagacctcttctacaacagtgatggcctcatcgccagcgagggcgccatcagcccagacttcttcaatgactaccacctgcagaatggagatgtggtgggccagcacagcttccctggcagcctgggcatggatggcttcggccagcctgtgggcatcctgggccggcctgccacagcctacggcttccggccagatgagccctactactacggctacggcagctag

SEQ ID NO: 183483 - DNA, 2379 bp, Artificial Sequence
  derived and/or modified sequence
atgcagggcgaggacgcccggtacctgaagcggaaggtgaagggcggaaacatcgacgtccacccttcagagaaggccttgatagtgcattacgaggtggaggccactatattgggcgaaatgggagatccaatgctaggggaacggaaggaatgccaaaaaatcatccgtctaaaaagcctgaatgctaacaccgacatcacttccctcgccagaaaagtagtcgaggagtgcaaattgatccacccatcaaaattgaacgaggtcgaacagctcctgtattatctgcaaaacaggcgagatagcctgtccggaaaagagaagaaagagaaatcatcaaaacccaaagaccctccaccctttgagggaatggaaattgatgaggtggctaacatcaacgacatggatgagtacatagaacttctttacgaagacattcccgacaaagtgagggggagtgccttgatcctgcaactggctcggaatcccgacaacctggaagaacttctactgaatgaaacagcactgggagccttggcccgcgtgttaagagaggactggaaacagtcggttgagctcgcaacaaacatcatttacatattcttctgcttctcgtcttttagccagtttcacggcctcattacacactacaaaatcggggcattgtgtatgaacataatcgaccatgagctcaagcggcatgaactctggcaagaggagctgagtaagaaaaaaaaggcagtcgatgaagatccagagaatcagaccttacggaaggattacgagaagacgttcaagaagtatcagggacttgtggttaaacaggaacagctccttcgcgtcgccctctacctgttgttgaacttggccgaggacacccggactgagttgaaaatgcgcaacaaaaacattgtccatatgctcgtgaaagctctggatagagataatttcgaactgctgattctcgtggtgagcttcctcaagaagttgtccattttcatggaaaacaagaatgacatggtggaaatggatatagtggaaaaactggtgaaaatgataccatgtgaacacgaggacctcctgaacatcaccctgaggctgttacttaatctttccttcgataccggcctgcgcaataaaatggtgcaagtgggtttactgcccaagctcacagccctcctgggtaatgataattataagcaaatcgccatgtgcgtactgtaccacatttcaatggacgatcgctttaagtctatgttcgcgtacaccgattgcataccgcagctgatgaaaatgttgtttgaatgctccgacgaacgaatcgaccttgagttaattagtttttgcatcaaccttgccgccaataagcgaaacgtccaactgatctgtgaaggaaatggactcaaaatgctgatgaaaagagcgctgaaatttaaggatcccttgctgatgaaaatgatccggaacatatctcagcatgatggcccgactaagaatctttttatcgactacgtgggagacctggctgctcagatctccaacgacgaggaagaggagtttgtcatcgagtgcttaggaacactcgctaatttaaccattcctgatttggattgggagctggtactgaaggagtacaagctggtgccctacctgaaagataagcttaaacccggagcggctgaggacgatttggtgttggaggtcgtcataatgatcggtaccgtgtcgatggacgatagttgcgcagcactgcttgccaaatccggaataatacctgctctgatcgagctgctgaacgcacagcaagaggacgatgagttcgtgtgccagattatctatgtgttctaccagatggttttccaccaggcgacccgcgacgtgatcataaaggaaacccaagccccagcatatttaattgatctgatgcacgacaagaacaacgagatacggaaagtgtgtgataataccttagacatcattgccgaatatgatgaagagtgggccaagaaaatacaaagcgagaaatttcggtggcacaacagccaatggctggagatggtcgagagccgccaaatggacgaaagtgaacaatacctgtacggggacgacagaatcgagccgtacattcacgaaggcgatattcttgaacgcccggacttgttttataatagcgatggcctcatcgctagcgagggtgccatcagccccgattttttcaacgactaccacctgcaaaacggagacgtagttggacaacacagcttcccgggcagcctgggaatggacgggttcggacagcccgtcgggatcctgggtaggccggcgacagcttacggttttaggccagacgaaccttattattacgggtatggaagttag

SEQ ID NO: 183484 - DNA, 2379 bp, Artificial Sequence
  derived and/or modified sequence
atgcaaggggaggatgccaggtatttgaaaaggaaagtgaaaggcggtaacatagacgttcacccctctgagaaggcactgatcgtgcattatgaagtagaagccaccatcctgggagaaatgggggacccaatgctgggtgagaggaaggagtgtcagaagatcatcaggctcaagagcttgaacgctaatacagatatcacatctttagcccgaaaggtcgtggaagaatgcaagctcatccatccatctaagcttaacgaggtcgagcagctactatactacctccagaaccgtcgcgattcccttagtggcaaagagaagaaggagaagtcttcaaaaccgaaagacccgccaccattcgaggggatggaaatcgatgaggtggctaacattaacgacatggatgaatatatcgaacttctgtacgaagacatccctgacaaggtcagaggtagcgcattgatactccagctcgcacggaaccctgataatctggaagaactgcttctcaatgagacagccctgggggctcttgctcgtgtgctaagggaggattggaagcagagcgtggagctggccacaaatatcatttatatatttttctgcttctcctcgtttagccagttccatgggttaattacacactacaagatcggtgctctttgtatgaacatcatcgaccacgagttgaagcgccacgaactgtggcaggaagagctgagcaaaaagaagaaagctgtggacgaggaccccgagaatcagaccctgagaaaggattatgagaaaacattcaaaaagtatcagggtctggtggtgaaacaggaacaactattacgggtcgcactttacctcctactcaacctggccgaggatacacgcacggagctgaagatgcgcaacaagaacatcgttcacatgcttgtgaaagcattagatcgtgataactttgagttgttaattctggttgtcagcttcttgaaaaagctgtctatctttatggaaaataagaatgacatggttgagatggacattgttgaaaaactcgtgaagatgattccctgtgaacatgaggatctgcttaacatcacattacgcctcctactaaatctgtcatttgatactgggttgcgaaacaagatggtgcaggtcggacttctgcctaaacttacagccctcctgggtaatgacaattacaagcagatcgctatgtgtgtgctttaccacatctcaatggacgacagattcaagagcatgtttgcatatacagactgtataccgcaactgatgaagatgctgtttgaatgtagcgacgaacgtattgatctggagctgataagcttttgtatcaacctggcggctaataaacgaaacgttcaactgatttgcgagggtaacggactgaaaatgctgatgaagagggctctgaaattcaaggatcctctacttatgaaaatgattaggaacattagccaacatgatggcccaaccaaaaatctctttatagattacgtgggggatctcgccgcacaaatcagtaacgatgaagaggaagagttcgtaatcgagtgcttggggaccttagccaatctgaccatccctgatctagactgggaattagtccttaaagagtataagctggttccctatttgaaggacaagctcaaaccaggcgctgccgaagatgatttagtgctggaagtcgttatcatgattgggaccgtatcgatggatgactcttgcgccgcattactggcaaaatctgggatcattcccgctctgatcgaactactgaatgcgcaacaggaagatgacgagttcgtgtgccagatcatttacgtgttttaccaaatggtttttcaccaggcaacgcgggacgtcatcatcaaggagacccaggctcccgcatacctaattgatttaatgcacgataagaataatgagatacgcaaagtgtgcgacaacacgcttgacatcatagctgaatacgacgaggaatgggccaaaaagatccagagcgaaaagtttaggtggcacaatagtcagtggctggaaatggtggagtctcgacagatggacgaatcagaacaatacctctatggcgacgatcgaattgagccatacattcacgaaggagacatcctcgaacgtcccgacctcttttataatagtgatggtctgatcgccagtgaaggagccatttctcccgatttctttaatgattaccatctgcaaaatggagacgttgtcgggcagcacagctttcctgggtctctaggcatggatggcttcggacagcccgtcggaatactggggcgaccggcaaccgcttacggattccgacccgacgaaccctattactacggctacggctcatag

SEQ ID NO: 183485 - DNA, 2379 bp, Artificial Sequence
  derived and/or modified sequence
atgcagggcgaggacgccagatacctgaagagaaaggtgaagggcggcaacatcgacgtgcaccccagcgagaaggccctgatcgtgcactacgaggtggaggccaccatcctgggcgagatgggcgaccccatgctgggcgagagaaaggagtgccagaagatcatcagactgaagagcctgaacgccaacaccgacatcaccagcctggccagaaaggtggtggaggagtgcaagctgatccaccccagcaagctgaacgaggtggagcagctgctgtactacctgcagaacagaagagacagcctgagcggcaaggagaagaaggagaagagcagcaagcccaaggaccccccccccttcgagggcatggagatcgacgaggtggccaacatcaacgacatggacgagtacatcgagctgctgtacgaggacatccccgacaaggtgagaggcagcgccctgatcctgcagctggccagaaaccccgacaacctggaggagctgctgctgaacgagaccgccctgggcgccctggccagagtgctgagagaggactggaagcagagcgtggagctggccaccaacatcatctacatcttcttctgcttcagcagcttcagccagttccacggcctgatcacccactacaagatcggcgccctgtgcatgaacatcatcgaccacgagctgaagagacacgagctgtggcaggaggagctgagcaagaagaagaaggccgtggacgaggaccccgagaaccagaccctgagaaaggactacgagaagaccttcaagaagtaccagggcctggtggtgaagcaggagcagctgctgagagtggccctgtacctgctgctgaacctggccgaggacaccagaaccgagctgaagatgagaaacaagaacatcgtgcacatgctggtgaaggccctggacagagacaacttcgagctgctgatcctggtggtgagcttcctgaagaagctgagcatcttcatggagaacaagaacgacatggtggagatggacatcgtggagaagctggtgaagatgatcccctgcgagcacgaggacctgctgaacatcaccctgagactgctgctgaacctgagcttcgacaccggcctgagaaacaagatggtgcaggtgggcctgctgcccaagctgaccgccctgctgggcaacgacaactacaagcagatcgccatgtgcgtgctgtaccacatcagcatggacgacagattcaagagcatgttcgcctacaccgactgcatcccccagctgatgaagatgctgttcgagtgcagcgacgagagaatcgacctggagctgatcagcttctgcatcaacctggccgccaacaagagaaacgtgcagctgatctgcgagggcaacggcctgaagatgctgatgaagagagccctgaagttcaaggaccccctgctgatgaagatgatcagaaacatcagccagcacgacggccccaccaagaacctgttcatcgactacgtgggcgacctggccgcccagatcagcaacgacgaggaggaggagttcgtgatcgagtgcctgggcaccctggccaacctgaccatccccgacctggactgggagctggtgctgaaggagtacaagctggtgccctacctgaaggacaagctgaagcccggcgccgccgaggacgacctggtgctggaggtggtgatcatgatcggcaccgtgagcatggacgacagctgcgccgccctgctggccaagagcggcatcatccccgccctgatcgagctgctgaacgcccagcaggaggacgacgagttcgtgtgccagatcatctacgtgttctaccagatggtgttccaccaggccaccagagacgtgatcatcaaggagacccaggcccccgcctacctgatcgacctgatgcacgacaagaacaacgagatcagaaaggtgtgcgacaacaccctggacatcatcgccgagtacgacgaggagtgggccaagaagatccagagcgagaagttcagatggcacaacagccagtggctggagatggtggagagcagacagatggacgagagcgagcagtacctgtacggcgacgacagaatcgagccctacatccacgagggcgacatcctggagagacccgacctgttctacaacagcgacggcctgatcgccagcgagggcgccatcagccccgacttcttcaacgactaccacctgcagaacggcgacgtggtgggccagcacagcttccccggcagcctgggcatggacggcttcggccagcccgtgggcatcctgggcagacccgccaccgcctacggcttcagacccgacgagccctactactacggctacggcagctag

SEQ ID NO: 183486 - protein, 817 aa, Artificial Sequence
  derived and/or modified sequence
MYGVCGCCGALRPRYKRLVDNIFPEDPEDGLVKTNMEKLTFYALSAPEKLDRIGAYLSERLIRDVGRHRYGYVCIAMEALDQLLMACHCQSINLFVESFLKMVAKLLESEKPNLQILGTNSFVKFANIEEDTPSYHRSYDFFVSRFSEMCHSSHDDLEIKTKIRMSGIKGLQGVVRKTVNDELQANIWDPQHMDKIVPSLLFNLQHVEEAESRSPSPLQAPEKEKESPAELAERCLRELLGRAAFGNIKNAIKPVLIHLDNHSLWEPKVFAIRCFKIIMYSIQPQHSHLVIQQLLGHLDANSRSAATVRAGIVEVLSEAAVIAATGSVGPTVLEMFNTLLRQLRLSIDYALTGSYDGAVSLGTKIIKEHEERMFQEAVIKTVGSFASTLPTYQRSEVILFIMSKVPRPSLHQAVDTGRTGENRNRLTQIMLLKSLLQVSTGFQCNNMMSALPSNFLDRLLSTALMEDAEIRLFVLEILISFIDRHGNRHKFSTISTLSDISVLKLKVDKCSRQDTVFMKKHSQQLYRHIYLSCKEETNVQKHYEALYGLLALISIELANEEVVVDLIRLVLAVQDVAQVNEENLPVYNRCALYALGAAYLNLISQLTTVPAFCQHIHEVIETRKKEAPYMLPEDVFVERPRLSQNLDGVVIELLFRQSKISEVLGGSGYNSDRLCLPYIPQLTDEDRLSKRRSIGETISLQVEVESRNSPEKEERVPAEEITYETLKKAIVDSVAVEEQERERRRQVVEKFQKAPFEEIAAHCGARASLLQSKLNQIFEITIRPPPSPSGTITAAYGQPQNHSIPVYEMKFPDLCVY

SEQ ID NO: 183487 - DNA, 2454 bp, Artificial Sequence
  derived and/or modified sequence
atgtacggcgtgtgcggctgctgcggcgccctgagacccagatacaagagactggtggacaacatcttccccgaggaccccgaggacggcctggtgaagaccaacatggagaagctgaccttctacgccctgagcgcccccgagaagctggacagaatcggcgcctacctgagcgagagactgatcagagacgtgggcagacacagatacggctacgtgtgcatcgccatggaggccctggaccagctgctgatggcctgccactgccagagcatcaacctgttcgtggagagcttcctgaagatggtggccaagctgctggagagcgagaagcccaacctgcagatcctgggcaccaacagcttcgtgaagttcgccaacatcgaggaggacacccccagctaccacagaagctacgacttcttcgtgagcagattcagcgagatgtgccacagcagccacgacgacctggagatcaagaccaagatcagaatgagcggcatcaagggcctgcagggcgtggtgagaaagaccgtgaacgacgagctgcaggccaacatctgggacccccagcacatggacaagatcgtgcccagcctgctgttcaacctgcagcacgtggaggaggccgagagcagaagccccagccccctgcaggcccccgagaaggagaaggagagccccgccgagctggccgagagatgcctgagagagctgctgggcagagccgccttcggcaacatcaagaacgccatcaagcccgtgctgatccacctggacaaccacagcctgtgggagcccaaggtgttcgccatcagatgcttcaagatcatcatgtacagcatccagccccagcacagccacctggtgatccagcagctgctgggccacctggacgccaacagcagaagcgccgccaccgtgagagccggcatcgtggaggtgctgagcgaggccgccgtgatcgccgccaccggcagcgtgggccccaccgtgctggagatgttcaacaccctgctgagacagctgagactgagcatcgactacgccctgaccggcagctacgacggcgccgtgagcctgggcaccaagatcatcaaggagcacgaggagagaatgttccaggaggccgtgatcaagaccgtgggcagcttcgccagcaccctgcccacctaccagagaagcgaggtgatcctgttcatcatgagcaaggtgcccagacccagcctgcaccaggccgtggacaccggcagaaccggcgagaacagaaacagactgacccagatcatgctgctgaagagcctgctgcaggtgagcaccggcttccagtgcaacaacatgatgagcgccctgcccagcaacttcctggacagactgctgagcaccgccctgatggaggacgccgagatcagactgttcgtgctggagatcctgatcagcttcatcgacagacacggcaacagacacaagttcagcaccatcagcaccctgagcgacatcagcgtgctgaagctgaaggtggacaagtgcagcagacaggacaccgtgttcatgaagaagcacagccagcagctgtacagacacatctacctgagctgcaaggaggagaccaacgtgcagaagcactacgaggccctgtacggcctgctggccctgatcagcatcgagctggccaacgaggaggtggtggtggacctgatcagactggtgctggccgtgcaggacgtggcccaggtgaacgaggagaacctgcccgtgtacaacagatgcgccctgtacgccctgggcgccgcctacctgaacctgatcagccagctgaccaccgtgcccgccttctgccagcacatccacgaggtgatcgagaccagaaagaaggaggccccctacatgctgcccgaggacgtgttcgtggagagacccagactgagccagaacctggacggcgtggtgatcgagctgctgttcagacagagcaagatcagcgaggtgctgggcggcagcggctacaacagcgacagactgtgcctgccctacatcccccagctgaccgacgaggacagactgagcaagagaagaagcatcggcgagaccatcagcctgcaggtggaggtggagagcagaaacagccccgagaaggaggagagagtgcccgccgaggagatcacctacgagaccctgaagaaggccatcgtggacagcgtggccgtggaggagcaggagagagagagaagaagacaggtggtggagaagttccagaaggcccccttcgaggagatcgccgcccactgcggcgccagagccagcctgctgcagagcaagctgaaccagatcttcgagatcaccatcagacccccccccagccccagcggcaccatcaccgccgcctacggccagccccagaaccacagcatccccgtgtacgagatgaagttccccgacctgtgcgtgtactag

SEQ ID NO: 183488 - DNA, 2349 bp, Artificial Sequence
  derived and/or modified sequence
atggagaagctgaccttctacgccctgagcgcccccgagaagctggacagaatcggcgcctacctgagcgagagactgatcagagacgtgggcagacacagatacggctacgtgtgcatcgccatggaggccctggaccagctgctgatggcctgccactgccagagcatcaacctgttcgtggagagcttcctgaagatggtggccaagctgctggagagcgagaagcccaacctgcagatcctgggcaccaacagcttcgtgaagttcgccaacatcgaggaggacacccccagctaccacagaagctacgacttcttcgtgagcagattcagcgagatgtgccacagcagccacgacgacctggagatcaagaccaagatcagaatgagcggcatcaagggcctgcagggcgtggtgagaaagaccgtgaacgacgagctgcaggccaacatctgggacccccagcacatggacaagatcgtgcccagcctgctgttcaacctgcagcacgtggaggaggccgagagcagaagccccagccccctgcaggcccccgagaaggagaaggagagccccgccgagctggccgagagatgcctgagagagctgctgggcagagccgccttcggcaacatcaagaacgccatcaagcccgtgctgatccacctggacaaccacagcctgtgggagcccaaggtgttcgccatcagatgcttcaagatcatcatgtacagcatccagccccagcacagccacctggtgatccagcagctgctgggccacctggacgccaacagcagaagcgccgccaccgtgagagccggcatcgtggaggtgctgagcgaggccgccgtgatcgccgccaccggcagcgtgggccccaccgtgctggagatgttcaacaccctgctgagacagctgagactgagcatcgactacgccctgaccggcagctacgacggcgccgtgagcctgggcaccaagatcatcaaggagcacgaggagagaatgttccaggaggccgtgatcaagaccgtgggcagcttcgccagcaccctgcccacctaccagagaagcgaggtgatcctgttcatcatgagcaaggtgcccagacccagcctgcaccaggccgtggacaccggcagaaccggcgagaacagaaacagactgacccagatcatgctgctgaagagcctgctgcaggtgagcaccggcttccagtgcaacaacatgatgagcgccctgcccagcaacttcctggacagactgctgagcaccgccctgatggaggacgccgagatcagactgttcgtgctggagatcctgatcagcttcatcgacagacacggcaacagacacaagttcagcaccatcagcaccctgagcgacatcagcgtgctgaagctgaaggtggacaagtgcagcagacaggacaccgtgttcatgaagaagcacagccagcagctgtacagacacatctacctgagctgcaaggaggagaccaacgtgcagaagcactacgaggccctgtacggcctgctggccctgatcagcatcgagctggccaacgaggaggtggtggtggacctgatcagactggtgctggccgtgcaggacgtggcccaggtgaacgaggagaacctgcccgtgtacaacagatgcgccctgtacgccctgggcgccgcctacctgaacctgatcagccagctgaccaccgtgcccgccttctgccagcacatccacgaggtgatcgagaccagaaagaaggaggccccctacatgctgcccgaggacgtgttcgtggagagacccagactgagccagaacctggacggcgtggtgatcgagctgctgttcagacagagcaagatcagcgaggtgctgggcggcagcggctacaacagcgacagactgtgcctgccctacatcccccagctgaccgacgaggacagactgagcaagagaagaagcatcggcgagaccatcagcctgcaggtggaggtggagagcagaaacagccccgagaaggaggagagagtgcccgccgaggagatcacctacgagaccctgaagaaggccatcgtggacagcgtggccgtggaggagcaggagagagagagaagaagacaggtggtggagaagttccagaaggcccccttcgaggagatcgccgcccactgcggcgccagagccagcctgctgcagagcaagctgaaccagatcttcgagatcaccatcagacccccccccagccccagcggcaccatcaccgccgcctacggccagccccagaaccacagcatccccgtgtacgagatgaagttccccgacctgtgcgtgtactag

SEQ ID NO: 183489 - DNA, 2454 bp, Artificial Sequence
  derived and/or modified sequence
atgtacggagtttgcggctgttgcggagctctgagaccacggtataagagattagtcgataatatctttcctgaggaccccgaggatggtctcgtcaaaactaatatggagaaactgaccttttatgcattgtcagcgcctgaaaaattggaccgcatcggagcctatctgagcgagcggctgatccgcgatgttggccgccaccgctatgggtatgtgtgcatcgccatggaagcccttgatcagctcttgatggcttgtcattgtcagtccatcaatctctttgtcgaatcattcctgaaaatggtcgctaagctcctggagtctgaaaaaccaaaccttcagatcctcgggaccaacagctttgtaaagttcgcaaacatcgaggaagatactccttcttaccacaggagctacgactttttcgtctctcggttttctgaaatgtgtcattctagccacgatgatctcgagattaagacaaaaatacgcatgtccggtatcaaaggtctccagggggtggtgcgcaaaactgtcaacgacgagctccaggcaaacatctgggacccacagcatatggataagattgttcccagccttctgtttaatctgcagcatgttgaggaggccgaatccagaagcccaagtccgctgcaggctcctgagaaggagaaagagtcgcccgctgagcttgccgaacgttgtctccgagagctgcttggtcgggccgccttcggaaatatcaaaaatgctattaagcctgtactgattcacctggataatcatagtctgtgggagccaaaagtgttcgcaatacgctgtttcaagatcattatgtacagcatccagccacaacacagccacctggtcatccagcagttgctgggccacctggatgccaacagtcgctccgctgccacggttcgagctggaatagtcgaggttttatcagaggctgccgtcatcgcagccaccgggtccgtgggacctactgtgcttgaaatgtttaacacattgctgaggcaactgcggctatcgatcgattatgccctaaccggttcctacgacggcgccgtgagtctaggaacgaaaatcataaaggagcacgaagaacgaatgtttcaagaggctgtgattaaaacagtaggttcgtttgcgtccacgcttcctacgtaccagcggagcgaggtgattttgttcatcatgagtaaggttcccagaccatctctgcaccaggctgtggatacgggaaggaccggagaaaatcggaacagactcacccagatcatgctcctaaaatcacttctgcaggtcagtacaggattccagtgcaacaacatgatgagtgccctgcccagtaacttcctggataggctgctttccactgctctgatggaggatgctgagatcagattgttcgtgctcgagatcctgatatcatttatcgatagacatggcaatagacacaaattctcaacaatctctactctgagcgacatctctgttctgaagttgaaagtggacaagtgctcccgtcaagacactgtttttatgaagaaacacagccagcagctttacaggcacatttatctaagttgtaaagaggaaaccaatgtgcagaagcattacgaagccctgtatggattgctcgctctcatatctatagaactcgccaacgaggaagtggtggttgacttgattaggctggttctggctgtgcaggacgtggcccaggtgaatgaagaaaatttgcccgtgtacaacaggtgtgctttgtacgcactgggcgcagcctatcttaacttgatttctcagctgactacagtgcccgccttttgccaacatatccacgaagtgatcgaaacgaggaagaaggaagcaccttacatgttgcctgaggatgtgtttgtggagaggccgcggctgagtcagaatctagacggcgtagtcatagagctactattcagacagagcaagatttcagaggtactcggcggcagcggatacaactctgatcgcctctgcctgccctatatcccccagttgacagatgaggataggctttcgaagcggcggagcatcggtgagacaatctcactgcaggtggaagtggaaagcaggaatagtcccgaaaaagaggaacgggtccctgccgaggaaatcacttatgagactctgaaaaaggctatcgtggactccgtggctgttgaggaacaggaaagggagcgccggaggcaggtggtggaaaagttccagaaagccccctttgaagaaattgcggctcactgtggggctcgggcaagcttgctacagagtaaattgaatcagatctttgaaatcacgatacgccctccgccgagcccttccgggacgatcacagcggcatacggtcagccgcagaaccatagtatccccgtgtacgaaatgaaatttccagatctctgcgtctactag

SEQ ID NO: 183490 - DNA, 2349 bp, Artificial Sequence
  derived and/or modified sequence
atggagaaactgacgttttacgccctgtctgctcctgagaagctcgaccgtatcggagcttatttgtcagaaaggctcatccgcgacgttgggcggcacaggtacggctacgtctgtatcgcgatggaggccctggatcagttgttaatggcctgtcactgccagagcatcaacctttttgtggaatcattccttaagatggtagctaaattgctggagagcgagaagcccaatttgcaaatactgggtaccaacagtttcgtgaagttcgcaaatattgaggaggacactccgtcttatcacaggtcttatgatttcttcgtttccagattcagcgagatgtgtcactcaagccatgacgacctggaaataaaaacgaaaatccgcatgagcggaatcaaaggattgcagggcgtcgtgcgaaaaacggtgaacgatgagctccaagctaacatctgggacccacaacacatggataagatcgtgccttccctgttgtttaacttgcagcatgtcgaagaggccgagtctcggtctcccagtcccttgcaggcgccggaaaaagagaaggaatccccagccgagctcgcagagaggtgcctcagagagttacttggtcgtgccgcctttggcaacattaagaatgcaatcaaacctgtcttgattcatctggacaatcactctctgtgggaacccaaggtctttgcaattcgctgcttcaagattatcatgtactccattcagccccagcattcgcacctggtaattcagcagctgttggggcacctggacgccaatagccgatccgccgctacggtacgggcggggattgtggaggtgttatccgaagctgcggtcatcgccgccacagggtctgtcgggccaactgtactggagatgtttaataccttgctgaggcaactgaggctctccattgactacgccttgacaggcagttatgatggtgccgtatctctcggtaccaaaattatcaaggagcatgaggagagaatgttccaagaggccgtaatcaagactgtaggttctttcgccagtacactgccgacataccagcgtagtgaggtgatcctttttatcatgtctaaggtgccgcgcccgtcgctccaccaggcggtagacaccgggaggaccggcgagaatcgcaatcgactcacccagatcatgctgctaaaaagtctgcttcaggtgagcacggggtttcaatgtaacaatatgatgtccgccctgcccagcaacttcctggacagacttctgagcactgccctcatggaggatgccgaaatcagactcttcgttctggaaatactgatctcattcatagaccgccacggcaataggcacaagttttcgactatttctaccctgagtgacatatctgtgttaaaattgaaggtagataaatgctcaagacaggacacggtgttcatgaaaaaacacagccagcagctatatagacacatctatctgagttgtaaggaggaaaccaacgttcaaaagcattacgaggcattatacggcctcttggccctcatcagtatagagcttgcaaatgaggaagtggtagtagatctcattcgacttgtgcttgcagtccaggacgtggcacaagtcaacgaagaaaacctccccgtgtacaatcgttgtgctttgtatgccctgggggcagcgtacctcaatctgatcagccagcttacaactgttccagccttttgtcagcacattcatgaggttattgagactcgcaaaaaagaggccccatacatgctccccgaagacgtgttcgtggaaaggccccgcctgagccagaaccttgacggcgtggtgattgaactgttgtttcgtcaatccaaaatctcagaggtgcttggtgggtccgggtataacagtgatcgcttgtgtctgccatatataccacagctcactgacgaagaccggctgtctaagcgccgaagtatcggagaaactatcagtttacaagtggaggtggagagccgaaactcacccgagaaggaggagagggttccagctgaggagattacctacgagacactgaaaaaggcaatcgttgacagcgtggcagtggaagagcaggagagggagagacggcgacaagtcgtggagaagttccagaaagctccatttgaggagattgcggctcattgtggagcgcgggctagcctcctgcagtccaaactgaatcagatcttcgaaattaccatccgacctcccccctccccatccggcacaatcactgccgcgtacggacaaccccagaatcacagcatcccagtctacgagatgaaattccccgacctctgtgtgtactag

SEQ ID NO: 183491 - DNA, 3671 bp, Artificial Sequence
  derived and/or modified sequence
gctggcggcgcccggctccgtcctgcccgcggccggcccccgcgtctgctccctccccgcccgggcccctgtcggccgccgccagtccccgccccgactgtgaatgaaaggcgggcgccgccgagggctggctgggaacgccgcagcgacgccggcctctcgagaggcgcgcgccccgccgagatgtacggtgtgtgtggctgctgtggtgccctacgccccaggtacaaaaggctggttgacaacatcttccctgaggatcccgaggatggtctggtgaagaccaacatggagaagctgaccttctatgccctctcagctccagaaaaacttgatcgtattggcgcctacctctctgagaggctcatccgtgacgtgggtcgccatcgatatgggtacgtgtgcattgctatggaggctttggaccagctgctcatggcctgccactgccagagcatcaacctcttcgtggagagcttcctcaagatggtggccaagctgctggagtcagagaaacccaacctgcagatcctcggcaccaactcgtttgtgaagtttgccaacatcgaggaggacaccccgtcctatcaccggagctatgacttctttgtgtcccgattcagtgaaatgtgccactcgagccatgatgacttagaaatcaagaccaaaattcgaatgtcaggcatcaaaggcctgcaaggggtggtgaggaagacggtgaatgatgaactgcaggccaatatctgggacccacagcacatggataagatcgttccatcactgcttttcaatctacagcatgtagaggaggcagagagccggtctccctcacccctccaagcacctgagaaggagaaagagagccccgcggagctggctgagaggtgtcttcgggagctgctgggccgggctgcctttggcaacatcaaaaacgccatcaagcctgttctcatccatctggataaccattctctttgggaacccaaggtgtttgccatccgttgctttaaaatcatcatgtactcaattcagccgcagcactcacacctggtcatccagcagctcctgggccacctggacgccaacagccgcagcgctgcgacggtgcgcgcgggcatcgtggaagtcttgtcggaagccgcggtcatcgctgccaccggctctgtggggcccacagtactggagatgttcaacacgctgctgaggcagctgcggctcagcatcgactacgcgctgaccgggagctacgacggggcggtcagcctcggcaccaagatcatcaaggagcacgaggagcgcatgttccaggaggccgtcatcaagaccgtgggctcctttgccagcacgctgcccacctaccagcgctccgaggtgatcctcttcatcatgagcaaggtcccgcggccatccctgcaccaggcggtggacacaggcaggacgggggagaataggaaccgtctgacccagattatgctgctaaaatccctcctgcaggtatccacaggtttccagtgcaacaacatgatgtcagccctgcctagcaacttcctggaccgccttctctccaccgccctcatggaggatgcagaaattcgactctttgttctagagattctcatcagtttcattgatcgtcatggcaaccgccacaagttctctaccatcagtaccctcagtgacatctctgtcctgaagctgaaagtggacaagtgctctcgacaggacaccgtcttcatgaagaagcactcccagcagctctacagacacatctacctgagctgcaaggaggaaacaaacgtgcagaaacactacgaggcgctctatggcttgctggccctcatcagcatcgagctggctaacgaggaggtggtggtggacctcatccgtctggtgctggctgttcaggacgtggcccaagtcaatgaggagaacttgcctgtctacaaccgctgtgccctctatgctctgggcgcagcctacctgaacctcatcagtcagctcacaacagtgcctgccttctgccagcacatccatgaggtgatagagaccaggaagaaagaggctccatacatgctccccgaggatgtgtttgtggagaggcccaggctgtctcagaatcttgatggggtggtcattgagctcctcttccgccagagcaagatcagtgaagtcctgggaggcagtggctacaactcggaccggctctgcctgccctacattcctcagctgacagatgaggatcgtttatccaagaggaggagcattggagagaccatctccctgcaggtggaggtagaatcgaggaacagtccggagaaggaggagcgagtgcctgccgaggagatcacctatgagacactgaagaaagccattgtggacagcgtagcagtggaggagcaggagcgtgagcggcggcggcaggtggtggagaagttccagaaggcacccttcgaggagattgctgcacactgcggggcccgggcatcgctgctccagagcaaactcaatcagatctttgaaatcaccatccggcccccaccaagcccatcaggaaccatcactgcagcctacggtcagccgcagaaccactccatccccgtctatgaaatgaagtttcccgatctgtgtgtatactgaattccaagagcctgagctcctcaaggagatggggtctgaggaggggctcacctcacgcccaccccgaccacatggagatctggctgtgatctctgagaaaacatcaccttagatggcagcgcctcccaggctaagccaaggtggagactctctggtccttcttggccctcctacctcctcctcgtcttccctgagggaggtctcaccaatcagcatctcacctgtgccctctttgtcttctcttgtgtcagccaggggcagagaatcatggggtgtctctcaggagaagccggggggagggggctgagaagctcctacttggtgttttgagtgaagggcatgtcctccccagaggacggagctggatggagacttggttggtgagaggaagctaaggactctactcccctggggaaggaagctgagatggggatggctctctcctccccagcactccccctgctccccgcccatgtccctgctgtgtctctcactctcttgctcatctcccagttgtctgttcatgtttctttctactattaatgaatgctgagcccttataacaggagctggggtggagacatcacgaggggtcgggggacagcaaagggcaggaagcaggatgcagggctggcaggaggtgggcctgtggcatcagcaggcccagcgggcgagtgtggtccctgcagcagcttcccacctcctttgttcataaggagcttgtgttggcctcccacagtcctgtctgctggacgtttttcagagttgggttctctctctttgatgtctttcttctgagggtcccaaggtgttcctggagcttctgggttgaggaaaggcagagcaagataatcttggaggggaactacagggtccccaagatttgcccacatcacctcctatggaaaaggctcccagcctgacctgggttgtaggagagtggggagggtgggatgagtggtgttttggggctcaaggatatcagaagccaactttttggatgttccgtttgaagaaagaaggatctaacacct

SEQ ID NO: 183492 - DNA, 3635 bp, Artificial Sequence
  derived and/or modified sequence
gtgcgcgcgcgtctgcgctgcgaggacaaagatgcctcgggccggggaccctggggtcctctccaggcccggcgcgtgccggtgctgggcggtggtccttcggggggcggaggctcaggggaaagcgggtctcccggagccgagcagaccgggagtgctggaggaggtggtcgtgtggcagcatttgcggaattaacaaaagcggtgtgtgtggctgctgtggtgccctacgccccaggtacaaaaggctggttgacaacatcttccctgaggatcccgaggatggtctggtgaagaccaacatggagaagctgaccttctatgccctctcagctccagaaaaacttgatcgtattggcgcctacctctctgagaggctcatccgtgacgtgggtcgccatcgatatgggtacgtgtgcattgctatggaggctttggaccagctgctcatggcctgccactgccagagcatcaacctcttcgtggagagcttcctcaagatggtggccaagctgctggagtcagagaaacccaacctgcagatcctcggcaccaactcgtttgtgaagtttgccaacatcgaggaggacaccccgtcctatcaccggagctatgacttctttgtgtcccgattcagtgaaatgtgccactcgagccatgatgacttagaaatcaagaccaaaattcgaatgtcaggcatcaaaggcctgcaaggggtggtgaggaagacggtgaatgatgaactgcaggccaatatctgggacccacagcacatggataagatcgttccatcactgcttttcaatctacagcatgtagaggaggcagagagccggtctccctcacccctccaagcacctgagaaggagaaagagagccccgcggagctggctgagaggtgtcttcgggagctgctgggccgggctgcctttggcaacatcaaaaacgccatcaagcctgttctcatccatctggataaccattctctttgggaacccaaggtgtttgccatccgttgctttaaaatcatcatgtactcaattcagccgcagcactcacacctggtcatccagcagctcctgggccacctggacgccaacagccgcagcgctgcgacggtgcgcgcgggcatcgtggaagtcttgtcggaagccgcggtcatcgctgccaccggctctgtggggcccacagtactggagatgttcaacacgctgctgaggcagctgcggctcagcatcgactacgcgctgaccgggagctacgacggggcggtcagcctcggcaccaagatcatcaaggagcacgaggagcgcatgttccaggaggccgtcatcaagaccgtgggctcctttgccagcacgctgcccacctaccagcgctccgaggtgatcctcttcatcatgagcaaggtcccgcggccatccctgcaccaggcggtggacacaggcaggacgggggagaataggaaccgtctgacccagattatgctgctaaaatccctcctgcaggtatccacaggtttccagtgcaacaacatgatgtcagccctgcctagcaacttcctggaccgccttctctccaccgccctcatggaggatgcagaaattcgactctttgttctagagattctcatcagtttcattgatcgtcatggcaaccgccacaagttctctaccatcagtaccctcagtgacatctctgtcctgaagctgaaagtggacaagtgctctcgacaggacaccgtcttcatgaagaagcactcccagcagctctacagacacatctacctgagctgcaaggaggaaacaaacgtgcagaaacactacgaggcgctctatggcttgctggccctcatcagcatcgagctggctaacgaggaggtggtggtggacctcatccgtctggtgctggctgttcaggacgtggcccaagtcaatgaggagaacttgcctgtctacaaccgctgtgccctctatgctctgggcgcagcctacctgaacctcatcagtcagctcacaacagtgcctgccttctgccagcacatccatgaggtgatagagaccaggaagaaagaggctccatacatgctccccgaggatgtgtttgtggagaggcccaggctgtctcagaatcttgatggggtggtcattgagctcctcttccgccagagcaagatcagtgaagtcctgggaggcagtggctacaactcggaccggctctgcctgccctacattcctcagctgacagatgaggatcgtttatccaagaggaggagcattggagagaccatctccctgcaggtggaggtagaatcgaggaacagtccggagaaggaggagcgagtgcctgccgaggagatcacctatgagacactgaagaaagccattgtggacagcgtagcagtggaggagcaggagcgtgagcggcggcggcaggtggtggagaagttccagaaggcacccttcgaggagattgctgcacactgcggggcccgggcatcgctgctccagagcaaactcaatcagatctttgaaatcaccatccggcccccaccaagcccatcaggaaccatcactgcagcctacggtcagccgcagaaccactccatccccgtctatgaaatgaagtttcccgatctgtgtgtatactgaattccaagagcctgagctcctcaaggagatggggtctgaggaggggctcacctcacgcccaccccgaccacatggagatctggctgtgatctctgagaaaacatcaccttagatggcagcgcctcccaggctaagccaaggtggagactctctggtccttcttggccctcctacctcctcctcgtcttccctgagggaggtctcaccaatcagcatctcacctgtgccctctttgtcttctcttgtgtcagccaggggcagagaatcatggggtgtctctcaggagaagccggggggagggggctgagaagctcctacttggtgttttgagtgaagggcatgtcctccccagaggacggagctggatggagacttggttggtgagaggaagctaaggactctactccccctgctccccgcccatgtccctgctgtgtctctcactctcttgctcatctcccagttgtctgttcatgtttctttctactattaatgaatgctgagcccttataacaggagctggggtggagacatcacgaggggtcgggggacagcaaagggcaggaagcaggatgcagggctggcaggaggtgggcctgtggcatcagcaggcccagcgggcgagtgtggtccctgcagcagcttcccacctcctttgttcataaggagcttgtgttggcctcccacagtcctgtctgctggacgtttttcagagttgggttctctctctttgatgtctttcttctgagggtcccaaggtgttcctggagcttctgggttgaggaaaggcagagcaagataatcttggaggggaactacagggtccccaagatttgcccacatcacctcctatggaaaaggctcccagcctgacctgggttgtaggagagtggggagggtgggatgagtggtgttttggggctcaaggatatcagaagccaactttttggatgttccgtttgaagaaagaaggatctaacacct

SEQ ID NO: 183493 - DNA, 2454 bp, Artificial Sequence
  derived and/or modified sequence
atgtatggagtgtgtggctgctgcggggccctgcggccccgctacaagaggctggtggacaacatcttcccagaagatcctgaagatggcctggtgaagaccaacatggagaagctgaccttctacgccctgagcgcccctgagaagctggacagaattggagcctacctgtctgagcggctcatcagagatgtgggccgccacagatatggctacgtgtgcatcgccatggaggccctggaccagctgctgatggcctgccactgccagagcatcaacctgtttgtggagagcttcctgaagatggtggccaagctgctggagagcgagaagcccaacctgcagatcctgggcaccaacagctttgtgaagtttgccaacatcgaggaggacacccccagctaccacaggagctatgacttctttgtgagccgcttcagcgagatgtgccacagcagccatgatgacctggagatcaagaccaagatccgcatgagcggcatcaagggcctgcagggcgtggtgaggaagacagtgaatgatgagctgcaggccaacatctgggacccccagcacatggacaagatcgtgcccagcctgctcttcaacctgcagcacgtggaggaggccgagagccgcagccccagccccctgcaggcccctgagaaggagaaggagagccctgctgagctggccgagcgctgcctgcgggagctgctgggccgggccgcctttggaaacatcaagaatgccatcaagcctgtgctgatccacctggacaaccacagcctgtgggagcccaaggtgtttgccatccgctgcttcaagatcatcatgtacagcatccagccccagcacagccacctggtgatccagcagctgctgggccacctggatgccaacagccgctctgctgccaccgtgcgggccggcatcgtggaggtgctgtctgaggccgctgtgattgctgccactggatctgtgggccccaccgtgctggagatgttcaacaccctgctgcggcagctgcggctgagcattgattatgccctgaccggcagctatgatggagctgtgtccctgggcaccaagatcatcaaggagcacgaggagaggatgttccaggaggccgtcatcaagacagtgggcagctttgccagcaccctgcccacctaccagaggtctgaggtgatcctcttcatcatgagcaaggtgccccggcccagcctgcaccaggccgtggacaccggccgcactggagaaaatagaaaccggctgacccagatcatgctgctgaagagcctgctgcaggtgtccacaggcttccagtgcaacaacatgatgtctgccctgcccagcaacttcctggaccggctgctgagcacagccctgatggaggatgctgagatccggctgtttgtgctggagatcctgatctccttcatcgacagacatggcaacagacacaagttcagcaccatcagcaccctgagtgacatctctgtgctgaagctgaaggtggacaagtgcagccggcaggacacagtgttcatgaagaagcacagccagcagctgtaccgccacatctacctgagctgcaaggaggagaccaacgtgcagaagcactatgaggccctgtatggcctgctggccctgatcagcattgagctggccaatgaggaggtggtggtggacctgatccggctggtgctggccgtgcaggatgtggcccaggtgaatgaggagaacctgcctgtgtacaacagatgtgccctgtatgccctgggcgccgcctacctgaacctgatcagccagctgaccaccgtgcctgccttctgccagcacatccatgaagtcatcgagaccaggaagaaggaggccccctacatgctgcctgaagatgtgtttgtggagcggccccggctgagccagaacctggatggagtggtgattgagctgctcttccggcagagcaagatcagcgaggtgctgggcggcagcggctacaacagcgaccggctgtgcctgccctacatcccccagctgacagatgaagatcggctgagcaagagaagaagcatcggggagaccatcagcctgcaggtggaggtggagagcaggaacagccctgagaaggaggagcgggtgcctgctgaggagatcacctatgagaccctgaagaaggccatcgtggacagcgtggccgtggaggagcaggagcgggagcggcggcggcaggtggtggagaagttccagaaggccccctttgaggagattgctgcccactgtggggcccgggccagcctgctgcagagcaagctgaaccagatctttgagatcaccatccggcccccacccagccccagcggcaccatcacagctgcctacggccagccccagaaccacagcatccctgtgtatgagatgaagttcccagacctgtgtgtgtactag

SEQ ID NO: 183494 - DNA, 2349 bp, Artificial Sequence
  derived and/or modified sequence
atggagaagctgaccttctacgccctgagcgcccctgagaagctggaccgcatcggggcctacctgtctgagcggctcatcagagatgtgggccgccacagatatggctacgtgtgcatcgccatggaggccctggaccagctgctgatggcctgccactgccagagcatcaacctgtttgtggagagcttcctgaagatggtggccaagctgctggagagcgagaagcccaacctgcagatcctgggcaccaacagctttgtgaagtttgccaacatcgaggaggacacccccagctaccacaggagctatgacttctttgtgagccgcttcagcgagatgtgccacagcagccatgatgacctggagatcaagaccaagatccgcatgagcggcatcaagggcctgcagggcgtggtgaggaagacagtgaatgatgagctgcaggccaacatctgggacccccagcacatggacaagatcgtgcccagcctgctcttcaacctgcagcacgtggaggaggccgagagccgcagccccagccccctgcaggcccctgagaaggagaaggagagccctgctgagctggccgagcgctgcctgcgggagctgctgggccgggccgccttcggcaacatcaagaatgccatcaagcctgtgctgatccacctggacaaccacagcctgtgggagcccaaggtgtttgccatccgctgcttcaagatcatcatgtacagcatccagccccagcacagccacctggtgatccagcagctgctgggccacctggatgccaacagccgctctgctgccaccgtgcgggccggcatcgtggaggtgctgtctgaggccgctgtgattgctgccaccggctctgtgggccccaccgtgctggagatgttcaacaccctgctgcggcagctgcggctgagcattgattatgccctgaccggcagctatgatggagctgtgtccctgggcaccaagatcatcaaggagcacgaggagaggatgttccaggaggccgtcatcaagacagtgggcagctttgccagcaccctgcccacctaccagaggtctgaggtgatcctcttcatcatgagcaaggtgccccggcccagcctgcaccaggccgtggacaccggccgcactggagagaacagaaaccggctgacccagatcatgctgctgaagagcctgctgcaggtgtccacaggcttccagtgcaacaacatgatgtctgccctgcccagcaacttcctggaccggctgctgagcacagccctgatggaggatgctgagatccggctgtttgtgctggagatcctgatctccttcatcgacagacatggcaacagacacaagttcagcaccatcagcaccctgagtgacatctctgtgctgaagctgaaggtggacaagtgcagccggcaggacaccgtcttcatgaagaagcacagccagcagctgtaccgccacatctacctgagctgcaaggaggagaccaacgtgcagaagcactatgaggccctgtatggcctgctggccctgatcagcattgagctggccaatgaggaggtggtggtggacctgatccggctggtgctggccgtgcaggatgtggcccaggtgaatgaggagaacctgcctgtgtacaacagatgtgccctgtatgccctgggcgccgcctacctgaacctgatcagccagctgaccaccgtgcctgccttctgccagcacatccacgaggtgattgagaccaggaagaaggaggccccctacatgctgcctgaagatgtgtttgtggagcggccccggctgagccagaacctggatggagtggtgattgagctgctcttccggcagagcaagatcagcgaggtgctgggcggcagcggctacaacagcgaccggctgtgcctgccctacatcccccagctgacagatgaggaccggctgagcaagaggaggagcattggagagaccatcagcctgcaggtggaggtggagagcaggaacagccctgagaaggaggagcgggtgcctgctgaggagatcacctatgagaccctgaagaaggccatcgtggacagcgtggccgtggaggagcaggagcgggagcggcggcggcaggtggtggagaagttccagaaggccccctttgaggagattgctgcccactgtggggcccgggccagcctgctgcagagcaagctgaaccagatctttgagatcaccatccggcccccacccagccccagcggcaccatcacagctgcctacggccagccccagaaccacagcatccctgtgtatgagatgaagttcccagacctgtgtgtgtactag

SEQ ID NO: 183495 - DNA, 2454 bp, Artificial Sequence
  derived and/or modified sequence
atgtacggcgtgtgcggctgctgcggcgccctgcggccccggtacaaacgactggtcgataacatttttcccgaggacccagaagatggccttgtaaagaccaatatggagaaattaacattctacgccctatccgcgccagagaaattggatcggataggggcatacttgagcgagcgacttatccgggatgtcggacgccaccgctacggatatgtttgtatcgctatggaggccttagatcagctgttaatggcctgtcactgtcagagcatcaatttattcgtcgaaagcttcctaaagatggtggcgaagctgctcgaatccgagaaaccgaatctgcagattttgggcacaaattctttcgtgaaattcgcaaatatcgaggaggacacaccatcctaccataggtcctacgatttttttgtgagcagattctcagaaatgtgccactcttctcacgatgacctggagattaaaacaaagatccggatgtcaggaattaagggactccagggggtggtgcgcaagaccgtcaacgatgagctgcaggccaatatttgggatcctcagcacatggataagatcgtcccatccctccttttcaatctccagcacgttgaggaggcagaatccagatcacccagtccactacaggcgcccgagaaggaaaaggaaagcccagcagaactcgctgagcggtgcctaagagaactactcggccgggcagcgtttggcaatattaaaaacgcgatcaaacctgtgttgatacacctcgataatcacagtctttgggaaccaaaggtctttgcgatacgatgtttcaagatcatcatgtatagcatccagccccagcacagccaccttgtgatacagcagcttctggggcacctcgacgctaattcaagatctgctgcgacagttagagcagggattgtagaggtgctttctgaggccgcggtcatcgccgctactggctccgttgggcccacagtgctagagatgttcaatacactgcttagacagctgaggctgagtattgactatgccctaacaggaagctatgacggtgctgtatctttaggaaccaagattattaaagagcatgaggagagaatgtttcaggaggccgttatcaaaacagtcggtagcttcgctagtacccttccaacctatcagagaagtgaggtgattctgttcattatgagcaaggtccctcgcccctctttgcaccaggctgtggatacagggaggactggcgaaaaccggaataggctgactcagatcatgcttctcaaatcactgttgcaggtcagcaccggctttcagtgtaacaatatgatgtcagccctgcctagcaattttctggaccgtttgctttcaacagccttaatggaggatgcagagatccgactcttcgtgctggaaatcctgatcagcttcatcgatagacacggcaaccgccacaaattctctactatctcaaccctaagtgacatcagcgtgttgaaactgaaagtggacaaatgtagccgccaggacacagtctttatgaaaaagcactcccaacagctgtatcgccacatctacttgagctgcaaggaagagacaaacgttcagaaacattatgaggccctctatggcctcctggctctcatctctatagagctcgccaatgaggaggtggttgtggatctgatcagattggtgctcgctgtccaggatgtggcacaagtgaatgaggagaatctgcccgtgtataacaggtgtgcgctgtacgctctgggagctgcctacctgaacctgatcagtcaattaaccacagtaccagcgttctgccagcacatccatgaggtcatcgagacccgcaagaaagaggccccctatatgctcccagaggatgtgttcgtagagcggccacggctgtcacagaatttggatggagtggtcatagagctgctcttcagacagtctaagataagtgaagtgctaggtggaagcggatataacagcgatcgtctctgtctgccctacattccacagttgacggacgaagatagactctcaaagagaagatccattggtgaaaccatctctctgcaggtcgaagtggagtcccgaaattcaccagagaaggaagagagagtgccagctgaggaaatcacatacgaaaccttgaaaaaagccatcgtggactcggtagcagtcgaggagcaagaaagagaacgaagacgccaggtggtagaaaaatttcagaaggctcctttcgaagaaatagccgctcattgcggggctagagcgtcgctcttgcagtcaaagttaaaccaaatctttgaaataaccattcgcccacctcctagcccaagtgggacgattaccgcagcctacggccagcctcagaaccactctatacctgtgtatgaaatgaagtttcccgatctatgcgtatactag

SEQ ID NO: 183496 - DNA, 2349 bp, Artificial Sequence
  derived and/or modified sequence
atggagaagctgaccttctacgccctgagcgcccccgagaagctggatagaattggcgcctatctctctgaaagactgatcagagacgtaggacggcatcgatacggatacgtgtgtattgcaatggaggccctggaccagctgctcatggcctgccattgccagtcaattaacctattcgtagagagtttcctgaaaatggtggccaaactcctcgaaagcgaaaagcctaacttacagatcctagggaccaactccttcgtgaaattcgccaacatcgaggaagacaccccaagctatcatagaagctacgactttttcgtctctcgatttagtgagatgtgccactccagtcacgatgatctggagatcaagacaaagataagaatgagcggcatcaaaggtctgcagggtgtggtgcggaagacagtgaacgatgagctccaggccaacatttgggatcctcaacacatggacaaaattgtcccctccctgctctttaatttgcagcatgtggaggaagctgaatctagaagccctagccccctccaggcccctgagaaggaaaaagagtccccagccgagcttgcagagcgctgccttcgcgagttgcttggcagggctgcctttggcaacatcaaaaacgcaatcaaacccgtgctcattcaccttgataaccactcactttgggagcccaaggtcttcgctattcggtgttttaagatcattatgtatagtatacagccccagcactcccacttggtgatccagcagctgctgggccatttggatgctaacagcaggagtgccgcgacggtgcgggccgggattgtagaagtactatctgaagcagccgtgattgcagcgacggggagcgttgggcccacagtccttgagatgttcaacaccctgctgcgccaacttcgcctgagcatcgactacgccttaacgggatcctacgatggcgccgtttctcttggcaccaagataatcaaggagcacgaagaacgtatgtttcaagaagccgtgataaagaccgtgggctctttcgcctccacccttcctacataccagcgctctgaggtgatacttttcatcatgagcaaggtgcccagaccgagtcttcatcaggcggtcgatactgggcggactggcgaaaaccgaaataggttgactcagattatgctactgaagtctctactacaggtgtcaaccgggttccaatgcaataatatgatgtcagctctgcccagcaacttcctcgatcggctcctgagtaccgctttaatggaagacgccgagatacgcttgtttgtgcttgagattctgataagcttcattgacagacacgggaatagacacaagttcagcaccattagcacactgagcgacatctccgtcttaaaactgaaggtggacaaatgttcacgtcaggatacagtttttatgaaaaaacattcacaacagctttatcgacatatttatttgagctgcaaggaagaaaccaacgtgcaaaaacattacgaagccttgtatggcctcctggcattgatatctatagagctcgcaaacgaagaggttgtagtggatttgattaggctcgtcctggccgtgcaggatgttgcccaggtcaacgaagaaaacctgcccgtgtacaaccgttgtgccctgtatgccttaggcgccgcctacctgaacctaataagtcagttgaccacagtccccgccttctgtcaacacatccacgaagtaattgagacaagaaagaaagaagcgccgtatatgctgcccgaagacgtcttcgttgaacgacccaggctatctcaaaatctggacggtgtcgtgatcgaacttttatttcgtcagagcaagatatcagaggtgctggggggttccggctacaatagcgatcggctgtgcctgccttatattccccaactgacagatgaggatcgactaagcaaaaggagatccatcggcgagaccattagccttcaggtggaagtagagagccgtaattcacctgagaaggaagagcgtgtgcctgccgaagagataacctacgaaacattaaaaaaggccatcgtggactctgtggcagtcgaggagcaggagcgggagcgaaggcggcaggttgttgagaagttccagaaagcgcccttcgaagagatagctgcccactgcggtgctcgggctagcttgttgcagtctaagctgaaccagatttttgagatcaccattaggcctcctccgagtcctagtggcaccattactgctgcctatggtcaaccccagaaccacagcatccctgtctacgaaatgaaattccctgatctgtgcgtgtactag

SEQ ID NO: 183497 - DNA, 2454 bp, Artificial Sequence
  derived and/or modified sequence
atgtatggagtgtgcgggtgctgcggagctctgagaccgaggtataagcggctggtggacaacatatttcctgaagaccccgaagacggcctggtgaaaactaatatggaaaaactgactttttacgcactctcagcgcctgagaagttggataggatcggggcatacttgagcgagagactgatccgcgatgtgggacggcatcgttacggctacgtttgtattgcgatggaagcattagatcaactgctgatggcatgccactgccagtctatcaacctctttgtggaaagcttcctcaaaatggttgcgaaactgttagagtcggagaagccaaaccttcagattttaggaaccaatagttttgtgaaattcgccaacatcgaggaggacacacctagctaccaccggtcatatgactttttcgtaagccggttctctgagatgtgccattcatcgcacgatgatctcgaaattaaaaccaaaatccgtatgagcggcattaagggcctccagggcgtcgtgagaaagaccgtgaatgacgaacttcaggccaatatctgggacccccagcacatggacaagatcgtgcccagcttattgtttaatctccagcatgtggaggaggctgagtcccgttccccatcaccactgcaggcgcctgaaaaggaaaaagagagtcccgctgagctcgcagagcgctgtttgagggaattactgggaagagcagcatttggaaacattaagaacgctatcaaaccagtcttaatccacctggacaatcactccctgtgggaacctaaagtattcgctattaggtgtttcaagattatcatgtattcaattcagcctcagcacagccaccttgtgatacaacaactactgggtcatctcgacgcaaatagcaggagcgcggctacagtccgagcgggaattgtcgaggtcctaagcgaagccgctgttattgcagccaccgggagcgtcggtcctactgtcttggagatgtttaatacacttctacggcagttgcgcttgtccattgattacgcgctgacaggttcatatgatggagctgtgtcccttggaacgaaaatcattaaggagcatgaagaaagaatgttccaagaagctgtgatcaagacggtggggtcttttgcttccaccctccccacgtaccagaggagtgaagtaattctgtttatcatgtccaaggttcccaggccctcactgcatcaagctgtggacaccggcagaaccggagagaatcggaatcgtctgacccagattatgttgctgaaatccctgctacaggtgtcaaccggattccagtgtaataatatgatgtctgctctcccttccaacttccttgatagacttctttccacagccctgatggaagatgccgaaattcgattatttgtactggaaatactgatcagttttatcgaccgccatggaaatcgccataagtttagcactatctccacgctgtccgatatctccgtgctcaaactgaaggtggataagtgctctaggcaagacacagtctttatgaagaagcacagccagcaactgtatcgacacatttaccttagctgtaaagaggagactaatgttcagaagcactacgaggctttgtatggccttcttgcattaatttccatcgagctcgctaacgaggaggtggtcgtagacttgatccgcctggtgctggccgttcaggacgtcgcccaggtgaatgaggaaaacctgcctgtatacaacaggtgcgctctatatgcactgggggcagcttatctcaatctgatttctcagctcacaaccgtgcctgctttctgtcagcacatccatgaagtcatagaaactagaaaaaaggaggccccttacatgcttcccgaggacgttttcgttgagaggccacggctatcccaaaatctcgacggggtcgtgatagaactgctcttcaggcagagtaaaatttctgaggtcctgggcggttctggatataattcagacagactttgtctgccttacatcccccagttgacagacgaggaccgcctgtccaagcggcgttctatcggcgagaccatatccttacaggtggaggttgaaagtcgcaactcaccagagaaggaagagcgcgtccccgctgaagagatcacctatgagacactaaagaaagccatcgttgattccgtcgccgtggaggagcaggaacgggagaggagaagacaagtggttgaaaaatttcagaaggcccctttcgaggagatagccgctcactgcggggctcgggcatcgctgttacaatccaagctgaaccagatcttcgaaatcaccatcagaccacctccatctcccagcggtacgatcacagccgcatacgggcagcctcagaatcattctatacccgtctatgaaatgaagtttcctgatctgtgcgtttactag

SEQ ID NO: 183498 - DNA, 2349 bp, Artificial Sequence
  derived and/or modified sequence
atggagaaactcactttctacgccttgtccgcccctgaaaaacttgacaggatcggtgcatacctctcggagaggctcattagggatgtgggacgccacaggtatgggtatgtgtgcatcgcgatggaggccctggaccagctgctgatggcgtgtcactgtcaaagcattaacctgttcgtcgaatctttcctcaaaatggtcgcgaagctgctcgagtccgagaaacccaacctccagattctaggcacaaatagctttgtcaagttcgccaacatcgaggaggatacccctagctaccacagatcatatgatttttttgtctcccgcttttcagaaatgtgccacagcagccatgacgatctcgagattaagaccaagattcgtatgtccggtataaaggggctgcagggggtcgtaaggaaaaccgttaacgacgagctgcaggccaacatctgggatcctcagcatatggacaaaatcgtgccatcactgctgttcaaccttcagcacgtggaagaggccgagtcacgtagcccctctccgttgcaggctccggagaaagagaaagagagcccagccgagctggccgaaaggtgcctgagagaactgctgggcagagctgcttttggtaatattaaaaacgccattaagcccgtcttaattcatttggataatcactccctctgggaacctaaagtgttcgcaatcagatgctttaagatcatcatgtacagcatacagccacaacactctcatctggtgatccagcaactgttgggtcatttggacgcgaacagtagatcagccgctacggttagggctggaatcgttgaagtgttgtctgaagctgccgtcatagcggctacagggtcagtcggacccaccgtactcgaaatgttcaatacccttctacgtcagctcaggttgtcaatcgattacgctttaacggggtcttatgacggcgcagtctcgctggggaccaaaatcatcaaagagcatgaagagaggatgttccaggaggctgtaattaaaactgtgggctcgttcgcatctaccctgccgacctatcagaggtcagaagttattttatttatcatgtccaaggtccccaggccgtcgctccatcaggcagtcgacactggacgcaccggtgaaaaccggaatcggctgactcagatcatgttgttaaagtccctgctacaagtgagcaccggctttcagtgcaataatatgatgtctgcactcccgtcaaattttctcgaccgtctgttgagcaccgccctgatggaagacgccgagatacgcctgtttgttttagaaatcctgatctcctttattgaccggcatggaaatcggcacaagttcagcacgatttccactctgtcagacatctccgtgctcaagctgaaggttgacaagtgtagcagacaggacacagtgttcatgaagaagcatagccagcagctgtataggcacatttatctgtcctgcaaagaggaaaccaatgtgcagaaacattatgaagctttatacggcctgctggctctgatctccatcgagcttgctaatgaggaagtagttgtggatctgataaggctggttctcgcggttcaagatgtcgcccaggtcaatgaggagaatctgccagtatataacaggtgcgctctgtacgccctgggggcagcgtatctgaacctgatttctcagctgacaacagtgcctgcattctgccagcatattcatgaagtgatcgagacaaggaaaaaggaagctccgtatatgctgcccgaggacgttttcgtagagcgacctcggctgagccagaacctggatggagttgtcattgagctcttatttagacagtcaaagatttctgaggtgcttggaggatcgggatacaattccgacagactgtgcctgccgtacatcccccagctgaccgatgaagatcgactgagtaagcgccgttctatcggggagaccatttccttgcaggtggaggtagaatcaaggaatagccccgagaaagaagaacgcgttccggcagaggagatcacatacgaaacgctgaagaaggcgattgttgatagcgtggctgtcgaagaacaggagagggagcgccgacgtcaagttgtcgagaagttccagaaggcacctttcgaggaaattgccgcacactgcggggcaagagcttcgctgctccagagtaagctgaatcagatattcgaaatcaccatacgccctcctccaagcccttcaggaacgatcacggccgcttatggtcaacctcaaaatcacagcattcctgtgtatgaaatgaagttcccagacctatgcgtatactag

SEQ ID NO: 183499 - protein, 676 aa, Artificial Sequence
  derived and/or modified sequence
MSRRALRRLRGEQRGQEPLGPGALHFDLRDDDDAEEEGPKRELGVRRPGGAGKEGVRVNNRFELINIDDLEDDPVVNGERSGCALTDAVAPGNKGRGQRGNTESKTDGDDTETVPSEQSHASGKLRKKKKKQKNKKSSTGEASENGLEDIDRILERIEDSTGLNRPGPAPLSSRKHVLYVEHRHLNPDTELKRYFGARAILGEQRPRQRQRVYPKCTWLTTPKSTWPRYSKPGLSMRLLESKKGLSFFAFEHSEEYQQAQHKFLVAVESMEPNNIVVLLQTSPYHVDSLLQLSDACRFQEDQEMARDLVERALYSMECAFHPLFSLTSGACRLDYRRPENRSFYLALYKQMSFLEKRGCPRTALEYCKLILSLEPDEDPLCMLLLIDHLALRARNYEYLIRLFQEWEAHRNLSQLPNFAFSVPLAYFLLSQQTDLPECEQSSARQKASLLIQQALTMFPGVLLPLLESCSVRPDASVSSHRFFGPNAEISQPPALSQLVNLYLGRSHFLWKEPATMSWLEENVHEVLQAVDAGDPAVEACENRRKVLYQRAPRNIHRHVILSEIKEAVAALPPDVTTQSVMGFDPLPPSDTIYSYVRPERLSPISHGNTIALFFRSLLPNYTMEGERPEEGVAGGLNRNQGLNRLMLAVRDMMANFHLNDLEAPHEDDAEGEGEWD

SEQ ID NO: 183500 - DNA, 2031 bp, Artificial Sequence
  derived and/or modified sequence
atgagcagaagagccctgagaagactgagaggcgagcagagaggccaggagcccctgggccccggcgccctgcacttcgacctgagagacgacgacgacgccgaggaggagggccccaagagagagctgggcgtgagaagacccggcggcgccggcaaggagggcgtgagagtgaacaacagattcgagctgatcaacatcgacgacctggaggacgaccccgtggtgaacggcgagagaagcggctgcgccctgaccgacgccgtggcccccggcaacaagggcagaggccagagaggcaacaccgagagcaagaccgacggcgacgacaccgagaccgtgcccagcgagcagagccacgccagcggcaagctgagaaagaagaagaagaagcagaagaacaagaagagcagcaccggcgaggccagcgagaacggcctggaggacatcgacagaatcctggagagaatcgaggacagcaccggcctgaacagacccggccccgcccccctgagcagcagaaagcacgtgctgtacgtggagcacagacacctgaaccccgacaccgagctgaagagatacttcggcgccagagccatcctgggcgagcagagacccagacagagacagagagtgtaccccaagtgcacctggctgaccacccccaagagcacctggcccagatacagcaagcccggcctgagcatgagactgctggagagcaagaagggcctgagcttcttcgccttcgagcacagcgaggagtaccagcaggcccagcacaagttcctggtggccgtggagagcatggagcccaacaacatcgtggtgctgctgcagaccagcccctaccacgtggacagcctgctgcagctgagcgacgcctgcagattccaggaggaccaggagatggccagagacctggtggagagagccctgtacagcatggagtgcgccttccaccccctgttcagcctgaccagcggcgcctgcagactggactacagaagacccgagaacagaagcttctacctggccctgtacaagcagatgagcttcctggagaagagaggctgccccagaaccgccctggagtactgcaagctgatcctgagcctggagcccgacgaggaccccctgtgcatgctgctgctgatcgaccacctggccctgagagccagaaactacgagtacctgatcagactgttccaggagtgggaggcccacagaaacctgagccagctgcccaacttcgccttcagcgtgcccctggcctacttcctgctgagccagcagaccgacctgcccgagtgcgagcagagcagcgccagacagaaggccagcctgctgatccagcaggccctgaccatgttccccggcgtgctgctgcccctgctggagagctgcagcgtgagacccgacgccagcgtgagcagccacagattcttcggccccaacgccgagatcagccagccccccgccctgagccagctggtgaacctgtacctgggcagaagccacttcctgtggaaggagcccgccaccatgagctggctggaggagaacgtgcacgaggtgctgcaggccgtggacgccggcgaccccgccgtggaggcctgcgagaacagaagaaaggtgctgtaccagagagcccccagaaacatccacagacacgtgatcctgagcgagatcaaggaggccgtggccgccctgccccccgacgtgaccacccagagcgtgatgggcttcgaccccctgccccccagcgacaccatctacagctacgtgagacccgagagactgagccccatcagccacggcaacaccatcgccctgttcttcagaagcctgctgcccaactacaccatggagggcgagagacccgaggagggcgtggccggcggcctgaacagaaaccagggcctgaacagactgatgctggccgtgagagacatgatggccaacttccacctgaacgacctggaggccccccacgaggacgacgccgagggcgagggcgagtgggactag

SEQ ID NO: 183501 - DNA, 651 bp, Artificial Sequence
  derived and/or modified sequence
atgagcagaagagccctgagaagactgagaggcgagcagagaggccaggagcccctgggccccggcgccctgcacttcgacctgagagacgacgacgacgccgaggaggagggccccaagagagagctgggcgtgagaagacccggcggcgccggcaaggagggcgtgagagtgaacaacagattcgagctgatcaacatcgacgacctggaggacgaccccgtggtgaacggcgagagaagcggctgcgccctgaccgacgccgtggcccccggcaacaagggcagaggccagagaggcaacaccgagagcaagaccgacggcgacgacaccgagaccgtgcccagcgagcagagccacgccagcggcaagctgagaaagaagaagaagaagcagaagaacaagaagagcagcaccggcgaggccagcgagaacggcctggaggacatcgacagaatcctggagagaatcgaggacagcaccggcctgaacagacccggccccgcccccctgagcagcagaaagcacgtgctgtacgtggagcacagacacctgaaccccgacaccgagctgaagagatacttcggcgccagagccatcctgggcgagcagagagacagagtgctgctgggctgccccgtgtggttctag

SEQ ID NO: 183502 - DNA, 2031 bp, Artificial Sequence
  derived and/or modified sequence
atgtcccggagagctctgagaagactgcgcggcgaacagcgcggtcaagagcctttggggccaggggccctgcactttgatctgcgggacgacgacgacgcggaggaggagggccccaaacgggagctgggagttaggcgccctggaggcgcagggaaagagggggtcagggtaaataatcgattcgagcttatcaacatcgatgacttggaagacgaccctgtggtaaatggagagaggagcggctgtgctctcaccgatgctgtagcccccgggaataaaggtagaggacaacgaggtaacacagaatcaaagaccgatggagacgacactgagacagtgccttccgaacagtcccatgcatcaggaaaactccgaaaaaaaaagaagaagcagaaaaacaaaaaatcttctaccggagaggccagcgagaacggtcttgaggacatcgaccggatccttgaaagaatagaggattcaactggccttaataggccaggccccgcaccactgtcgtcacggaaacacgtgctgtacgtggagcatcgtcatctcaacccggacactgaacttaaacggtatttcggggcgcgagccatactcggggaacaacgccccagacagcggcagcgggtgtacccaaagtgcacatggcttacgacaccaaagagcacttggcctagatactcaaaacccgggctatcgatgagactattggaaagcaagaagggactaagcttcttcgctttcgaacattctgaagaataccagcaagcccaacacaaattcctggttgccgttgagtcaatggagccaaataacatcgtggttctgctgcagaccagcccctaccacgttgactcactgcttcagttgagcgacgcgtgccgcttccaggaggaccaggagatggcgagggatctcgtagaacgggctctatactcaatggagtgcgccttccaccctcttttctctctcaccagcggcgcctgtagattagactaccgacgcccagagaacaggtccttttatctggctttatataagcagatgtccttcctcgaaaagcgagggtgccctcgcactgctctcgaatattgcaagctcatattgagtcttgaacccgacgaggatccactgtgcatgctccttctgatcgaccacttggctctgagggcccggaattatgagtaccttatacgactctttcaggaatgggaggcgcataggaatctgtctcagctgcctaactttgcatttagcgtgcctttggcctactttctcctctcccagcaaaccgacctacccgagtgcgaacaatcctcggccaggcagaaagcatcactgctgatccagcaggctctcacaatgttccccggcgtcctgttgcccctgttagagtcatgttccgtgcgcccagacgcctcggtctcttcgcataggttttttgggcccaacgctgagatctcacagccccccgcactgtctcagctcgtcaacctatacctaggaagaagccattttctctggaaagagcctgccactatgagctggttagaggagaacgtgcatgaagtcttgcaagctgttgatgccggagaccccgccgtcgaggcctgtgaaaacaggcggaaagtgctgtatcaaagagccccgcgaaacattcacagacacgtgatcttgtctgagatcaaggaagccgtcgcggcactccccccagatgtgacaactcagagcgtgatggggttcgacccactccccccctctgatacaatatattcatacgttcgacccgagagactcagcccaatctctcacggtaatacaatagcgctgttctttagatctctcctcccgaactacacaatggaaggggaaagacccgaggagggcgtggcaggcggactgaaccgcaatcagggcctgaatcgattgatgttggccgttcgcgacatgatggcaaactttcacctaaatgacctggaggccccccacgaagacgatgctgagggggaaggcgagtgggattag

SEQ ID NO: 183503 - DNA, 651 bp, Artificial Sequence
  derived and/or modified sequence
atgagtaggagggcattgcgccgacttaggggcgaacaaagaggccaggagcccctggggcctggggctttgcattttgatctccgcgacgatgatgatgccgaagaagagggaccaaagcgcgagcttggagtgaggcgaccaggaggcgctgggaaagagggggtcagggtcaacaatagattcgaactcatcaatattgatgacctggaagacgatcccgtggtgaacggggagcgatcaggttgtgctctgaccgatgctgtggcccccggtaataagggaagaggccaacgggggaataccgaatccaaaacagacggggacgatacggagacagtcccttccgagcaaagccacgctagcgggaaactccggaagaaaaaaaagaaacagaaaaataagaagagcagcaccggcgaggccagtgaaaacggcctagaagacattgaccggatcctggaacgtatagaggatagcacggggcttaataggcccggaccagcccctctgtccagccgcaaacacgttctttatgttgaacaccggcatctgaatcccgataccgaactgaagagatactttggcgcccgggccatattgggcgaacagcgcgacagggtgctgctaggttgtcctgtctggttttag

SEQ ID NO: 183504 - DNA, 618 bp, Artificial Sequence
  derived and/or modified sequence
atgagctgccctgtgcctgcctgctgtgccctgctgctggtgctgggcctgtgccgggcccggcccagaaatgccctgctgctgctggccgaccgggccctgtctgtgagccacctgacccagaggatgacagaggccctgcgggtggcccggaccaccacagcccccagcccccccaggacctggaccccctggccagctgctgccagcagctttgccatgcccagccccaggtctgctgctgccctgcctgctgccccagccagcagcctggcctgccccagcatccgcatgggctgcaccggctgcaccaggacctgcaccaccagcacccccagcacccgctgtggggcctgccgctgctgcagcgccaagctggtgtgtgcccaggccagcagcggccgcagcacctggggccggcggccctgcacccggctgaccctgcggaccaggaggaggatggcccccagcagccgctggggcggcaccagcctggagctgagctgcagcagcggcaacagctgccgcctgaggatgacaggcctgagcagcagcaccagccccagcaccacccccaccctgtgggccctgcctgcccctgtgaggaacctgctgtag

SEQ ID NO: 183505 - DNA, 2031 bp, Artificial Sequence
  derived and/or modified sequence
atgagcagaagagccctgcggcggctgcggggggagcagaggggccaggagcccctgggccctggggccctgcactttgacctgagagatgatgatgatgctgaggaggagggccccaagcgggagctgggcgtgcggcggcctgggggcgccggcaaggagggcgtgcgggtgaacaacagatttgagctgatcaacattgatgacctggaggatgatcctgtggtgaatggagagaggagcggctgtgccctgacagatgctgtggcccctggcaacaagggccggggccagaggggcaacacagagagcaagacagatggagatgacacagaaacagtgcccagcgagcagagccacgccagcggcaagctgaggaagaagaagaagaagcagaagaacaagaagagcagcactggagaggcctctgaaaatggcctggaggacatcgaccgcatcctggagagaattgaggacagcacaggcctgaaccggcccggccctgcccccctgagcagcaggaagcacgtgctgtatgtggagcaccgccacctgaacccagacacagagctgaagcgctactttggagcccgggccatcctgggggagcagaggccccggcagaggcagagggtgtaccccaagtgcacctggctgaccacccccaagagcacctggccccgctacagcaagccaggcctgtccatgaggctgctggagagcaagaagggcctgtccttctttgcctttgagcacagcgaggagtaccagcaggcccagcacaagttcctggtggccgtggagagcatggagcccaacaacatcgtggtgctgctgcagaccagcccctaccacgtggacagcctgctgcagctgagtgatgcctgccgcttccaggaggaccaggagatggcccgggacctggtggagcgggccctgtacagcatggagtgtgccttccaccccctcttcagcctgaccagcggggcctgccgcctggactacagaagaccagaaaatagaagcttctacctggccctgtacaagcagatgtccttcctggagaagaggggctgccccaggacagccctggagtactgcaagctgatcctgagcctggagccagatgaggaccccctgtgcatgctgctgctgattgaccacctggccctgcgggccaggaactatgagtacctgatccgcctcttccaggagtgggaggcccacaggaacctgagccagctgcccaactttgccttctctgtgcccctggcctacttcctgctgagccagcagacagacctgcctgaatgtgagcagagcagcgcccggcagaaggccagcctgctgatccagcaggccctgaccatgtttcctggggtgctgctgcccctgctggagagctgcagcgtgcggccagatgcctctgtgagcagccaccgcttcttcggccccaatgctgagatcagccagcccccagccctgagccagctggtgaacctgtacctgggccgcagccacttcctgtggaaggagcccgccaccatgtcctggctggaggagaatgtgcatgaggtgctgcaggccgtggatgctggggaccctgctgtggaggcctgtgaaaatagaaggaaggtgctgtaccagagggcccccaggaacatccaccgccacgtgatcctgtctgagatcaaggaggccgtggccgccctgcccccagatgtgaccacccagagcgtgatgggctttgaccccctgcccccaagtgacaccatctacagctatgtgcggcctgagcggctgagccccatcagccacggcaacaccatcgccctcttcttccgcagcctgctgcccaactacaccatggagggggagaggcctgaggagggcgtggccggcggcctgaacagaaaccagggcctgaaccggctgatgctggccgtgcgggacatgatggccaacttccacctgaatgacctggaggcccctcatgaagatgatgctgagggggagggggagtgggactag

SEQ ID NO: 183506 - DNA, 651 bp, Artificial Sequence
  derived and/or modified sequence
atgagcagaagagccctgcggcggctgcggggggagcagaggggccaggagcccctgggccctggggccctgcactttgacctgagagatgatgatgatgctgaggaggagggccccaagcgggagctgggcgtgcggcggcctgggggcgccggcaaggagggcgtgcgggtgaacaacagatttgagctgatcaacattgatgacctggaggatgatcctgtggtgaatggagagaggagcggctgtgccctgacagatgctgtggcccctggcaacaagggccggggccagaggggcaacacagagagcaagacagatggagatgacacagaaacagtgcccagcgagcagagccacgccagcggcaagctgaggaagaagaagaagaagcagaagaacaagaagagcagcactggagaggcctctgaaaatggcctggaggacatcgaccgcatcctggagagaattgaggacagcacaggcctgaaccggcccggccctgcccccctgagcagcaggaagcacgtgctgtatgtggagcaccgccacctgaacccagacacagagctgaagcgctactttggagcccgggccatcctgggggagcagagggacagagtgctgctgggctgccctgtgtggttctag

SEQ ID NO: 183507 - DNA, 2031 bp, Artificial Sequence
  derived and/or modified sequence
atgagccggcgggccctgcggcggctgcggggcgagcagcggggccaggaaccccttggcccaggcgccctgcattttgacctacgggacgacgacgatgccgaggaagaaggacccaagagagagctgggggtgcggcgacccgggggggctggaaaagaaggtgtgcgagtaaacaacagatttgagctgatcaacatagacgacctggaagacgacccagtggtcaatggcgagaggagtggctgcgcactgactgatgctgtcgccccagggaacaagggtcgaggtcagcgcggaaataccgaatccaagacagacggggatgacacagagacagtgccatctgagcagtctcacgccagtggaaagttacgcaaaaaaaagaaaaaacagaaaaacaagaagagttccactggtgaagcttccgagaacgggcttgaagatatcgaccggatcctggagcggattgaagattctaccggactgaataggccaggaccagctcctctctcctccaggaaacacgtactttatgtggagcatcgacacctgaacccggacaccgaactaaagcggtactttggcgcccgggcaatattgggggagcagaggcctcgtcagcgacaaagagtctaccctaaatgcacctggctaaccacgccaaagtctacctggccccggtactccaagcccggactgagcatgaggctgttggagtctaagaagggactgtcatttttcgcttttgagcatagcgaagagtatcagcaggctcaacacaagttcctggtcgctgtggaatcgatggagccaaataatattgtggtcctcttgcagaccagcccctatcacgtggattcgctgctgcagctcagcgatgcatgccgcttccaagaagatcaggagatggcacgggatctcgtggagcgagcactttactctatggagtgtgccttccaccctttgttctccctgacttccggcgcctgtcgcttggattaccggagacctgagaatcgctctttctaccttgctctgtacaaacagatgagtttccttgaaaagaggggatgtcctcgaacagctcttgagtactgtaaattaatcctcagcctggagcctgacgaggaccctctgtgcatgttactgcttatcgaccacttggccttacgcgcccggaattatgagtaccttatccggctgtttcaggaatgggaagcccaccgtaatttgtcccagctccctaacttcgccttttcagtgcccttagcttatttcctgctgagtcagcagaccgaccttccagaatgcgaacagagctctgcgaggcagaaagcttccttactcatccagcaggctctaacgatgttccctggcgtgctattgccactgttggaaagctgcagcgtgcgcccagacgcctctgtgtcttctcatcgatttttcggacctaatgcagagataagccaaccccccgctctgtctcaattagtcaatctgtacttgggtcgaagccattttctatggaaggagccggcaaccatgtcatggcttgaggagaacgtgcatgaggttttgcaagccgtcgacgcaggcgaccctgcagtggaggcttgtgagaaccgcaggaaagttctgtatcagcgagccccccgcaacatccaccggcacgtcatcctcagtgagataaaagaagccgtggccgctcttccaccggacgtgacgacgcagagtgtgatggggttcgacccactacctccgtccgataccatttattcttacgtgaggcctgaacgattaagccccataagccacgggaacacaatcgctttgttcttcagatctctgttgcctaactacacaatggagggagaacgcccagaggagggagtcgccggaggtttgaatcgaaaccaaggactgaaccggctcatgctcgcagtcagagacatgatggctaactttcatctgaacgacctggaagctcctcatgaggacgacgcagaaggggagggcgagtgggattag

SEQ ID NO: 183508 - DNA, 651 bp, Artificial Sequence
  derived and/or modified sequence
atgagccggcgggccctgcggcggctgcggggcgagcagcggggccaggaacccctcggacctggtgctctgcacttcgacctacgggatgacgacgatgctgaggaggaagggccaaagagggagctcggagtccgacggcccggtggagcaggtaaagagggcgtgagggtgaacaaccggtttgagctgattaatatagacgatctggaggatgatcccgttgtgaacggagagaggtccggatgtgccctgacagacgctgtcgcacccggcaacaagggaagagggcagaggggcaatacagagagcaagacagacggcgatgacacagagacagtcccatccgaacagagccatgcctctggcaaactcaggaagaaaaagaagaagcagaagaacaagaaaagttctactggcgaagccagtgaaaatggtctggaagacatcgatagaatcctggaacgcatcgaagattctaccggactgaaccgtccgggtcccgcccccttgagttcccggaaacacgtcctctacgtggagcatcgccacctgaatccagacaccgagctcaagcggtatttcggagctcgcgccattctcggtgaacaaagagatcgagtactgctgggctgccccgtttggttttag

SEQ ID NO: 183509 - DNA, 2031 bp, Artificial Sequence
  derived and/or modified sequence
atgtccagacgggcactgagacgattgcggggagagcaaaggggacaggagcctctgggaccaggagctctgcacttcgatcttcgcgatgatgacgacgccgaggaagagggccctaagagagaactcggcgttcggcgaccgggtggcgctggaaaggaaggcgtgagggtcaataaccgcttcgagcttatcaacatagatgatttagaagacgaccctgtcgttaacggagagagaagcgggtgcgcactgactgatgcagtggcgccaggaaataagggacgtggccagagaggtaacacagaaagcaagacagatggggatgatacagaaactgttccatccgagcagtcccacgcttctgggaagcttcgtaaaaagaaaaagaagcagaaaaataagaagagctctacaggggaggctagcgagaatgggctggaggatatcgataggatcctagaaagaattgaggactccacaggtttgaacaggcccggaccagctcctctcagttctcgcaagcatgtgctctacgttgaacaccgccacctgaatccggatacagaattaaaacgctattttggggctagggctattctgggagagcaacgccctaggcagaggcagcgagtgtatccaaagtgcacctggctgactacccctaaatccacctggccccgatactctaagcctggactcagcatgcgtctcctggagagcaagaagggcttgagcttctttgcgtttgaacattccgaggagtaccaacaggcccagcataagtttttggtggctgtagaaagtatggagccaaacaacatagtggtgctcctgcagacgagtccctaccacgtcgacagcctgctccagctgagtgacgcttgtcgcttccaggaagaccaagaaatggcccgtgacctagtcgagcgggctctctactctatggaatgcgccttccatccactcttttcacttaccagcggcgcatgcaggttagattacagaagacccgaaaacaggtccttctacttggccctatataagcagatgtcctttttagagaagagaggttgtccacgcaccgccctggaatactgtaagctgatattaagtctagagcctgatgaagacccgttatgtatgctactattgatcgatcatctcgccctgcgcgcaagaaactatgagtatctcatccggttgtttcaggagtgggaggcgcacagaaacctgtcacagcttccaaattttgctttttcagtgccattggcgtactttctgctgagtcaacagactgatctccctgaatgtgaacaatcctctgcgcgacagaaagcgtccttgctgattcaacaggctctaactatgtttccaggtgtcctgctccctcttttggagtcatgctccgttcgacccgacgcaagcgtgtcctcgcacagattttttggccctaatgctgaaatcagccagcctcctgccctctcacagctggttaatctctacttaggccgatctcatttcttatggaaggaacccgcaacgatgtcttggctggaggagaatgttcacgaagtcctgcaggccgtggacgcgggagacccagcggttgaggcctgtgaaaacagacggaaggtcttgtatcagagggcacccaggaacatccacaggcacgtgatcctgtcagagattaaggaggccgtggcagctctgccccctgatgtcactactcaatccgtgatgggctttgacccactccccccttccgatactatatacagctatgttagacctgagagactgtccccaatctcccacggtaacaccatcgcactgttttttcgatcactgctgcccaactacacaatggagggggaacgacctgaagagggagtggctgggggtttgaaccggaaccagggactcaaccgtctaatgctagctgtgagggatatgatggccaatttccatctgaatgacctggaagccccacacgaggacgatgctgagggcgaaggagagtgggactag

SEQ ID NO: 183510 - DNA, 651 bp, Artificial Sequence
  derived and/or modified sequence
atgagtaggcgggcattacggagactgcgtggcgaacaacgcggacaggagcccctgggacccggtgcccttcacttcgacttaagagacgacgacgacgccgaagaagaagggcctaagcgcgaactaggggtccgtagaccaggaggagcaggcaaggagggagttagagtaaataaccgattcgaactaattaatattgatgacctggaggacgaccctgtagttaacggggagcgttcagggtgtgctctgaccgatgcagtggcacctgggaataaggggagagggcagaggggcaatacagagtcaaagacagacggagatgacacagagactgtgccatcagagcaatcccatgctagtggcaagctccggaagaaaaagaagaaacagaagaacaaaaagtcctccacaggcgaagcttctgaaaacggcctggaagacatcgatcgtatcctggaacggattgaggacagcaccggcctcaacaggccaggtccagctcccttatccagccgtaagcacgtgctgtacgtcgagcatcggcacctgaatcctgacacggagctgaagcgctattttggcgctcgggctattctcggcgagcagagagatcgagtgctgctcggctgccccgtctggttctag

SEQ ID NO: 183511 - DNA, 2283 bp, Artificial Sequence
  derived and/or modified sequence
agctcccccgcccccgaccccgcgcgaagagtgcgcaggcgcgccgacagccgagttttctgcgcttccttctccctctctccagacgtcgtggtcgttcggtcctatgtcgcgccgggccctccggaggctgaggggggaacagcgcggccaggagcccctcgggcccggcgccttgcatttcgatctccgtgatgacgatgacgcggaagaagaagggcccaagcgggagcttggtgtccggcgtcccgggggcgcagggaaggagggcgtccgagtcaacaaccgcttcgagctgataaacattgacgatcttgaggatgaccctgtggtgaacggggagaggtctggctgtgcgctcacagacgctgtggcaccagggaacaaaggaaggggtcagcgtggaaacacagagagcaagacggatggagatgacaccgagacagtgccctcagagcagtctcatgcaagtggcaaactccggaagaagaaaaaaaaacagaaaaacaagaaaagcagcacgggagaagcatcggaaaacggactagaagatatcgatcgcatcctagagaggattgaggacagcactgggttgaaccgtcccggcccagctcccctgagctccaggaagcacgttctctacgtggagcacagacacttgaatccagacacagaactgaaaaggtattttggtgcccgggcaatcctgggggagcaaaggccacggcagagacaacgtgtgtaccccaagtgcacatggctgaccacccctaaaagcacctggccccgctacagcaaaccaggtctgtccatgcggctgctggaatcaaaaaaaggcctctccttctttgcgtttgagcacagtgaggagtaccagcaggctcagcacaagttcctggtggccgtggagtctatggagccgaacaacatcgtggttctgctccagacgagcccttaccacgttgactcactcctgcagctcagcgatgcctgccgctttcaagaggatcaggagatggctcgagacctcgtagagagagcgctgtacagcatggaatgtgcgttccaccccctgttcagtctcaccagtggggcctgccggctggattaccgcagacccgagaacaggagcttctacctggccctctacaagcagatgagcttcctggagaagcgaggctgcccgcgcacggcgctggagtactgcaagctcatcctgagtctcgagccggatgaggaccccctctgcatgctgctgctcatcgaccacctggccttgcgggcccggaactacgagtacctgatccgcctcttccaggagtgggaggctcatcggaacctgtcccagctccctaattttgccttctctgttccactggcgtatttcctgctgagccagcagacagacctccctgagtgtgagcagagctctgccaggcagaaggcctctctcctgatacagcaggcgctcaccatgttccctggagtcctcctgcccctgctcgagtcttgcagtgtgcggcccgacgccagcgtttccagtcaccgcttctttggacccaatgctgaaataagccagccccctgccctgagccagctggtgaacctgtaccttgggaggtcacactttctctggaaagagcccgccaccatgagctggctggaggagaacgtccacgaggttctgcaagcagtggacgccggggacccagccgtggaagcctgtgagaaccggcggaaggtgctctaccagcgtgcacccaggaatatccaccgccatgtgatcctctctgagatcaaggaagccgtcgctgccctgcccccggacgtgaccacgcagtctgtgatggggtttgatcctctgcctccttcggacacaatctactcctacgtcaggccagagaggctaagtcctatcagccatggaaacaccattgctctcttcttccggtcactgttgccaaactataccatggagggggagaggcccgaggaaggagtggctgggggtctgaaccgcaaccagggcctgaacaggctgatgctggctgtgcgcgacatgatggccaacttccacctcaacgacctggaggcgccgcacgaggacgacgctgagggggagggggagtgggactgagcgtccgcagaggtgaccgaaaagccgtatgatgatgttcccgatttctctgttggtcggagtcggccagttgcctgaagtagggaagctgagtgtgtcgctccctggtccactgtttctcctataaatgtaaatgggtcacgctc

SEQ ID NO: 183512 - DNA, 1727 bp, Artificial Sequence
  derived and/or modified sequence
ctccagacgtcgtggtcgttcggtcctatgtcgcgccgggccctccggaggctgaggggggaacagcgcggccaggagcccctcgggcccggcgccttgcatttcgatctccgtgatgacgatgacgcggaagaagaagggcccaagcgggagcttggtgtccggcgtcccgggggcgcagggaaggagggcgtccgagtcaacaaccgcttcgagctgataaacattgacgatcttgaggatgaccctgtggtgaacggggagaggtctggctgtgcgctcacagacgctgtggcaccagggaacaaaggaaggggtcagcgtggaaacacagagagcaagacggatggagatgacaccgagacagtgccctcagagcagtctcatgcaagtggcaaactccggaagaagaaaaaaaaacagaaaaacaagaaaagcagcacgggagaagcatcggaaaacggactagaagatatcgatcgcatcctagagaggattgaggacagcactgggttgaaccgtcccggcccagctcccctgagctccaggaagcacgttctctacgtggagcacagacacttgaatccagacacagaactgaaaaggtattttggtgcccgggcaatcctgggggagcaaagagacagggtcttgctgggttgtccagtctggttttgaactcgtggcctcaagtgatcctcccatctcagtctcccaaatagctgggactaccggcacatgccaccgctaatttattttattttattttttatagaaacaaggtcttactttgttgcccagggtgatgtcaaactcctggcttcaagcgattctcctccctctacctcctaaagtgctaggattacaggcatgagccaccacgcccagccagacacatcctgttttattggaccatggagagtattgctggtctataacatgccctgggtttgcacgtctgagttcttttttttttttttcgagacagaattttgctcttgttgcccaggctggagtgcaatggctcaatcttggctcaccacaacctccgcctcccgggttcaagtgattctcctgcctcagcttcccaagtagctgggattacaggcgagtgccaccatgctcggcaaatttttgtatttttggtagagacggggtttcaccatgttggccaggctggtctcgatctcctgacctcaagtgatccgccagtctcggcctcccaaagtgctgggattacagccctgagccactgcgcccggcctcccaaagtgctgggattacaggcgtgagccaccacacccagcctaagtgttgtttctgcaccatggtatacccaggtcatttcctcaccccaatggtagcatgtgtccagatgttggctacagtccccggtgtctgcaggcatttctgtgaaactgcccaagaatgagtatatatcctgcatgctgccagtgccttcagtagagttacgtggctcacactgagtgtctgcccaggtccttcaccttcttactcgtagtcgacggtagtggtttggaaacctgccgtcgtgtgtgggcagaagtgttggggttttgattgtgggtagatcaaggatgttttcatatgctgttgttcacgccttccctggatttctaacaggttttgctttatattttactttacatttttggtgttgatgggtttcttcgggaatattaattaaaaatagactttaaaatgtc

SEQ ID NO: 183513 - protein, 1556 aa, Artificial Sequence
  derived and/or modified sequence
MADRSLEGMALPLEVRARLAELELELSEGDITQKGYEKKRSKLIGAYLPQPPRVDQALPQERRAPVTPSSASRYHRRRSSGSRDERYRSDVHTEAVQAALAKHKERKMAVPMPSKRRSLVVQTSMDAYTPPDTSSGSEDEGSVQGDSQGTPTSSQGSINMEHWISQAIHGSTTSTTSSSSTQSGGSGAAHRLADVMAQTHIENHSAPPDVTTYTSEHSIQVERPQGSTGSRTAPKYGNAELMETGDGVPVSSRVSAKIQQLVNTLKRPKRPPLREFFVDDFEELLEVQQPDPNQPKPEGAQMLAMRGEQLGVVTNWPPSLEAALQRWGTISPKAPCLTTMDTNGKPLYILTYGKLWTRSMKVAYSILHKLGTKQEPMVRPGDRVALVFPNNDPAAFMAAFYGCLLAEVVPVPIEVPLTRKDAGSQQIGFLLGSCGVTVALTSDACHKGLPKSPTGEIPQFKGWPKLLWFVTESKHLSKPPRDWFPHIKDANNDTAYIEYKTCKDGSVLGVTVTRTALLTHCQALTQACGYTEAETIVNVLDFKKDVGLWHGILTSVMNMMHVISIPYSLMKVNPLSWIQKVCQYKAKVACVKSRDMHWALVAHRDQRDINLSSLRMLIVADGANPWSISSCDAFLNVFQSKGLRQEVICPCASSPEALTVAIRRPTDDSNQPPGRGVLSMHGLTYGVIRVDSEEKLSVLTVQDVGLVMPGAIMCSVKPDGVPQLCRTDEIGELCVCAVATGTSYYGLSGMTKNTFEVFPMTSSGAPISEYPFIRTGLLGFVGPGGLVFVVGKMDGLMVVSGRRHNADDIVATALAVEPMKFVYRGRIAVFSVTVLHDERIVIVAEQRPDSTEEDSFQWMSRVLQAIDSIHQVGVYCLALVPANTLPKTPLGGIHLSETKQLFLEGSLHPCNVLMCPHTCVTNLPKPRQKQPEIGPASVMVGNLVSGKRIAQASGRDLGQIEDNDQARKFLFLSEVLQWRAQTTPDHILYTLLNCRGAIANSLTCVQLHKRAEKIAVMLMERGHLQDGDHVALVYPPGIDLIAAFYGCLYAGCVPITVRPPHPQNIATTLPTVKMIVEVSRSACLMTTQLICKLLRSREAAAAVDVRTWPLILDTDDLPKKRPAQICKPCNPDTLAYLDFSVSTTGMLAGVKMSHAATSAFCRSIKLQCELYPSREVAICLDPYCGLGFVLWCLCSVYSGHQSILIPPSELETNPALWLLAVSQYKVRDTFCSYSVMELCTKGLGSQTESLKARGLDLSRVRTCVVVAEERPRIALTQSFSKLFKDLGLHPRAVSTSFGCRVNLAICLQGTSGPDPTTVYVDMRALRHDRVRLVERGSPHSLPLMESGKILPGVRIIIANPETKGPLGDSHLGEIWVHSAHNASGYFTIYGDESLQSDHFNSRLSFGDTQTIWARTGYLGFLRRTELTDANGERHDALYVVGALDEAMELRGMRYHPIDIETSVIRAHKSVTECAVFTWTNLLVVVVELDGSEQEALDLVPLVTNVVLEEHYLIVGVVVVVDIGVIPINSRGEKQRMHLRDGFLADQLDPIYVAYNM

SEQ ID NO: 183514 - protein, 155 aa, Artificial Sequence
  derived and/or modified sequence
  misc_feature (1)..(1): Xaa can be any naturally occurring amino acid
XVYSGHQSILIPPSELETNPALWLLAVSQYKVRDTFCSYSVMELCTKGLGSQTESLKARGLDLSRVRTCVVVAEERPRIALTQSFSKLFKDLGLHPRAVSTSFGCRVNLAICLQCWDYRHEPPRPAPKCFKMVYKEGVRSVGEDKIREKRTKTWR

SEQ ID NO: 183515 - DNA, 4671 bp, Artificial Sequence
  derived and/or modified sequence
atggccgacagaagtctggaggggatggcccttccactagaggtgcgagccaggctggctgagctggagctcgagctgagcgagggagacatcactcaaaagggctatgagaaaaaaaggagtaaactgatcggtgcttatctgcctcagcctccaagagtggatcaggccctccctcaggaaaggagggcccctgtaacccccagctccgccagccgctaccacagacgccggtcttccggatcccgagacgagagatatagaagtgacgttcatacagaggcagttcaggctgccttggcaaagcataaagagagaaagatggccgtgccgatgcctagcaaaagaagatctcttgtcgtgcagacatccatggatgcgtatacaccgccagatacaagttctgggagtgaggacgagggcagcgtgcagggcgacagccagggcacaccaacatcatcccaagggtcgatcaacatggaacactggatcagccaggcgatccacgggtctaccactagcaccacaagttcctcttcaacacagtcaggcggatccggagccgcccatcgtctggccgacgtcatggcccagacacatatagagaaccactcagccccaccggatgtcacaacatatacgtccgagcactccatccaagtagagcgccctcagggatcaactgggtctaggacagccccgaagtacggaaatgccgaactgatggaaacaggcgatggcgtcccagtgtctagccgggtctcggccaaaattcagcaactggtgaacacactgaaacggcccaaacggcctcctctgcgcgagttttttgtggatgacttcgaggaattgctggaggttcagcagcctgatccgaaccagccaaagcctgagggggctcagatgttagctatgcgtggagagcagttaggcgtagtaacaaactggcccccaagcctcgaggcggcacttcagcgttgggggaccattagcccaaaagccccttgccttacgacaatggataccaacgggaaacctctctacattctgacatacggcaagctgtggacccggagtatgaaagtcgcctattcaatcctgcacaagctgggaacaaagcaggagcctatggtccggcccggtgacagggtcgccctggtcttcccaaacaatgacccagccgccttcatggcagccttctatggctgcctgctggctgaggtagtcccagttccaattgaggtgcccctgacccggaaggatgctggcagtcaacagattgggtttttattaggatcctgcggggttaccgtggctctgaccagtgacgcctgtcataagggcctgcccaagagtcctaccggggaaatcccgcagttcaaaggatggccaaaactgctctggttcgtaactgaatccaaacatttgagtaagcctccgagagactggtttccccatattaaggatgctaataatgacaccgcttacatagagtataaaacttgtaaggacggtagcgttctgggtgtaacagtcacgagaaccgcactcttaacccattgccaggccctgactcaggcttgcgggtacacggaggccgaaaccattgtaaacgtgctggacttcaaaaaggacgtcggtctgtggcatgggattctaacttctgtgatgaacatgatgcatgttatcagcattccctatagcctgatgaaggtcaatccactatcctggatccaaaaggtatgccagtacaaagctaaggtggcatgtgtcaaatctagagacatgcattgggccctagtagctcaccgcgatcagcgggacatcaatctatccagcctgcgcatgctgattgtagccgacggggccaacccctggagcatttcttcgtgcgatgccttcctcaacgtttttcaatccaagggcttgcggcaggaggtcatctgtccctgtgcctcctcccccgaagctttgaccgttgctatcagacggcccacagacgatagcaaccagccacccggcagaggcgtattgagcatgcatggactgacttacggcgtcattcgagtcgacagcgaagaaaagctatcggtcttaactgtgcaggacgtgggcctggttatgcccggggccattatgtgctccgtgaaacctgacggggtgcctcagttgtgccgcacagacgagatcggtgagttatgcgtttgtgcagttgccacgggaaccagctactatggtctgtctgggatgaccaaaaacacatttgaagtcttcccaatgacaagcagcggcgctcccatttccgagtacccatttattaggacgggtcttttggggttcgtgggccctggcggcttggtcttcgtggtcggcaagatggatggtttgatggtcgtaagtggccgcaggcataatgcggacgacatagtagccacagccctggcagtggagcctatgaagttcgtataccgagggcgtatcgctgtattttctgttaccgtattgcacgatgaacggatcgtgatagtcgctgagcaacgccctgactccacagaggaggactccttccagtggatgtcaagagtccttcaggcaatagacagcatacatcaggtaggagtttattgcctggcacttgtcccagcaaatactctccctaaaacccctctgggaggaatccacctctctgagaccaagcagttgttcctggagggttctctgcacccttgcaatgtcctgatgtgtcctcacacttgcgttactaatcttcccaagcctcggcaaaaacagcccgaaattggtcccgccagcgtaatggtggggaatctggtgagcggaaagaggattgctcaagcttctggtcgcgatttggggcagatcgaggataacgatcaagcgcgaaagttcctgtttctgagtgaggtgctacagtggagagcgcaaactacccccgaccatattttatacacgctcctcaactgcagaggcgcaatcgctaactccctcacatgcgtgcaactgcacaaacgtgcagaaaagatcgcagtgatgttgatggagaggggacatctgcaagatggggatcacgtggccttggtttacccccccggaatagatctgatcgcggccttttacgggtgcctttacgctggatgcgtgccaatcaccgtgcggccccctcacccccaaaatattgcaactacattgcccacagtgaaaatgattgtagaagtgtcgcgaagcgcctgcctgatgactacacaactcatatgtaagttgcttaggtcgagggaggccgcagctgcagtggacgtgcgcacatggccccttattctcgataccgacgatctgccaaagaaacggcccgcgcagatatgcaagccctgcaatcctgacaccttagcgtacctcgacttctcggtgagcacaactggcatgctggcgggggtcaagatgagccatgctgccacctctgcattttgcaggagcattaagttgcagtgcgaattataccccagccgggaagtggctatctgtttggatccatactgcggtctgggtttcgtattatggtgtctatgtagcgtctattccggacaccagagtatccttatcccaccgagcgagctagaaacaaaccccgctctgtggctccttgcagtgagccaatataaggtgcgcgacacattttgttcttactctgttatggaactgtgtacaaagggcttgggaagtcagacggaatcattaaaggcaagggggcttgacttaagtcgggtaagaacctgcgtggtggtcgccgaggaacgccctaggatcgccctaacacaaagcttttccaaattgtttaaggatctaggactgcaccccagggcagtgtccactagcttcggctgccgagtcaatctggctatttgccttcaaggtacgtcgggcccggacccaaccaccgtgtacgtggacatgagagctttgagacatgacagagtgcgactggttgagaggggcagcccccattccctgccactcatggagagcggtaagatactgccaggggtgaggattataattgctaacccagaaactaaaggcccccttggtgactctcatctcggcgagatttgggtgcactcagctcataacgcgtcaggctatttcacaatctacggagacgaatcattgcaaagtgatcatttcaatagtaggctcagcttcggggacacacaaaccatctgggccagaacgggatatctcggattcttacgacggacagaactcaccgatgcaaatggtgagaggcacgatgctctttacgttgttggcgcgctggatgaggccatggagttacgagggatgaggtaccatccaatcgatattgagacttcagtgatacgggcgcacaagtccgtgactgagtgtgcggtttttacatggactaacctcctggtggtggtggtcgaactcgatgggtcagagcaggaagctttggatttggtcccgctagtgaccaatgtggtcctggaagaacattaccttattgtcggcgtagtcgttgtggtcgatatcggcgtcattcccataaatagtagaggggaaaaacagcgcatgcacctgcgcgacggctttctggctgatcagctggatccgatctatgtcgcctataacatgtag

SEQ ID NO: 183516 - DNA, 1971 bp, Artificial Sequence
  derived and/or modified sequence
atggcagttcctatgccgtccaagcgccggtcactggtggttcaaacctcaatggacgcgtacacacccccggatacatccagtgggtcagaggatgagggatctgtgcagggagacagccagggcaccccaacctcatcacagggttccatcaatatggaacattggataagtcaagctatccatggctccacaacatctaccacctccagtagctccactcagagcggcgggagtggagctgcgcatcgcttggctgacgttatggcccagacacacatagagaatcactccgcaccacccgacgtcacaacatacacctccgagcattcaatccaggttgagagacctcagggtagcacagggtcaaggacagcacctaaatatggtaacgcggaactcatggagacaggagatggcgtacctgtctcgtctagggtgagcgccaaaatccagcagctggtgaataccttgaagaggccaaaaagacctcctctacgcgagttcttcgtggatgatttcgaagagctgctagaagtgcaacagcctgaccccaaccagcctaaaccagagggtgcacagatgcttgctatgcgtggtgagcagctgggggtcgtgaccaactggcccccttcactagaagctgctctgcagcggtggggtacaatctcccccaaggccccttgcttgaccactatggacaccaatgggaagcctctctatattctgacttacggcaagctgtggacacgcagtatgaaagtcgcctattcgatcctccataagttgggtaccaagcaagaacccatggtacgccctggcgaccgggttgctctggtgttccctaacaacgaccccgcagccttcatggccgccttctacggttgtctgctcgcagaggttgtgcctgtgccaattgaagtccccctgacaaggaaagacgctggctctcagcagatcggtttccttttaggctcgtgtggagtgaccgtagccttaacctccgacgcctgtcacaagggactgccaaagagcccaacgggcgaaattccacagttcaaaggatggccaaaacttctttggtttgtgacagagagcaagcacctgagtaagcctccccgagattggttcccacatatcaaagacgctaataacgacacagcctatatcgaatataaaacctgcaaagacgggagtgtgctcggtgtaactgtcaccagaacagcactgctgacacactgccaggcacttacacaggcatgcggctacacagaggccgagaccatcgtgaacgtgctcgatttcaaaaaggacgtaggcttatggcacggtattcttacgagtgtgatgaacatgatgcacgtgatatctattccctattctctgatgaaagttaaccccctgtcttggatccagaaagtctgtcagtacaaggcgaaggtggcatgcgtaaagtcccgggacatgcactgggcactggtggcacaccgcgatcagcgggatatcaacctgtcgagcctgcgcatgctcatcgtggctgacggcgccaacccttggagcatctcctcttgtgatgccttcctaaatgtcttccaatcaaaaggactgagacaggaggtcatctgtccctgcgcctccagtcccgaggcactcaccgtggcaatacgccgaccgactgatgattcaaatcagcccccgggaaggggtgtgctctctatgcacgggctgacctacggtgtgattcgagtagattcagaagaaaaactgtcagtgctgactgtacaggacgtaggcctggtgatgcctggagcgatcatgtgcagcgtgaaacccgatggggtcccccagttatgcaggaccgatgagattggagagctgtgcgtctgcgcagtggcaacaggcacctcatactacggcctctctgggatgacaaagaatacgtttgagcacacaagtaacaaaggaaaatag

SEQ ID NO: 183517 - DNA, 1446 bp, Artificial Sequence
  derived and/or modified sequence
atttgggtgagtagaagtgcgtgcctcatgactactcagttaatttgtaagctcctccgaagtcgcgaggctgcagcagcagtagacgtgcggacctggccgctaatcctggacacggatgacctccccaaaaaacgccctgctcaaatttgtaaaccatgcaatcctgacacactggcttatctagatttttccgtgtcaacgacgggaatgttagctggagtgaaaatgtctcatgccgccacgagcgcattctgtcgttccattaagctgcagtgcgagctgtatccatccagagaggtggcaatttgcttggacccgtactgcgggctcggctttgtcctttggtgtctttgtagcgtttatagcggccaccagtctattttgatacccccttctgaactcgagactaacccagctctctggctgctcgcggtctcacagtataaggtgagagacaccttttgctcatattccgtgatggagctgtgtaccaagggtctgggcagccagaccgaatctctgaaagcgcgaggtctggatctgagccgagtgaggacttgtgtagttgttgccgaagagcgtccgagaattgctcttacacagtccttttctaaattattcaaggacctgggacttcaccctcgggcagtaagtaccagttttggctgccgggtgaatctggccatttgtctgcagggtaccagcggacctgaccctactaccgtatatgtggacatgagagctctgcggcacgatagagttcgactggttgagcggggaagcccccactccttacccctgatggagagcggtaagatcctgccaggggtgcgcattattattgccaacccagagactaagggtcccctcggcgattctcacctgggtgagatttgggtccattcagcccacaacgcttctggttactttacgatctacggagacgagagccttcagagcgatcacttcaactcacgattaagcttcggtgatacacagacaatctgggctagaactggctacctaggcttcctccggcggactgagcttaccgacgcaaatggcgaaaggcatgacgcgttgtacgttgttggcgctctcgatgaagccatggagctccggggaatgaggtatcacccgattgatatcgaaacctctgtgattcgggcacacaaatctgttacggaatgcgccgtgttcacttggactaatctgctcgttgtggttgtggaactggatggctccgagcaggaagccctcgacctggtccctttggtgaccaatgtcgtcttggaagagcattacctgatcgtgggggttgttgtggtagttgatatcggagtgataccgattaattccaggggagagaagcagcgcatgcacttgcgtgatggatttctcgctgaccagctagacccaatatacgtcgcctacaatatgtag

SEQ ID NO: 183518 - DNA, 4671 bp, Artificial Sequence
  derived and/or modified sequence
atggctgacaggagcctggagggcatggccctgcccctggaggtgcgggcccggctggccgagctggagctggagctgtctgagggggacatcacccagaagggctatgagaagaagaggagcaagctgattggagcctacctgccccagcccccccgggtggaccaggccctgccccaggagcggcgggcccctgtgacccccagcagcgccagccgctaccacagaagaagaagcagcggcagcagagatgagcgctacagaagtgatgtgcacacagaagctgtgcaggccgccctggccaagcacaaggagaggaagatggctgtgcccatgcccagcaagaggaggagcctggtggtgcagacctccatggatgcctacaccccaccagacaccagcagcggctctgaagatgagggctctgtgcagggcgacagccagggcacccccaccagcagccagggcagcatcaacatggagcactggatcagccaggccatccacggcagcaccaccagcaccaccagcagcagcagcacccagagcggcggcagcggggccgcccaccggctggctgatgtgatggcccagacccacatcgagaaccacagcgcccccccagatgtgaccacctacaccagcgagcacagcatccaggtggagcggccccagggcagcacaggcagcaggacagcccccaagtatggaaatgctgagctgatggagactggagatggagtgcctgtgagcagccgggtgtctgccaagatccagcagctggtgaacaccctgaagaggcccaagaggcctcccctgcgggagttctttgtggatgactttgaggagctgctggaggtgcagcagcctgaccccaaccagcccaagccagagggcgcccagatgctggccatgagaggagagcagctgggcgtggtgaccaactggccacccagcctggaggccgccctgcagcgctggggcaccatcagccccaaggccccctgcctgaccaccatggacaccaacgggaagcccctgtacatcctgacctacggcaagctgtggaccaggtccatgaaggtggcctacagcatcctgcacaagctgggcaccaagcaggagcccatggtgcggcctggggacagagtggccctggtgttccccaacaatgaccctgctgccttcatggccgccttctacggctgcctgctggccgaggtggtgcctgtgcccatcgaggtgcccctgaccaggaaggatgctggcagccagcagatcggcttcctgctgggcagctgtggggtgacagtggccctgaccagtgatgcctgccacaagggcctgcccaagagccccaccggggagatcccccagttcaagggctggcccaagctgctgtggtttgtgacagagagcaagcacctgagcaagccaccccgggactggttcccccacatcaaggatgccaacaatgacacagcctacatcgagtacaagacctgcaaggatggctctgtgctgggcgtgacagtgaccaggacagccctgctgacccactgccaggccctgacccaggcctgtggctacacagaagctgagaccatcgtgaatgtgctggacttcaagaaggatgtgggcctgtggcacggcatcctgacctctgtgatgaacatgatgcacgtgatcagcatcccctacagcctgatgaaggtgaaccccctgtcctggatccagaaggtgtgccagtacaaggccaaggtggcctgtgtgaagagccgggacatgcactgggccctggtggcccaccgggaccagagggacatcaacctgagcagcctgaggatgctgattgtggctgatggagccaacccctggagcatcagcagctgtgatgccttcctgaatgtgttccagagcaagggcctgcggcaggaggtgatctgcccctgtgccagcagccctgaggccctgactgtggccatcagaagacccacagatgacagcaaccagcccccaggccggggcgtgctgtccatgcacggcctgacctatggagtcatccgggtggacagcgaggagaagctgtctgtgctgactgtgcaggatgtgggcctggtgatgcctggggccatcatgtgcagcgtgaagccagatggagtgccccagctgtgcaggacagatgagatcggggagctgtgtgtgtgtgctgtggccaccggcaccagctactacggcctgagcggcatgaccaagaacacctttgaggtgttccccatgaccagcagcggggcccccatcagcgagtaccccttcatcagaacaggcctgctgggctttgtgggccctgggggcctggtgtttgtggtgggcaagatggatggcctgatggtggtgtctggccgccgccacaatgctgatgacatcgtggccacagccctggccgtggagcccatgaagtttgtgtaccggggcagaattgctgtgttttctgtgacagtgctgcatgatgagcgcatcgtcatcgtggccgagcagaggccagacagcacagaagaagattccttccagtggatgagccgggtgctgcaggccatcgacagcatccaccaggtgggcgtgtactgcctggccctggtgcctgccaacaccctgcccaagacccccctgggcggcatccacctgtctgagaccaagcagctgttcctggagggcagcctgcacccctgcaatgtgctgatgtgcccccacacctgtgtgaccaacctgcccaagccccggcagaagcagcctgagatcggccctgcctctgtgatggtgggcaacctggtgtctgggaagagaattgcccaggccagcggccgggacctgggccagattgaagataatgaccaggccaggaagttcctgttcctgtctgaggtgctgcagtggagggcccagaccaccccagaccacatcctgtacaccctgctgaactgccgcggggccatcgccaacagcctgacctgtgtgcagctgcacaagagagctgagaagattgctgtgatgctgatggagcggggccacctgcaggatggagaccacgtggccctggtgtacccacctggcatcgacctgattgctgccttctacggctgcctgtatgccggctgtgtgcccatcaccgtgcggcccccccacccccagaacatcgccaccaccctgcccaccgtgaagatgattgtggaggtgagccgcagcgcctgcctgatgaccacccagctgatctgcaagctgctgcggagccgggaggccgctgctgctgtggatgtgaggacctggcccctcatcctggacacagatgacctgcccaagaagaggcctgcccagatctgcaagccctgcaacccagacaccctggcctacctggacttctctgtgtccaccaccggcatgctggccggcgtgaagatgagccatgctgccaccagcgccttctgccgcagcatcaagctgcagtgtgagctgtaccccagccgggaggtggccatctgcctggacccctactgcggcctgggctttgtgctgtggtgcctgtgcagcgtgtacagcggccaccagagcatcctgatcccccccagcgagctggagaccaacccagccctgtggctgctggccgtgtcccagtacaaggtgcgggacaccttctgcagctacagcgtgatggagctgtgcaccaagggcctgggcagccagacagagagcctgaaggcccggggcctggacctgagccgggtgaggacctgtgtggtggtggccgaggagcggcccagaattgccctgacccagagcttcagcaagctgttcaaggacctgggcctgcaccccagggctgtgtccaccagctttggctgccgggtgaacctggccatctgcctgcagggcaccagcggccctgaccccaccaccgtgtatgtggacatgagggccctgcggcatgacagagtgcggctggtggagcggggcagcccccacagcctgcccctgatggagagcggcaagatcctgcccggggtgcgcatcatcatcgccaaccctgagaccaagggccccctgggggacagccacctgggggagatctgggtgcacagcgcccacaatgccagcggctacttcaccatctatggagatgagagcctgcagagcgaccacttcaacagccggctgagctttggagacacccagaccatctgggccaggacaggctacctgggcttcctgcggaggacagagctgacagatgccaacggggagagacatgatgccctgtatgtggtgggcgccctggatgaggccatggagctgcggggcatgagataccaccccattgatattgagaccagcgtcatccgggcccacaagtctgtgacagaatgtgctgtgttcacctggaccaacctgctggtggtggtggtggagctggatggcagcgagcaggaggccctggacctggtgcccctggtgaccaacgtggtgctggaggagcactacctgattgtgggcgtggtggtggtggtggacatcggggtcatccccatcaacagcagaggagagaagcagaggatgcacctgagagatggcttcctggccgaccagctggaccccatctacgtggcctacaacatgtag

SEQ ID NO: 183519 - DNA, 1971 bp, Artificial Sequence
  derived and/or modified sequence
atggctgtgcccatgcccagcaagagaagaagcctggtggtgcagacctccatggatgcctacaccccaccagacaccagcagcggctctgaagatgagggctctgtgcagggcgacagccagggcacccccaccagcagccagggcagcatcaacatggagcactggatcagccaggccatccacggcagcaccaccagcaccaccagcagcagcagcacccagagcggcggcagcggggccgcccaccggctggctgatgtgatggcccagacccacatcgagaaccacagcgcccccccagatgtgaccacctacaccagcgagcacagcatccaggtggagcggccccagggcagcacaggcagcaggacagcccccaagtatggaaatgctgagctgatggagactggagatggagtgcctgtgagcagccgggtgtctgccaagatccagcagctggtgaacaccctgaagaggcccaagaggcctcccctgcgggagttctttgtggatgactttgaggagctgctggaggtgcagcagcctgaccccaaccagcccaagccagagggcgcccagatgctggccatgagaggagagcagctgggcgtggtgaccaactggccacccagcctggaggccgccctgcagcgctggggcaccatcagccccaaggccccctgcctgaccaccatggacaccaacgggaagcccctgtacatcctgacctacggcaagctgtggaccaggtccatgaaggtggcctacagcatcctgcacaagctgggcaccaagcaggagcccatggtgcggcctggggacagagtggccctggtgttccccaacaatgaccctgctgccttcatggccgccttctacggctgcctgctggccgaggtggtgcctgtgcccatcgaggtgcccctgaccaggaaggatgctggcagccagcagatcggcttcctgctgggcagctgtggggtgacagtggccctgaccagtgatgcctgccacaagggcctgcccaagagccccactggagagatcccccagttcaagggctggcccaagctgctgtggtttgtgacagagagcaagcacctgagcaagccaccccgggactggttcccccacatcaaggatgccaacaatgacacagcctacatcgagtacaagacctgcaaggatggctctgtgctgggcgtgacagtgaccaggacagccctgctgacccactgccaggccctgacccaggcctgtggctacacagaggccgagaccatcgtgaatgtgctggacttcaagaaggatgtgggcctgtggcacggcatcctgacctctgtgatgaacatgatgcacgtgatcagcatcccctacagcctgatgaaggtgaaccccctgtcctggatccagaaggtgtgccagtacaaggccaaggtggcctgtgtgaagagccgggacatgcactgggccctggtggcccaccgggaccagagggacatcaacctgagcagcctgaggatgctgattgtggctgatggagccaacccctggagcatcagcagctgtgatgccttcctgaatgtgttccagagcaagggcctgcggcaggaggtgatctgcccctgtgccagcagccctgaggccctgactgtggccatccggcggcccacagatgacagcaaccagcccccaggccggggcgtgctgtccatgcacggcctgacctacggcgtcatccgggtggacagcgaggagaagctgtctgtgctgactgtgcaggatgtgggcctggtgatgcctggggccatcatgtgcagcgtgaagccagatggagtgccccagctgtgcaggacagatgaaattggagagctgtgtgtgtgtgctgtggccaccggcaccagctactacggcctgagcggcatgaccaagaacacctttgagcacaccagcaacaagggcaagtag

SEQ ID NO: 183520 - DNA, 1446 bp, Artificial Sequence
  derived and/or modified sequence
atctgggtgagccgcagcgcctgcctgatgaccacccagctgatctgcaagctgctgcggagccgggaggccgctgctgctgtggatgtgaggacctggcccctcatcctggacacagatgacctgcccaagaagaggcctgcccagatctgcaagccctgcaacccagacaccctggcctacctggacttctctgtgtccaccaccggcatgctggccggcgtgaagatgagccacgccgccaccagcgccttctgccgcagcatcaagctgcagtgtgagctgtaccccagccgggaggtggccatctgcctggacccctactgcggcctgggctttgtgctgtggtgcctgtgcagcgtgtacagcggccaccagagcatcctgatccccccatctgagctggagaccaacccagccctgtggctgctggccgtgtcccagtacaaggtgcgggacaccttctgcagctacagcgtgatggagctgtgcaccaagggcctgggcagccagacagagagcctgaaggcccggggcctggacctgagccgggtgaggacctgtgtggtggtggccgaggagcggccccgcatcgccctgacccagagcttcagcaagctgttcaaggacctgggcctgcaccccagggctgtgtccaccagctttggctgccgggtgaacctggccatctgcctgcagggcaccagcggccctgaccccaccaccgtgtatgtggacatgagggccctgcggcatgacagagtgcggctggtggagcggggcagcccccacagcctgcccctgatggagagcggcaagatcctgcccggggtgcgcatcatcatcgccaaccctgagaccaagggccccctgggggacagccacctgggggagatctgggtgcacagcgcccacaatgccagcggctacttcaccatctatggagatgagagcctgcagagcgaccacttcaacagccggctgagctttggagacacccagaccatctgggccaggacaggctacctgggcttcctgcggaggacagagctgacagatgccaatggagagagacatgatgccctgtatgtggtgggcgccctggatgaggccatggagctgcggggcatgagataccaccccatcgacatcgagaccagcgtcatccgggcccacaagtctgtgacagaatgtgctgtgttcacctggaccaacctgctggtggtggtggtggagctggatggcagcgagcaggaggccctggacctggtgcccctggtgaccaacgtggtgctggaggagcactacctgattgtgggcgtggtggtggtggtggacattggagtcatccccatcaacagcagaggagagaagcagaggatgcacctgagagatggcttcctggccgaccagctggaccccatctacgtggcctacaacatgtag

SEQ ID NO: 183521 - DNA, 4671 bp, Artificial Sequence
  derived and/or modified sequence
atggccgaccggagcctggagggcatggccctgcccctggaggtgcgagcccgactcgccgaacttgagctcgaactttccgaaggcgacattacccagaaggggtatgaaaaaaagcgctctaaactgatcggcgcatacctaccgcagccaccacgggtggaccaagcactgcctcaggagcggcgggcgccggtgacaccttcttccgcttcaaggtatcatcgtaggagatcttcagggagccgcgatgaacggtatcggagcgatgtacatacagaggccgtgcaggctgccctggccaagcataaagagcgcaaaatggcagtacccatgccatccaagcgacgcagcctggtggtccaaacctccatggacgcatacacccctcccgacaccagtagcgggagtgaagacgaggggtccgtgcagggagacagccaaggaacccccacctcatctcagggttcgatcaatatggagcactggatttcccaagccattcatggatctacgaccagcacgactagcagctcttccacccagagcggggggtcaggcgccgctcaccgactggcagatgtgatggcccagacccacatcgaaaatcattccgcaccaccggatgtcactacatataccagcgaacatagtatccaggtggagagacctcaaggcagtactggaagtaggaccgctcccaaatatggaaacgccgagctgatggagacaggcgatggggtcccagtttcctcacgggtgagcgcaaaaatccagcagttagtgaacacgctgaagagacctaagcgcccacccttacgcgagttttttgtcgatgactttgaagaactactcgaagtccagcagccagaccctaatcaaccaaagcctgagggagcgcagatgctggcaatgcgtggcgaacagttaggggttgtcactaattggccaccaagcttagaggcagctctgcaacgctggggcaccatctcacccaaggcaccatgtctaacaaccatggatactaatggtaaacctctgtacattcttacctacggaaaactgtggacccggagcatgaaagtcgcatactctattcttcacaagctgggcaccaaacaagagcctatggtccggcctggcgacagggtcgctctggtcttcccaaacaatgaccccgcagccttcatggccgctttttacggttgccttctcgcagaggttgtgccagtgcctattgaggtacccctgacacgaaaggatgctggtagccagcagatcggcttcttgttgggatcttgtggcgtaacggtcgctctgacctccgacgcatgccacaaaggactgcccaaatctcctacgggcgaaataccgcagttcaagggctggcctaaactcctctggttcgtcaccgagagcaaacacttgagcaagccaccaagggactggttcccacatattaaggacgcaaacaatgacacagcatacatcgagtataagacttgcaaggatggctccgtgctcggtgtcaccgttactaggacggctctgctgacccactgccaggccttgacccaggcatgcggttacacggaggcagagaccatagtgaacgttctcgatttcaagaaagatgtcggcctatggcacgggattttaacctcagtgatgaatatgatgcacgtgatcagcatcccatatagcctaatgaaggttaacccactcagctggatccagaaagtttgccagtataaagcgaaggtggcctgtgtcaagtctagggacatgcattgggcccttgtggctcatagggatcagagagatattaatctgtcgtctttaagaatgctaatcgtggccgatggtgccaacccgtggagcatctcatcatgtgatgctttcctgaacgtattccagagtaaaggtctccggcaagaggtcatttgtccctgcgcgtctagtcccgaggcactcactgttgctataaggagacctacggatgactcgaatcagccacctggtcgtggagtgctgagtatgcacggactcacctacggcgttatccgggttgactccgaagagaagctgtctgtgctgacagtgcaagacgtggggctggtgatgcccggagcaattatgtgtagcgtgaagcccgacggcgtgccacagttgtgtaggactgacgaaattggagagctgtgcgtgtgtgcagttgctaccggtacttcctactacggtctgtcaggcatgacaaaaaacacattcgaggtgttccccatgacttcttcaggcgcgcccatcagcgaatacccattcatcaggacagggctgctgggtttcgtgggcccagggggcctggtcttcgtcgttggaaagatggatgggttaatggtagtttccgggaggcgacacaatgccgacgatattgttgccactgcccttgccgtcgagcctatgaaatttgtgtatcgcgggcgcatcgctgtgttctcagtaacagtgcttcacgacgaaagaatcgtgatcgtcgcagagcaacggccggatagtactgaggaggacagtttccagtggatgtcccgtgtcctgcaggccatcgatagcattcatcaggtcggagtctactgcctggcccttgtcccggccaacacgttgccaaaaaccccactaggaggcatccacttaagtgagaccaaacagctgtttttggaggggagccttcacccctgtaatgtgctgatgtgcccccatacctgcgtgactaacctaccgaagccaaggcagaagcagcctgaaataggtcccgccagtgttatggtgggtaatctcgtgtctggtaaaaggatagcacaggcctctggtagggacttgggacagattgaggacaatgaccaggcaagaaagttcctgtttttgtcagaggtgctgcagtggagagcccaaacgacccctgaccatattctgtacaccctgctgaactgccgcggcgcaatcgctaatagcctgacgtgcgtgcagctccacaagagagccgagaaaatcgccgtaatgctgatggagagaggacacctgcaagatggggaccacgtcgcactggtatatcctccagggatcgacttgattgccgccttctatggatgcctttacgctgggtgcgtcccaatcacagtaaggcccccacatcctcagaacattgccactactctgccgacagtgaagatgattgtcgaagtgtcccgcagcgcctgcttgatgacaacccagctcatttgtaagctgcttcggagccgcgaggcagccgccgccgtggacgtgagaacctggccactgatcctggacaccgatgacctcccaaaaaagagacccgcccagatctgtaagccatgtaaccctgacaccctagcttacctggacttcagcgtgtccactaccggtatgctcgcaggtgtgaaaatgtctcacgccgccacatccgctttttgtaggagcatcaaactgcaatgcgaactatacccatcacgcgaggtcgcaatttgcctagacccatactgtggtctgggattcgtgctgtggtgcctctgtagtgtatactccggccatcaatccatcctgatccccccttcagaactggaaacgaacccagctttgtggctcctggcagtgagtcaatataaggttcgggacactttttgctcatacagcgtgatggaactgtgcaccaagggccttggttcccagaccgagagtttaaaggctcggggactcgatctctctcgagtgcggacctgcgtggtggtggctgaggagaggccacgtatcgctctgacacagagcttctccaaacttttcaaggacctcggcctccaccccagggctgtgagtacatcattcgggtgccgcgtgaatttggcaatctgcctccaggggaccagcggcccggatcctacaaccgtgtacgtcgacatgcgcgctttaagacacgatcgggtccgactggtagaaagaggaagcccgcactctttgccactgatggagagcggaaagatcctaccgggggtacgcatcattatcgcaaaccccgagacgaagggacccctgggcgatagccatctcggcgagatctgggttcattcggcacataatgcttcaggctattttactatttatggtgatgagagccttcaaagcgatcattttaatagcaggctgtcgtttggcgacactcaaacaatttgggcacggactggctatcttggattcctgcggcgcaccgagcttaccgatgcgaatggcgagcggcatgatgccctgtacgttgttggtgcattggacgaggccatggagctgaggggtatgagatatcatccaatcgatatcgaaacgtccgtgattagagcacacaagagcgtcactgaatgtgcagtgttcacttggactaacctgctggtcgtggtggtggaactggacgggagcgagcaagaagctctggacttagtgccccttgttactaatgtggtactagaagaacactatctgatcgtcggcgttgtggtggtcgtcgatataggagtgataccaattaactcccggggtgaaaaacagagaatgcatttgcgtgacggtttcttggctgaccaacttgaccccatttatgtggcgtataacatgtag

SEQ ID NO: 183522 - DNA, 1971 bp, Artificial Sequence
  derived and/or modified sequence
atggccgtgcccatgcccagcaagcggcggagcctggtggtgcagactagtatggatgcctacacaccacctgacacatcaagtggctccgaggacgaaggtagcgtgcagggggacagtcagggtacaccgacgtcaagccaagggtccatcaatatggagcactggatctctcaagcaatccatggctccactaccagtacaactagtagctcctccacacagagcggaggctcaggcgcggctcatagactggctgatgtcatggctcagactcacattgaaaatcatagcgcccctcccgatgtcaccacctacacctcagaacacagtatacaggtggagcggccccaggggagcaccggctcacggactgcaccgaaatatgggaatgcggagctgatggaaacaggggatggggtccctgtctcttctagagtgtctgccaagatccagcagctcgtgaataccctaaaaagacctaagcgtccgcctctgcgcgagtttttcgtcgatgactttgaggaattactcgaggtgcagcagcctgaccctaatcagcccaaaccagaaggagcccaaatgctggctatgcggggtgaacagctgggcgtcgtgactaattggccgcccagcctggaggctgcactgcagcgctggggtactatatctcctaaggcgccctgtctgacgacaatggataccaatgggaagcctttgtacatcctcacctacgggaagctgtggacgaggtctatgaaagtggcatatagcattctgcacaaactgggcactaagcaggaacccatggttaggccaggcgatcgggtcgctctggtgttcccaaataatgatccagcggcctttatggccgctttctacggatgcttgctggccgaggtggtgccagtgccgattgaagttcctcttactcggaaggacgctgggagccagcagattggattccttctcggttcgtgcggcgttacagttgcactgacgagcgatgcctgccacaaaggcttaccgaagtcgcctacaggtgagatcccacagttcaagggctggcccaagctcctgtggtttgttaccgaatcgaagcacctgtcgaagcctccccgggactggttccctcatattaaggacgcgaacaatgatacagcctacattgaatacaaaacctgtaaagatggcagtgtgctgggagttaccgtcacgaggactgcacttctgacacattgtcaggcgctaacccaggcctgcgggtatactgaagccgagactatcgtgaatgttcttgacttcaaaaaagacgtgggcctgtggcacgggatcctgacatcagttatgaacatgatgcacgtgatcagcattccatactccctcatgaaagtgaacccgctgtcatggatccagaaggtgtgtcaatataaggccaaagtcgcttgcgtgaagagtagagacatgcactgggcactggtcgcacacagggatcaaagggatatcaacctgagtagcttacggatgctgatagtagccgacggcgccaatccttggagcatctctagttgcgacgcctttctgaacgtgttccagagcaaagggctgagacaggaggttatctgcccatgcgcttcctccccagaggcgttaactgtggccattagaaggccaactgacgactctaatcagccccctggccgaggcgtattatctatgcacggcttaacctacggcgtgattcgcgtcgattccgaagaaaaactgagtgtgctcacagtacaggacgtcgggttagtgatgccaggtgcgataatgtgtagcgtgaagccggatggcgtcccacagctttgtagaacagatgaaattggcgagctgtgtgtgtgtgccgtggctaccggcactagttactatggtctgagcggaatgactaagaacacatttgagcacacatccaataaggggaagtag

SEQ ID NO: 183523 - DNA, 1446 bp, Artificial Sequence
  derived and/or modified sequence
atctgggtgagccggagcgcctgcctgatgaccacccagctgatctgcaagctgctgcggtctagagaggctgcagccgcagtagatgtgagaacctggcccctgattctggacactgacgacctaccaaagaagcggccagctcaaatttgcaagccatgcaacccggacactctcgcatacctagatttcagcgtttccaccactggcatgctggcaggggtcaagatgagccacgccgccacaagtgccttttgccggtcaatcaagcttcagtgcgagctgtatccgtcacgcgaagttgccatctgtctggacccctattgcgggctgggattcgtcctgtggtgcttatgtagtgtgtatagcgggcaccagtcaatattaatccctcctagcgaactggagacaaatcccgccttgtggctactcgccgtgtctcagtacaaggtccgggataccttttgctcttacagtgtcatggaactttgcactaaagggctaggaagccagactgagtccctgaaggcccgcggccttgacctgtcacgagtgaggacctgcgtggttgtcgcggaggagaggcctagaatcgctctcactcaaagcttttcgaaactatttaaagacctggggctccacccacgggctgtctctacctcctttggatgtagagtgaacctcgccatctgcctgcaaggcacaagtggccccgatcccacaacagtgtacgtcgatatgagagccctgcgacacgacagggtccgccttgtagaacgcggttccccacactcccttccacttatggagtcaggtaaaatactgccaggggtgaggattattatagctaatcccgagaccaaaggcccgctcggggattctcacctgggcgaaatttgggttcactcagcccacaacgcctccggctactttactatttacggggatgagagcctgcaatccgaccatttcaacagtcgcctttcattcggggatacccagactatttgggcaagaactggctaccttggatttctccgtcggacagaattgacggacgccaacggcgaacgtcatgatgcactgtatgttgttggggctctggatgaagcaatggaactcagaggcatgcggtatcacccaatcgatattgagacaagcgtgatcagggcccacaagtccgtaaccgagtgcgcagtcttcacatggactaatttactagtggtagttgtcgaattggacgggtctgagcaggaggcactggacctggtgcctctcgtgaccaatgtcgtgctggaagaacattatcttatcgttggagtcgttgtcgtggtcgacattggcgttatcccaataaattctcggggagagaaacagcggatgcacctgagagatggcttcctggctgatcagcttgatcctatatacgtggcatacaacatgtag

SEQ ID NO: 183524 - DNA, 4671 bp, Artificial Sequence
  derived and/or modified sequence
atggccgacagatcactagaaggaatggctctccctctagaagtcagggcacggttagccgagcttgaactcgaactctctgaaggggatataactcagaaaggctatgaaaagaaacggtccaaacttatcggggcatacctcccgcagcctcctcgggtggatcaggctctgccccaggaacgtcgcgcacccgtcactccaagctcggccagcagatatcatagacggaggagtagtggatctagggacgaaaggtacagaagcgatgttcatacagaagccgtgcaggctgctctcgcgaagcataaggagaggaaaatggccgtgccaatgccctccaagcggcgatcactggtggtgcagacatccatggacgcttacacacccccagatacaagctccggcagcgaggacgaaggttccgtgcagggagatagccaggggactcctacatcatcgcagggaagcattaacatggagcactggataagtcaagctattcatggcagcactacgtcgaccacaagttcttcctcgacacagtccgggggaagtggggctgcccacagactcgccgacgtgatggctcagacacacattgaaaatcacagcgctccgcctgatgtaaccacttacacctccgagcacagcatacaggtggagcggccacagggatccaccggctccagaaccgcaccaaagtacggtaacgccgagttgatggaaacgggagacggggtgcctgtgtcttctcgtgttagcgctaagatacagcagctcgtgaataccctgaaacgtccaaaacgccctccattaagggaattctttgtggacgatttcgaggaactgctcgaggtgcagcagccagatcctaatcagcccaagcctgaaggcgctcagatgctggccatgagaggagaacagctgggcgtggtcaccaactggcccccaagcctcgaggccgctctgcaacgctggggcaccatctcccctaaggcaccatgtctgaccacaatggacacaaacggaaagcctctgtacattctgacgtatggcaaactctggactcgctccatgaaagtggcatattccatcctgcataagttgggcaccaagcaggagccgatggtacggcctggagaccgggttgccctggtatttcccaacaacgacccggcagcctttatggctgctttctacgggtgtctgttagccgaagttgtgcctgtacccattgaggtcccactgacacggaaagacgcaggttctcagcagatcgggttccttcttggttcctgcggcgtaacagttgccctgactagcgacgcttgccacaagggtctgccaaagtcccccaccggcgaaattccccagttcaagggctggcctaagctgctctggtttgtgacagaatcgaagcacttgagtaagcctcccagagactggttcccgcatatcaaggatgcaaataacgataccgcctatattgagtacaagacctgcaaggacggcagcgtgctcggagtgacagtgacaaggacagcactgttaactcattgccaggcgctcactcaggcctgtggatacaccgaggctgagacaatcgtgaacgtattggatttcaaaaaggacgttggactgtggcacggaattctcacgtcagtgatgaatatgatgcatgtcattagcatcccgtactccttaatgaaggtgaaccccctgtcttggattcagaaggtgtgtcaatataaagccaaggtcgcatgtgtgaagagtcgggacatgcattgggcgctggttgctcacagagaccagcgcgacatcaacctcagtagtctccggatgctaatcgtggccgatggcgctaatccatggagtataagcagctgcgacgcatttctaaatgtttttcagtctaaaggcctgcggcaggaagtgatctgcccatgcgcctccagccctgaggcattgaccgtggccataagaagacctaccgacgattcaaatcagcccccaggacgtggcgtgctaagtatgcacggattgacatatggggtaatccgggttgactcagaggagaaactctcagtgttgaccgtccaagatgtgggattagtaatgcccggtgcaatcatgtgttcagtcaaaccagacggggttccccagctctgtaggactgatgagatcggcgagctgtgcgtttgcgctgtcgctacaggaacctcctattacggcttgagtggcatgactaaaaacaccttcgaggttttccccatgacctcttcaggcgcacctatctctgagtatccttttattagaacagggctcctcggatttgttggtccaggagggctggtgttcgtggtagggaagatggacggattgatggttgtaagtgggaggagacataatgctgacgacattgtggctaccgcactggccgtggagcctatgaagttcgtctatcgtggcaggattgccgtgttcagtgtgacagtgttacatgatgagcgtatcgttattgtcgccgagcagcggccagactcaaccgaggaggattcgttccagtggatgtccagggtcctgcaagccattgactcaattcatcaggtcggagtgtattgtctggcattggtgcccgcaaacacacttccaaagactccgttaggcggtatccacctgtccgagaccaaacagctctttctagaagggagcctgcacccatgtaatgtcctcatgtgtccacacacttgcgtgaccaaccttcccaagccaaggcagaaacagccagaaatcggccctgcgagtgtgatggtcgggaacctggttagtggcaagaggattgcacaggcaagcgggcgagacctgggtcagattgaagataatgatcaggcccgtaaattcctctttctgtcggaggtcctccagtggagggctcaaacgacccccgatcacatactgtacaccctgctgaattgccggggtgcaattgctaattccttgacatgtgttcagctacataagcgggcagagaaaatcgctgtgatgttaatggaaaggggccatctccaggatggagaccacgttgccctcgtctaccctcctggcattgatctgatcgccgcattctacggctgtttatacgccggatgcgttcccatcactgtgcgccctcctcacccacagaacatcgcaaccacattaccgaccgtgaaaatgattgtggaggtgagtagaagtgcctgtttgatgaccacgcagctaatttgtaaactgctgaggagtcgcgaggctgctgccgctgtcgacgttcgcacttggcccctgatcttggatacggatgatctgcccaagaaacgtcctgcccagatttgtaaaccatgtaaccccgatactttagcatatctggacttctccgtaagcacaaccgggatgctcgccggagtaaagatgtcccacgccgcaacatctgccttctgcaggagtataaagctccagtgtgagttgtacccctcccgtgaggttgccatatgcctcgacccatattgtggcttgggattcgtgctgtggtgtctctgctctgtgtatagtggtcaccagagtattctgattccgccaagcgagctcgaaacaaaccctgccctctggctattggccgtgagtcagtataaggtgcgcgacacattttgtagctacagtgtgatggaattgtgcaccaagggtctgggttcccagaccgaaagtcttaaggcccgtgggctggatctcagtcgcgttcgcacctgcgtcgtcgtggcggaggaaaggccaaggattgcccttacacagagctttagcaagttgtttaaggacttaggactgcacccaagggctgtgtccacatccttcggatgtagggttaaccttgctatctgcctccagggaacttccgggcctgaccctaccaccgtttatgtggacatgcgggcattacgacacgatcgcgtgcggctggtggagaggggatctccgcatagtctgcctctcatggagtctggtaagattctgcccggtgtccggatcattatcgccaacccagagaccaaaggccctctcggcgactctcacctcggagaaatctgggtacactcagcacacaacgcaagtgggtactttacaatttacggcgacgagtcattacagtcggatcatttcaacagccgtttgtcattcggggatacacagactatctgggcgaggacaggatacttgggatttctcagaaggacagaacttaccgacgcaaatggggagagacacgatgctctatacgtagtgggtgctttagatgaggccatggaactccgcggaatgaggtaccaccccatcgacatagaaacttccgtgatccgggcacacaagtccgtcaccgaatgtgctgtcttcacgtggacaaatttgctcgtggtggtggttgagcttgacggcagtgagcaggaggccctcgacttggttcctctggttaccaatgtggtacttgaggagcactatctgattgttggggtggttgtcgttgttgatattggcgttatccctattaattctaggggtgaaaagcaacgaatgcacctgcgagatggattcctcgcagaccagctagatcccatctacgtagcctataacatgtag

SEQ ID NO: 183525 - DNA, 1971 bp, Artificial Sequence
  derived and/or modified sequence
atggctgtgcctatgcccagcaagagaaggagtctcgtagtgcagacatctatggatgcctacacgccccctgatacctcttcaggcagtgaggatgaagggagtgtacaaggcgatagccaggggacacccacaagcagtcaaggctccatcaacatggagcattggatttcccaagccatccacggcagcacaacttctacgacgtcctctagcagtactcagtctggtggaagtggtgccgcacacaggttggccgatgttatggctcagacccatattgagaaccactcggccccacctgacgtgaccacttacactagcgagcactcgattcaagtggaacgcccacaaggctcgaccggttctcggaccgcccctaaatacggaaacgccgaattgatggagacaggcgatggagtgcctgtgtcctctcgggttagtgcaaaaattcagcaactggttaatactttgaagaggccaaagcggcctccactgagagagtttttcgtcgacgatttcgaggaactgctggaagttcagcagccagaccctaaccaacccaagcctgagggggcacagatgcttgccatgagaggggaacagctgggagtcgttacaaattggccaccctcactggaggccgctctgcagagatggggaaccattagtcctaaggccccatgtctgaccaccatggacaccaatggcaaacctctgtatatcctgacatacggaaagctgtggacgcggtcgatgaaggtcgcttactccatcctccacaaactgggaaccaagcaggagccgatggttaggcctggagatagagtcgcattggtctttccaaacaacgaccctgccgcttttatggcagcgttctacggctgtctgctagcagaggtcgtgcccgtgccgattgaagttccactcaccaggaaggacgcaggcagccagcagattgggttcttgctgggatcctgtggggtgaccgtcgcactgaccagtgatgcatgccacaagggcctgccaaagagccctacgggggagatccctcaattcaagggttggcctaagctgctatggtttgtgactgaatctaaacacttaagtaaacctcccagagactggtttcctcacattaaggacgccaataacgacacagcatatatagaatataagacgtgcaaggatgggagtgtattgggcgtgacagtgacaagaacagcgctcctgacccattgtcaagctttgacacaggcttgtggatacacagaggcggaaaccattgtgaacgtgctagacttcaaaaaagatgtgggactttggcacggaatcttaacttctgtcatgaatatgatgcatgtaatcagtatcccttactccctgatgaaagtgaacccactgtcctggatccagaaggtatgccaatacaaggcgaaggtggcatgcgtgaagtcacgagatatgcactgggcgctcgtcgcacatcgagaccagcgggacattaatctctcaagcctccgaatgctgattgtggccgatggggcaaatccttggtccatatccagttgtgatgccttcttaaatgtgttccagagcaaggggctccggcaggaagtcatctgcccatgtgcatccagcccggaggctctcaccgtggccatacggcgtcccacggatgactctaatcaacccccaggacggggagttctctccatgcatggccttacctacggggtcattagggtcgatagtgaggaaaagctgtcagtccttaccgttcaggacgtgggactcgttatgcctggagccatcatgtgctccgtgaaacctgacggtgtaccccagttgtgcagaacagacgaaattggagagctttgtgtttgtgctgtagcaactggaacatcttactacgggctgtcaggcatgactaagaacacttttgagcatacgtctaacaaggggaaatag

SEQ ID NO: 183526 - DNA, 1446 bp, Artificial Sequence
  derived and/or modified sequence
atctgggtgagtcggtccgcttgtcttatgacgactcaattgatctgtaagcttctgcggtcacgggaggcggctgctgccgtcgacgtcaggacttggcccctcatcctggacacagatgatctgccgaagaagcgacctgcccaaatatgtaaaccttgcaacccggacactctcgcatacctggatttcagtgtatcgaccaccggaatgctggccggagtgaagatgtcacatgctgcaacatctgctttctgtagaagtattaaactgcaatgtgagttgtatccttctagagaagtggccatctgcctggatccctattgtggtctgggctttgtcctatggtgcctatgttctgtatacagcgggcatcagtccattctaatccccccatctgagctggagaccaatcctgccctgtggttgttggctgtaagtcaatataaagttagggataccttctgcagctattccgtgatggaactgtgcacaaaaggacttgggtctcagactgagtctctgaaggcgcgaggtttggatctgagtcgtgttaggacatgtgtagtggtagccgaggaaaggccacgaatcgccctgacccagtcattctccaagcttttcaaggacctgggactgcaccccagagcggttagcacttcattcgggtgtcgagttaaccttgccatctgcctacaggggacgagcggcccagacccaaccactgtgtacgtagacatgcgtgcactacgccatgatcgggtgagactggttgaacgcggtagtccgcatagtctgccactgatggaatcaggcaagatccttccaggcgtgcgaattataatcgccaatcccgagactaaagggccacttggggacagccatctcggcgagatttgggtgcactccgcccacaatgcttctgggtactttacaatctatggagatgagagtttgcagagcgatcactttaactctcgcctgagcttcggcgatacacagactatatgggccagaaccgggtacctcggattcctacggcgtacagaactgactgacgccaatggagaaaggcacgatgccctgtacgtcgtgggtgccctcgatgaggccatggagctgagaggcatgcgataccaccccatcgacattgagacctctgtgattcgggctcataaatctgttaccgagtgcgctgtgtttacctggacgaacctgcttgtcgtggtggtggaacttgacgggtctgaacaggaagcgcttgacctggtgccccttgtgacaaacgttgttctggaggagcactacctgatcgttggggtggtagtcgtcgttgatataggggttatccccattaactcgcgaggagaaaaacagcggatgcatctccgcgatggcttccttgcagatcagttagaccccatctacgttgcctacaacatgtag

SEQ ID NO: 183527 - DNA, 4671 bp, Artificial Sequence
  derived and/or modified sequence
atggccgacagaagcctggagggcatggccctgcccctggaggtgagagccagactggccgagctggagctggagctgagcgagggcgacatcacccagaagggctacgagaagaagagaagcaagctgatcggcgcctacctgccccagccccccagagtggaccaggccctgccccaggagagaagagcccccgtgacccccagcagcgccagcagataccacagaagaagaagcagcggcagcagagacgagagatacagaagcgacgtgcacaccgaggccgtgcaggccgccctggccaagcacaaggagagaaagatggccgtgcccatgcccagcaagagaagaagcctggtggtgcagaccagcatggacgcctacaccccccccgacaccagcagcggcagcgaggacgagggcagcgtgcagggcgacagccagggcacccccaccagcagccagggcagcatcaacatggagcactggatcagccaggccatccacggcagcaccaccagcaccaccagcagcagcagcacccagagcggcggcagcggcgccgcccacagactggccgacgtgatggcccagacccacatcgagaaccacagcgccccccccgacgtgaccacctacaccagcgagcacagcatccaggtggagagaccccagggcagcaccggcagcagaaccgcccccaagtacggcaacgccgagctgatggagaccggcgacggcgtgcccgtgagcagcagagtgagcgccaagatccagcagctggtgaacaccctgaagagacccaagagaccccccctgagagagttcttcgtggacgacttcgaggagctgctggaggtgcagcagcccgaccccaaccagcccaagcccgagggcgcccagatgctggccatgagaggcgagcagctgggcgtggtgaccaactggccccccagcctggaggccgccctgcagagatggggcaccatcagccccaaggccccctgcctgaccaccatggacaccaacggcaagcccctgtacatcctgacctacggcaagctgtggaccagaagcatgaaggtggcctacagcatcctgcacaagctgggcaccaagcaggagcccatggtgagacccggcgacagagtggccctggtgttccccaacaacgaccccgccgccttcatggccgccttctacggctgcctgctggccgaggtggtgcccgtgcccatcgaggtgcccctgaccagaaaggacgccggcagccagcagatcggcttcctgctgggcagctgcggcgtgaccgtggccctgaccagcgacgcctgccacaagggcctgcccaagagccccaccggcgagatcccccagttcaagggctggcccaagctgctgtggttcgtgaccgagagcaagcacctgagcaagccccccagagactggttcccccacatcaaggacgccaacaacgacaccgcctacatcgagtacaagacctgcaaggacggcagcgtgctgggcgtgaccgtgaccagaaccgccctgctgacccactgccaggccctgacccaggcctgcggctacaccgaggccgagaccatcgtgaacgtgctggacttcaagaaggacgtgggcctgtggcacggcatcctgaccagcgtgatgaacatgatgcacgtgatcagcatcccctacagcctgatgaaggtgaaccccctgagctggatccagaaggtgtgccagtacaaggccaaggtggcctgcgtgaagagcagagacatgcactgggccctggtggcccacagagaccagagagacatcaacctgagcagcctgagaatgctgatcgtggccgacggcgccaacccctggagcatcagcagctgcgacgccttcctgaacgtgttccagagcaagggcctgagacaggaggtgatctgcccctgcgccagcagccccgaggccctgaccgtggccatcagaagacccaccgacgacagcaaccagccccccggcagaggcgtgctgagcatgcacggcctgacctacggcgtgatcagagtggacagcgaggagaagctgagcgtgctgaccgtgcaggacgtgggcctggtgatgcccggcgccatcatgtgcagcgtgaagcccgacggcgtgccccagctgtgcagaaccgacgagatcggcgagctgtgcgtgtgcgccgtggccaccggcaccagctactacggcctgagcggcatgaccaagaacaccttcgaggtgttccccatgaccagcagcggcgcccccatcagcgagtaccccttcatcagaaccggcctgctgggcttcgtgggccccggcggcctggtgttcgtggtgggcaagatggacggcctgatggtggtgagcggcagaagacacaacgccgacgacatcgtggccaccgccctggccgtggagcccatgaagttcgtgtacagaggcagaatcgccgtgttcagcgtgaccgtgctgcacgacgagagaatcgtgatcgtggccgagcagagacccgacagcaccgaggaggacagcttccagtggatgagcagagtgctgcaggccatcgacagcatccaccaggtgggcgtgtactgcctggccctggtgcccgccaacaccctgcccaagacccccctgggcggcatccacctgagcgagaccaagcagctgttcctggagggcagcctgcacccctgcaacgtgctgatgtgcccccacacctgcgtgaccaacctgcccaagcccagacagaagcagcccgagatcggccccgccagcgtgatggtgggcaacctggtgagcggcaagagaatcgcccaggccagcggcagagacctgggccagatcgaggacaacgaccaggccagaaagttcctgttcctgagcgaggtgctgcagtggagagcccagaccacccccgaccacatcctgtacaccctgctgaactgcagaggcgccatcgccaacagcctgacctgcgtgcagctgcacaagagagccgagaagatcgccgtgatgctgatggagagaggccacctgcaggacggcgaccacgtggccctggtgtacccccccggcatcgacctgatcgccgccttctacggctgcctgtacgccggctgcgtgcccatcaccgtgagacccccccacccccagaacatcgccaccaccctgcccaccgtgaagatgatcgtggaggtgagcagaagcgcctgcctgatgaccacccagctgatctgcaagctgctgagaagcagagaggccgccgccgccgtggacgtgagaacctggcccctgatcctggacaccgacgacctgcccaagaagagacccgcccagatctgcaagccctgcaaccccgacaccctggcctacctggacttcagcgtgagcaccaccggcatgctggccggcgtgaagatgagccacgccgccaccagcgccttctgcagaagcatcaagctgcagtgcgagctgtaccccagcagagaggtggccatctgcctggacccctactgcggcctgggcttcgtgctgtggtgcctgtgcagcgtgtacagcggccaccagagcatcctgatcccccccagcgagctggagaccaaccccgccctgtggctgctggccgtgagccagtacaaggtgagagacaccttctgcagctacagcgtgatggagctgtgcaccaagggcctgggcagccagaccgagagcctgaaggccagaggcctggacctgagcagagtgagaacctgcgtggtggtggccgaggagagacccagaatcgccctgacccagagcttcagcaagctgttcaaggacctgggcctgcaccccagagccgtgagcaccagcttcggctgcagagtgaacctggccatctgcctgcagggcaccagcggccccgaccccaccaccgtgtacgtggacatgagagccctgagacacgacagagtgagactggtggagagaggcagcccccacagcctgcccctgatggagagcggcaagatcctgcccggcgtgagaatcatcatcgccaaccccgagaccaagggccccctgggcgacagccacctgggcgagatctgggtgcacagcgcccacaacgccagcggctacttcaccatctacggcgacgagagcctgcagagcgaccacttcaacagcagactgagcttcggcgacacccagaccatctgggccagaaccggctacctgggcttcctgagaagaaccgagctgaccgacgccaacggcgagagacacgacgccctgtacgtggtgggcgccctggacgaggccatggagctgagaggcatgagataccaccccatcgacatcgagaccagcgtgatcagagcccacaagagcgtgaccgagtgcgccgtgttcacctggaccaacctgctggtggtggtggtggagctggacggcagcgagcaggaggccctggacctggtgcccctggtgaccaacgtggtgctggaggagcactacctgatcgtgggcgtggtggtggtggtggacatcggcgtgatccccatcaacagcagaggcgagaagcagagaatgcacctgagagacggcttcctggccgaccagctggaccccatctacgtggcctacaacatgtag

SEQ ID NO: 183528 - DNA, 1971 bp, Artificial Sequence
  derived and/or modified sequence
atggccgtgcccatgcccagcaagagaagaagcctggtggtgcagaccagcatggacgcctacaccccccccgacaccagcagcggcagcgaggacgagggcagcgtgcagggcgacagccagggcacccccaccagcagccagggcagcatcaacatggagcactggatcagccaggccatccacggcagcaccaccagcaccaccagcagcagcagcacccagagcggcggcagcggcgccgcccacagactggccgacgtgatggcccagacccacatcgagaaccacagcgccccccccgacgtgaccacctacaccagcgagcacagcatccaggtggagagaccccagggcagcaccggcagcagaaccgcccccaagtacggcaacgccgagctgatggagaccggcgacggcgtgcccgtgagcagcagagtgagcgccaagatccagcagctggtgaacaccctgaagagacccaagagaccccccctgagagagttcttcgtggacgacttcgaggagctgctggaggtgcagcagcccgaccccaaccagcccaagcccgagggcgcccagatgctggccatgagaggcgagcagctgggcgtggtgaccaactggccccccagcctggaggccgccctgcagagatggggcaccatcagccccaaggccccctgcctgaccaccatggacaccaacggcaagcccctgtacatcctgacctacggcaagctgtggaccagaagcatgaaggtggcctacagcatcctgcacaagctgggcaccaagcaggagcccatggtgagacccggcgacagagtggccctggtgttccccaacaacgaccccgccgccttcatggccgccttctacggctgcctgctggccgaggtggtgcccgtgcccatcgaggtgcccctgaccagaaaggacgccggcagccagcagatcggcttcctgctgggcagctgcggcgtgaccgtggccctgaccagcgacgcctgccacaagggcctgcccaagagccccaccggcgagatcccccagttcaagggctggcccaagctgctgtggttcgtgaccgagagcaagcacctgagcaagccccccagagactggttcccccacatcaaggacgccaacaacgacaccgcctacatcgagtacaagacctgcaaggacggcagcgtgctgggcgtgaccgtgaccagaaccgccctgctgacccactgccaggccctgacccaggcctgcggctacaccgaggccgagaccatcgtgaacgtgctggacttcaagaaggacgtgggcctgtggcacggcatcctgaccagcgtgatgaacatgatgcacgtgatcagcatcccctacagcctgatgaaggtgaaccccctgagctggatccagaaggtgtgccagtacaaggccaaggtggcctgcgtgaagagcagagacatgcactgggccctggtggcccacagagaccagagagacatcaacctgagcagcctgagaatgctgatcgtggccgacggcgccaacccctggagcatcagcagctgcgacgccttcctgaacgtgttccagagcaagggcctgagacaggaggtgatctgcccctgcgccagcagccccgaggccctgaccgtggccatcagaagacccaccgacgacagcaaccagccccccggcagaggcgtgctgagcatgcacggcctgacctacggcgtgatcagagtggacagcgaggagaagctgagcgtgctgaccgtgcaggacgtgggcctggtgatgcccggcgccatcatgtgcagcgtgaagcccgacggcgtgccccagctgtgcagaaccgacgagatcggcgagctgtgcgtgtgcgccgtggccaccggcaccagctactacggcctgagcggcatgaccaagaacaccttcgagcacaccagcaacaagggcaagtag

SEQ ID NO: 183529 - DNA, 1446 bp, Artificial Sequence
  derived and/or modified sequence
atctgggtgagcagaagcgcctgcctgatgaccacccagctgatctgcaagctgctgagaagcagagaggccgccgccgccgtggacgtgagaacctggcccctgatcctggacaccgacgacctgcccaagaagagacccgcccagatctgcaagccctgcaaccccgacaccctggcctacctggacttcagcgtgagcaccaccggcatgctggccggcgtgaagatgagccacgccgccaccagcgccttctgcagaagcatcaagctgcagtgcgagctgtaccccagcagagaggtggccatctgcctggacccctactgcggcctgggcttcgtgctgtggtgcctgtgcagcgtgtacagcggccaccagagcatcctgatcccccccagcgagctggagaccaaccccgccctgtggctgctggccgtgagccagtacaaggtgagagacaccttctgcagctacagcgtgatggagctgtgcaccaagggcctgggcagccagaccgagagcctgaaggccagaggcctggacctgagcagagtgagaacctgcgtggtggtggccgaggagagacccagaatcgccctgacccagagcttcagcaagctgttcaaggacctgggcctgcaccccagagccgtgagcaccagcttcggctgcagagtgaacctggccatctgcctgcagggcaccagcggccccgaccccaccaccgtgtacgtggacatgagagccctgagacacgacagagtgagactggtggagagaggcagcccccacagcctgcccctgatggagagcggcaagatcctgcccggcgtgagaatcatcatcgccaaccccgagaccaagggccccctgggcgacagccacctgggcgagatctgggtgcacagcgcccacaacgccagcggctacttcaccatctacggcgacgagagcctgcagagcgaccacttcaacagcagactgagcttcggcgacacccagaccatctgggccagaaccggctacctgggcttcctgagaagaaccgagctgaccgacgccaacggcgagagacacgacgccctgtacgtggtgggcgccctggacgaggccatggagctgagaggcatgagataccaccccatcgacatcgagaccagcgtgatcagagcccacaagagcgtgaccgagtgcgccgtgttcacctggaccaacctgctggtggtggtggtggagctggacggcagcgagcaggaggccctggacctggtgcccctggtgaccaacgtggtgctggaggagcactacctgatcgtgggcgtggtggtggtggtggacatcggcgtgatccccatcaacagcagaggcgagaagcagagaatgcacctgagagacggcttcctggccgaccagctggaccccatctacgtggcctacaacatgtag

SEQ ID NO: 183530 - DNA, 7894 bp, Artificial Sequence
  derived and/or modified sequence
cggtgcggttccgccgggcgcgaggagccgccgagacctccgcctgcgaacaaagaggaggccgtgcggggcgcggcgcccgcggagcatggcggaccgcagcctggagggcatggcgctgcccctggaggtgcgggcgcgcctggccgagctggagctggagctgtcggaaggtgacatcacacaaaaaggatatgaaaagaagaggtcaaagttaattggagcctaccttccgcagcctccgagggtggaccaagctttgccgcaagaacgccgggctcctgtcactccttcctccgcctctcgctaccaccgccgacggtcttcagggtcacgagatgagcgctatcggtcagacgtccacacggaagctgtccaggcggctctggccaaacacaaagagcggaagatggcagtgcctatgccttccaaacgcaggtccctggtcgtgcagacctcgatggacgcctacacccctccagatacctcttctggctcagaagatgaaggctcagtgcagggggactcccagggcacccccacctccagccagggcagcatcaatatggagcactggatcagccaggccatccacggctccaccacgtccaccacctcctcgtcctctacgcagagcgggggcagcggggctgcccacaggctggcggacgtcatggctcagacccacatagaaaatcattctgcacctcctgacgtaaccacgtacacctcagagcactcgatacaggtggagagaccgcagggttccacggggtcccggacagcgcccaagtacggcaacgccgagctcatggagaccggggatggagtaccagtaagtagccgggtgtcagcaaaaatccagcagcttgtcaataccctcaaacgaccgaaacgaccacctttacgagaattctttgtcgatgactttgaagaattattagaagttcaacaaccggatccgaaccaaccaaagccggagggggcccagatgctggccatgcgcggagagcagctgggcgtggtcacgaactggccgccgtcgctggaggccgcactgcagaggtggggcaccatctcgcccaaggcgccctgcctgaccaccatggacaccaacgggaagcccctctacatcctcacttacggcaagctgtggacaagaagtatgaaggtcgcttacagcattctacacaaattaggcacaaagcaggaacccatggtccggcctggagatagggtggcactggtgttccccaacaatgatccggctgccttcatggcggctttctacggctgcctgctggccgaggtggtccccgtgcccatcgaggtgccgctcaccaggaaggacgcagggagccagcagataggtttcttgcttggaagctgtggagttactgtagccttgactagtgacgcctgccataaaggacttccaaaaagcccaacgggagagatcccacagtttaaaggttggccaaagctgctgtggtttgtcacagagtctaaacatctctccaaaccgccccgagactggttcccacacattaaagatgccaataacgacactgcgtatattgagtacaagacgtgtaaggatggcagtgtgctgggtgtgacggtgacgaggactgcgctgctgacacactgccaggccctgacgcaggcgtgtggctacacggaagctgaaaccattgtgaatgtgctggatttcaagaaggacgtcgggctctggcatggcatcctgacaagcgtcatgaacatgatgcatgtgatcagcatcccgtactcgctgatgaaggtgaaccctctctcctggatccagaaggtctgccagtacaaagcaaaagtggcgtgtgtgaaatcgagggatatgcattgggcattagtagcacacagagatcagagagacatcaacctctcctctctgcgaatgctgatagtggcggacggcgcgaacccctggtctatttcttcttgcgatgcatttctcaatgtcttccaaagtaaaggccttcgacaggaggtcatctgtccttgtgccagctcgccagaggccctcactgtggccatccggaggcccacggatgacagtaaccagcccccgggccggggtgtcctctccatgcatggactgacctatggggtcattcgtgtggactcggaagagaagctgtccgtgctcaccgtgcaggatgtcggcctcgtgatgcctggagccatcatgtgttcagtgaagccagacggggttcctcagctgtgcagaacggatgagatcggggagctgtgtgtgtgtgcagttgcgacgggcacgtcctactatggcctctctggcatgaccaagaacacctttgaggtgtttcccatgacaagctccggggctccgatcagtgaatacccattcataaggacaggcttgctggggttcgtgggtcccggaggcctcgtcttcgtggtgggcaagatggatggcctcatggtggtcagcgggcgcaggcacaacgccgacgacatcgtggccactgcgctggccgtagaacccatgaagtttgtctaccggggaaggatagccgtgttctcggtgaccgtgctgcacgacgagaggatcgtgatcgtggctgagcagaggcctgactccacggaagaggacagtttccagtggatgagccgtgtgctgcaggcgattgacagtatacatcaagttggagtttattgcctggccttggtgccagcaaacaccctccccaaaaccccgcttggtgggatccatttatcagaaacaaaacagctttttctggagggctctctgcacccctgcaatgtcctaatgtgcccccacacctgcgtcacaaacttgcctaagcctcgacagaagcagccagaaatcggccctgcctctgtgatggtggggaacctggtctctgggaagagaatcgcccaggccagtggcagagacctgggtcagatcgaagataacgaccaggcacgcaagttcctgttcctctcagaggtcttgcagtggagagcacagaccaccccggaccacatcctctacacgctgctcaactgtcggggtgcgatagcgaactcgctgacctgcgtgcagctgcacaagagagctgagaagatcgccgtgatgctgatggagaggggccaccttcaggacggcgaccacgtggccttggtctaccccccaggaatagacctgatagcagcgttttatggttgcctgtacgcaggctgtgtgccaataaccgtccgtcccccgcacccacagaacatcgcgacgacgttgcctaccgtcaagatgattgtggaggtgagtcgctctgcctgtctgatgacgacacagctgatctgtaagttgctgcggtccagggaggcggcggcggctgtggacgtcaggacgtggcccctcatcctggacacagatgatttgccaaagaagcggcctgcccagatctgcaaaccttgcaacccagacactcttgcatatctcgacttcagcgtgtccacaactgggatgctagctggcgtaaagatgtctcacgcagccaccagtgccttctgccgttccattaagctgcagtgtgaactttacccctctagagaagtggccatctgcctggacccttactgtggactgggatttgtcctctggtgcctctgcagtgtgtattctgggcaccagtccatcctgatcccgccctctgagctggaaaccaaccccgccttgtggcttcttgccgtgagtcagtacaaagtccgagacacgttttgctcctactccgtgatggagctgtgcaccaaggggctgggctcgcaaacagagtccctcaaggcgcgagggctggacttgtcccgagtgaggacctgcgtggttgtggcggaagagaggcctcggatcgcactcacacagtcgttctcaaagctgtttaaggacctgggccttcacccgcgggccgtcagcacctcgttcggttgcagggtgaacctggcgatttgcttgcagggaacctcaggacctgacccaaccactgtctacgtggacatgagagccctgagacacgacagagtccgcttagtggaaagaggatcccctcatagtctgcccctgatggaatcgggaaagatacttccaggggttcggattataattgccaacccagaaacaaaaggaccgctgggggactcacaccttggagagatttgggttcacagtgcccacaatgccagcggttatttcactatttacggagacgaatccctccagtcagatcacttcaactcaagactaagttttggagacacccagaccatctgggcacgcacaggctacttggggttcctgcggagaactgagctcacagatgcaaatggagagcgccatgatgccctctacgtggtaggggcactggacgaagccatggagctgcggggcatgcggtaccacccaatcgacattgagacctcggtcatcagagcccataaaagcgttacggaatgtgctgtgtttacctggacaaatttgttggtggttgtggttgagctggatgggtcggaacaagaagccttggacctggttcccttggtgaccaacgtggtcctggaggagcactacctgatcgtcggagtggtggtcgtggtggacatcggcgtcatccccatcaactcccgtggggagaagcagcgcatgcacctgcgagacgggtttttggcagaccagctagaccccatctatgtggcctacaacatgtagtctcgtctcttggcttccatggacttttctagagatgtagacattgttctccgtgtccactgaagcgtgcagacacagggcaacactcaccagaatacagccatttgtggtgagagtggaggaggaagaggaggaggaagaggacttctcacagcagccacgattggcatgggggtgaaatgtgaatttaccactgaatttcgctcagaaggactttggattactgccttcagtttgttggaaaagcccatttcaaaactttcttttcttttctttcttttttaattattggataataagtgctttcttcgtaaatgtggtattttgttaagccgaaatagcaattaaaaaaatatcctgccctccagatgggttcttttaaacaatttatgtagtgtgacaaagaattgttttctctgttttaatgtgtcatgaaatcttaatgacatggatctgttactaatttaagccattgctagatctcatccttttaggaaagtttgaggtacgagaaaaccttccaaatagcaccttccaattagataatagcagctttctttgtcagaaatgtgctgaagaaacaaaggctggtatacggccttcgaagttagtatagaatgagaagaaattataaataaggtgtatttcggcaattatcttgcaaatatctttgtactaaactaaaaagataaaataagttaacttcctcaatatgtaattatgtacaaaacgtttaatttattttgatctctttagaactataaaagagaaaaacattcaagaatattaaagtcttgtaatgtttgctaatataaaaaagtgttgtattatcttgcgtggatagtatcacaacaaatatatatatatgaaatataaattcactaatgaacaaaggagattttaaagtttaagatgcagaacttgtcacttgcatggtgtgccccccgtactcacatacactctgctgttgccagcagtcgcagaccgcaggagccctgtctaaaagtttcttctagaaccagagaccagcaagtgaaattattgccatctcaaggatggcaaaagaattcaaagctcaatgtgcactatttttttctttgctgtgggacaacagtgaatgtgtttatgccagcgtgtgctgatgatactgaggggctttaggttggcaaatagcactgttttcttagctgcaagaattcattgcacaatgtttttcatcatttttgttaatgtcatctttttttggtccttgctacgaaaaggaatgcgattctgtggtcattcgcactgggttgcattgattccccctctgatggccaatgtggagtggacaaagtgtccggaactcacatcggtgatcgtcccctcgtcttaagacccagcccgctctgtgtgagcctctggggctccctcgctcagtgagcacagttccccgggggttcatgccagagctccggctgaagcaagaagtcctccagctgcgtcgtttgccgcctgtggacgagtgcgccccagtttctgccctggcagctcctggccacaccttctcagagctcacctgtgcacttctaaattgaattggcccacggtgtccaaccaagaaggagcatctgcactccgagaaagatgtgttctgtaactgccccagtgtgaccccgcagtggctctcggtgctagatatgcatgactaagattgatgctgggcaaaatgtagatgatctttcattatgttgtgggcagcgtctttctctgcctttgctatatgcagtcagcagtaagccttttgctaaaagagttttgtttgacttctgagatccaaggctgattgttgttaaaaaaaaaaaaaaaaaaaaagtggcacatttaaaaaaatgtgtctgcatatgtggtgcatccttccatctccacaaaccatttgattcttgaaatattgtttgacctcattgctgtgtgtgaatatttctccacatgcttcagatgcacattcctagtctctgcttcctaaggggggaaccaccacacattggggggaaaaaagacattttcctacacccacccaccttgttgaaagggaggtaggtttggggcttcaggccaggcactgactatgaaacattagctgcagtgtgcaggacagctttgaggtccagctgaagtcaggaagcaaaacaaatgtagatgtcacttcaaacataatttcaactgtcaccagatcaactctacattcaaggagtgtggacgctgcagtgcagttgtgagggcagttagcagccgcctcttctgcatcctgtcaactctgattagttagagtttaggctcaaaagagttggtggactgagattgaaatttggttgtgcaagagaaaggaaaggagacacttagtaccaccagtttcagcaataaagaagggtcattctgtattcaaaattgtactgtagataaatcattcatgagattgtaaaaaatgtttgtcttgtgaccttgtgcttttgaagtcagacaaaaccgtgtaatcaacttgcacaaaaagagggtacacagtgaacatataaacacagacctaatcaaacaggagcagattcctcatggtgcttgtttattatatatatttaatcctgcttgacactttacccaagggagatggtcccttttatcagttgaatgttagcagcgttatttcagagtgtggtgactggttagagaaactcatgtactcaaccagccacagtttcaaacaaaatttttatgtgcaaaggacagcaaccttcttgtatgttaaaccaccagtacgctttgtacatctgtgataacgcctgttttatattcaaatgaacaaataaaagcttttatttttgttgctctgaaaatagcagtttcttaattggtcccctggaaagatgtctgggacagctttaatcccgggaaggaagtgactcctacagggaaatgtatctgactctgtttacataatttgttgcattacttagtacagataatcatactttgaaaaatgtttaaattttgatgtgggcatttattgctaaaaataattcctatggcaacaaatgttttgtgaaatgttttttttaattcttttaaatatatctaaatatatttgttcacattttgctgcaa

SEQ ID NO: 183531 - DNA, 4205 bp, Artificial Sequence
  derived and/or modified sequence
cacatttgtggctgctcaaagctgctctccttctgcgtcattacaggcgatctctaggcacgtgcttggttcttggagaagtggcgtctggctgtggaggatgaccgtggcagaactgcttccggctgttgagcgctggctgagagctgcttggcgtgcacagatcggtttcagcacagtctcgggagcagccccgggcagtgcagaaagcgaggcccaggtgacatcacacaaaaaggatatgaaaagaagaggtcaaagttaattggagcctaccttccgcagcctccgagggtggaccaagctttgccgcaagaacgccgggctcctgtcactccttcctccgcctctcgctaccaccgccgacggtcttcagggtcacgagatgagcgctatcggtcagacgtccacacggaagctgtccaggcggctctggccaaacacaaagagcggaagatggcagtgcctatgccttccaaacgcaggtccctggtcgtgcagacctcgatggacgcctacacccctccagatacctcttctggctcagaagatgaaggctcagtgcagggggactcccagggcacccccacctccagccagggcagcatcaatatggagcactggatcagccaggccatccacggctccaccacgtccaccacctcctcgtcctctacgcagagcgggggcagcggggctgcccacaggctggcggacgtcatggctcagacccacatagaaaatcattctgcacctcctgacgtaaccacgtacacctcagagcactcgatacaggtggagagaccgcagggttccacggggtcccggacagcgcccaagtacggcaacgccgagctcatggagaccggggatggagtaccagtaagtagccgggtgtcagcaaaaatccagcagcttgtcaataccctcaaacgaccgaaacgaccacctttacgagaattctttgtcgatgactttgaagaattattagaagttcaacaaccggatccgaaccaaccaaagccggagggggcccagatgctggccatgcgcggagagcagctgggcgtggtcacgaactggccgccgtcgctggaggccgcactgcagaggtggggcaccatctcgcccaaggcgccctgcctgaccaccatggacaccaacgggaagcccctctacatcctcacttacggcaagctgtggacaagaagtatgaaggtcgcttacagcattctacacaaattaggcacaaagcaggaacccatggtccggcctggagatagggtggcactggtgttccccaacaatgatccggctgccttcatggcggctttctacggctgcctgctggccgaggtggtccccgtgcccatcgaggtgccgctcaccaggaaggacgcagggagccagcagataggtttcttgcttggaagctgtggagttactgtagccttgactagtgacgcctgccataaaggacttccaaaaagcccaacgggagagatcccacagtttaaaggttggccaaagctgctgtggtttgtcacagagtctaaacatctctccaaaccgccccgagactggttcccacacattaaagatgccaataacgacactgcgtatattgagtacaagacgtgtaaggatggcagtgtgctgggtgtgacggtgacgaggactgcgctgctgacacactgccaggccctgacgcaggcgtgtggctacacggaagctgaaaccattgtgaatgtgctggatttcaagaaggacgtcgggctctggcatggcatcctgacaagcgtcatgaacatgatgcatgtgatcagcatcccgtactcgctgatgaaggtgaaccctctctcctggatccagaaggtctgccagtacaaagcaaaagtggcgtgtgtgaaatcgagggatatgcattgggcattagtagcacacagagatcagagagacatcaacctctcctctctgcgaatgctgatagtggcggacggcgcgaacccctggtctatttcttcttgcgatgcatttctcaatgtcttccaaagtaaaggccttcgacaggaggtcatctgtccttgtgccagctcgccagaggccctcactgtggccatccggaggcccacggatgacagtaaccagcccccgggccggggtgtcctctccatgcatggactgacctatggggtcattcgtgtggactcggaagagaagctgtccgtgctcaccgtgcaggatgtcggcctcgtgatgcctggagccatcatgtgttcagtgaagccagacggggttcctcagctgtgcagaacggatgagatcggggagctgtgtgtgtgtgcagttgcgacgggcacgtcctactatggcctctctggcatgaccaagaacacctttgagcatacttccaacaagggcaaataacattttatgaatgaagagagattactttaaaactaacagacgttgtttaaaatgtaccttgactcttcactcgtcttttacattgtggttttgtaaaccaagtaatcagttactgctgattggcctcctgtgagacttctgggtgttatctgttcagggttcagaggcaggaggctccagcaggtgtttcccatgacaagctccggggctccgatcagtgaatacccattcataaggacaggcttgctggggttcgtgggtcccggaggcctcgtcttcgtggtgggcaagatggatggcctcatggtggtcagcgggcgcaggcacaacgccgacgacatcgtggccactgcgctggccgtagaacccatgaagtttgtctaccggggaaggatagccgtgttctcggtgaccgtgctgcacgacgagaggatcgtgatcgtggctgagcagaggcctgactccacggaagaggacagtttccagtggatgagccgtgtgctgcaggcgattgacagtatacatcaagttggagtttattgcctggccttggtgccagcaaacaccctccccaaaaccccgcttggtgggatccatttatcagaaacaaaacagctttttctggagggctctctgcacccctgcaatgtcctaatgtgcccccacacctgcgtcacaaacttgcctaagcctcgacagaagcagccagaaatcggccctgcctctgtgatggtggggaacctggtctctgggaagagaatcgcccaggccagtggcagagacctgggtcagatcgaagataacgaccaggcacgcaagttcctgttcctctcagaggtcttgcagtggagagcacagaccaccccggaccacatcctctacacgctgctcaactgtcgggtgaggcgcggagctggccttccctggctactggcctcaaggggcctagcctggttcctgggagcgctcctgcttctttctttgaatccttttgcttcagtcttatgggaattctttttatgttttgctattttgactgagacttttgtacctagggattgtttttaaacgtaaccatttgtgcagttatttacacctatttgtgtgtacagatattttagcaacctatttacaatatttctcccccaaaatgagtaatgatatctgcaagagagaaatcgtaagtctatgagatatttgcatttttattttgattactaaactagtttttgttttgttttgtgttttgaggcagtctcgctctgttgcccaggctagagttcagtggcacgatctccgctcactgcaacctccacctccctggttgaagcaattctcgtgcatcagcctccgggtagctgggactacaagtgcccaccaccacatctggctaatttttgtatttttagtatttagagatggggtttcaccatgttggcgaggatggtcttgaattcctggccttgagtgatccacctgccttggcctcccaaagtgctgggattacaggcgtgagtcaccacaccgagccctaaaccacttttttatacaccagaagttatgtttattgcagactcaggaatgaaaatcatttccactttgtaattaaatttcctgtttacactttacatgagaaaactacactcatcaaatattgttccaccgtagtacttaagagtaaggcattaaataaacaagctaatactattaacaagaaaaattaaatgcaaaaatcttaatatgcttgttactactttttaccatggaaataaagcttg

SEQ ID NO: 183532 - DNA, 1781 bp, Artificial Sequence
  derived and/or modified sequence
atctgggtgagtcgctctgcctgtctgatgacgacacagctgatctgtaagttgctgcggtccagggaggcggcggcggctgtggacgtcaggacgtggcccctcatcctggacacagatgatttgccaaagaagcggcctgcccagatctgcaaaccttgcaacccagacactcttgcatatctcgacttcagcgtgtccacaactgggatgctagctggcgtaaagatgtctcacgcagccaccagtgccttctgccgttccattaagctgcagtgtgaactttacccctctagagaagtggccatctgcctggacccttactgtggactgggatttgtcctctggtgcctctgcagtgtgtattctgggcaccagtccatcctgatcccgccctctgagctggaaaccaaccccgccttgtggcttcttgccgtgagtcagtacaaagtccgagacacgttttgctcctactccgtgatggagctgtgcaccaaggggctgggctcgcaaacagagtccctcaaggcgcgagggctggacttgtcccgagtgaggacctgcgtggttgtggcggaagagaggcctcggatcgcactcacacagtcgttctcaaagctgtttaaggacctgggccttcacccgcgggccgtcagcacctcgttcggttgcagggtgaacctggcgatttgcttgcagggaacctcaggacctgacccaaccactgtctacgtggacatgagagccctgagacacgacagagtccgcttagtggaaagaggatcccctcatagtctgcccctgatggaatcgggaaagatacttccaggggttcggattataattgccaacccagaaacaaaaggaccgctgggggactcacaccttggagagatttgggttcacagtgcccacaatgccagcggttatttcactatttacggagacgaatccctccagtcagatcacttcaactcaagactaagttttggagacacccagaccatctgggcacgcacaggctacttggggttcctgcggagaactgagctcacagatgcaaatggagagcgccatgatgccctctacgtggtaggggcactggacgaagccatggagctgcggggcatgcggtaccacccaatcgacattgagacctcggtcatcagagcccataaaagcgttacggaatgtgctgtgtttacctggacaaatttgttggtggttgtggttgagctggatgggtcggaacaagaagccttggacctggttcccttggtgaccaacgtggtcctggaggagcactacctgatcgtcggagtggtggtcgtggtggacatcggcgtcatccccatcaactcccgtggggagaagcagcgcatgcacctgcgagacgggtttttggcagaccagctagaccccatctatgtggcctacaacatgtagtctcgtctcttggcttccatggacttttctagagatgtagacattgttctccgtgtccactgaagcgtgcagacacagggcaacactcaccagaatacagccatttgtggtgagagtggaggaggaagaggaggaggaagaggacttctcacagcagccacgattggcatgggggtgaaatgtgaatttaccactgaatttcgctcagaaggactttggattactgccttcagtttgttggaaaagcccatttcaaaactttcttttcttttctttcttttttaattattggataataagtgctttcttcgtaaatgtggtattttgttaagccg

SEQ ID NO: 183533 - protein, 1341 aa, Artificial Sequence
  derived and/or modified sequence
MWRRKHPRTSGGTRGVLSGNRGVEYGSGRGHLGTFEGRWRKLPKMPEAVGTDPSTSRKMAELEEVTLDGKPLQALRVTDLKAALEQRGLAKSGQKSALVKRLKGALMLENLQKHSTPHAAFQPNSQIGEEMSQNSFIKQYLEKQQELLRQRLEREAREAAELEEASAESEDEMIHPEGVASLLPPDFQSSLERPELELSRHSPRKSSSISEEKGDSDDEKPRKGERRSSRVRQARAAKLSEGSQPAEEEEDQETPSRNLRVRADRNLKTEEEEEEEEEEEEDDEEEEGDDEGQKSREAPILKEFKEEGEEIPRVKPEEMMDERPKTRSQEQEVLERGGRFTRSQEEARKSHLARQQQEKEMKTTSPLEEEEREIKSSQGLKEKSKSPSPPRLTEDRKKASLVALPEQTASEEETPPPLLTKEASSPPPHPQLHSEEEIEPMEGPAPAVLIQLSPPNTDADTRELLVSQHTVQLVGGLSPLSSPSDTKAESPAEKVPEESVLPLVQKSTLADYSAQKDLEPESDRSAQPLPLKIEELALAKGITEECLKQPSLEQKEGRRASHTLLPSHRLKQSADSSSSRSSSSSSSSSRSRSRSPDSSGSRSHSPLRSKQRDVAQARTHANPRGRPKMGSRSTSESRSRSRSRSRSASSNSRKSLSPGVSRDSSTSYTETKDPSSGQEVATPPVPQLQVCEPKERTSTSSSSVQARRLSQPESAEKHVTQRLQPERGSPKKCEAEEAEPPAATQPQTSETQTSHLPESERIHHTVEEKEEVTMDTSENRPENDVPEPPMPIADQVSNDDRPEGSVEDEEKKESSLPKSFKRKISVVSATKGVPAGNSDTEGGQPGRKRRWGASTATTQKKPSISITTESLKSLIPDIKPLAGQEAVVDLHADDSRISEDETERNGDDGTHDKGLKICRTVTQVVPAEGQENGQREEEEEEKEPEAEPPVPPQVSVEVALPPPAEHEVKKVTLGDTLTRRSISQQKSGVSITIDDPVRTAQVPSPPRGKISNIVHISNLVRPFTLGQLKELLGRTGTLVEEAFWIDKIKSHCFVTYSTVEEAVATRTALHGVKWPQSNPKFLCADYAEQDELDYHRGLLVDRPSETKTEEQGIPRPLHPPPPPPVQPPQHPRAEQREQERAVREQWAEREREMERRERTRSEREWDRDKVREGPRSRSRSRDRRRKERAKSKEKKSEKKEKAQEEPPAKLLDDLFRKTKAAPCIYWLPLTDSQIVQKEAERAERAKEREKRRKEQEEEEQKEREKEAERERNRQLEREKRREHSRERDRERERERERDRGDRDRDRERDRERGRERDRRDTKRHSRSRSRSTPVRDRGGRR

SEQ ID NO: 183534 - DNA, 4026 bp, Artificial Sequence
  derived and/or modified sequence
atgtggaggaggaagcacccgcggacctccgggggcactaggggcgtgctatccggcaacagaggcgtggaatacggctccgggcgggggcacctcgggacattcgaaggtagatggcgtaaactgcccaagatgcctgaagctgtgggcacagatccaagtacttcgcggaaaatggctgaacttgaggaggtgacgcttgatggtaagcccctgcaagccctgcgtgtgaccgatctaaaggcagccttggagcagcgggggcttgcaaagagtggccagaaatccgcgctagtgaagagactgaaaggcgctttgatgctggagaatttacagaagcattcaactccacacgccgccttccaacccaactctcagataggggaagagatgtcacagaattcctttattaagcagtacctcgaaaagcaacaggagctgctgcgtcagcggcttgaaagggaggcaagagaggccgccgagctcgaggaggcttcagctgagagcgaggacgaaatgattcaccctgagggggtggcctccctgttaccccccgacttccagtcctcccttgaaaggcctgagttggaactatcaagacacagccccaggaaaagctctagcatatcagaggagaagggcgacagcgatgatgagaagcccagaaaaggggagcgaagatctagtcgcgtccggcaggctcgcgccgccaaactgagcgaagggtcacagccggccgaagaagaagaagaccaggagacaccatcacgaaacctcagggtgagggccgacaggaacctgaaaacagaggaggaggaagaagaagaagaagaggaggaggaagacgacgaggaggaagaaggcgacgatgaaggccagaagtcacgggaggctcccatcttgaaagaattcaaagaagaaggggaggaaattcccagggttaagcctgaagagatgatggatgagaggccaaagacgcggtcccaggagcaggaggtgttagaacggggtgggcgtttcacccgcagccaggaagaggcacggaaatcacacttggcccgccaacagcaggaaaaagagatgaaaacaacatctccactggaagaggaggagcgggaaatcaagagctcacaaggcctcaaggaaaaatctaaaagtccttcccctccacgactgacagaggatcgcaaaaaagctagtttggttgcattaccggagcaaaccgccagtgaggaggaaaccccaccaccactgttaactaaagaggcaagcagcccccccccacacccacaactgcactctgaggaagaaattgaacccatggagggacccgcgccagcagtgcttattcaattgagcccgccaaataccgatgctgacaccagggagcttttagtgtctcaacatactgttcagctcgtgggcggcctgtcccccctcagctctccttccgacaccaaagcagagagcccggctgaaaaggttccggaggagagtgtgctgcctctcgtccagaagagtacccttgcagactacagcgcccagaaggatctagagcctgaaagtgacagatcagctcagccgcttcccctgaaaattgaggaattagccctcgctaagggcattactgaggagtgcctgaaacaacctagccttgaacagaaggaaggacggagagcttcacacaccctacttccttctcacagactgaagcagtctgccgactcctccagcagccggtcctccagctcttcttcttcttcgagccgctcccgcagccggtcccctgactcttcaggaagcagatctcattcacctctgcgcagcaagcagcgggatgtggcccaagcaagaacccacgctaaccccagagggcgccccaagatgggctcaagatcaacatccgagtcccggtcccgatccaggtcaaggagtagatcagccagtagtaactcccggaagtcactgtcacccggagtgtctagagactcttcaacctcctacacggagacaaaagacccctcttctgggcaagaggttgccacgcccccggtacctcagctccaggtgtgcgagcctaaggagaggacaagcacctcgtccagttccgtgcaggcacggcgtctgagccagcccgaatctgcagaaaagcacgtaacccagcggctccagcccgaacgaggatcacctaagaaatgtgaggccgaggaagccgaaccacctgccgctacacagccgcagaccagtgaaacacagacttctcatctgccggaatcagaaaggatccatcatactgtggaagagaaggaagaggtgacaatggacacctcagagaaccggcccgagaatgacgtgcccgagcctccaatgccaatcgccgatcaggtgagtaacgatgataggcctgaggggtccgtagaagacgaggaaaagaaggaaagcagcctgcccaagtcattcaagcgaaagatctctgtagtgagcgccacaaagggagtgccagccgggaatagtgacactgaggggggtcagcccggtagaaagcgtcgatggggcgcaagtacagctaccacccagaaaaaaccctccatcagtattacgacggagagtttgaagtccctgatccccgacattaagccgctcgccggccaggaggctgtggtggatcttcacgcagacgactctaggatctccgaggatgaaaccgagcgcaatggagacgacggaactcacgacaaagggcttaaaatatgtaggacggttactcaggtcgtgccagccgaaggccaagaaaatggccaacgggaggaggaggaagaggagaaggagcctgaggccgaaccccccgtaccgccacaagtgagcgttgaggtggcacttccccccccagctgagcacgaggttaagaaggtgaccctcggagataccctgacacggagatctatctcacagcaaaaatcgggggtgagtatcacaatcgatgacccagttcggacagcccaggttcctagcccaccgcgtggcaagatctccaatattgttcatatatccaatcttgtgcggcccttcaccctgggccagctaaaagaattgttaggacggacaggcactctggtcgaagaggcgttttggatcgacaaaattaagtcccactgttttgtcacatactccacggtggaagaggccgtagccaccaggaccgccctgcacggggtgaaatggccgcagtccaaccctaagtttttgtgcgcagactatgccgaacaggatgagctggactatcaccggggcctgctggttgaccggccgagcgaaaccaagaccgaggagcagggcatccctagacctctccatccccctccaccgcctccagttcagccaccccagcacccgcgggccgagcagagggaacaggagcgcgccgtgagagagcagtgggctgagagagagagggagatggagagaagggaaaggacgcgatccgagagagaatgggaccgtgataaagtccgcgaaggcccaagaagtcgaagccgaagcagagaccgacgccgcaaagagcgagctaagtccaaggagaagaagagtgagaaaaaagagaaggctcaagaagagccacctgctaaactacttgatgatctgttccggaagaccaaagccgctccatgtatctattggctgccactcacagactctcagattgtacagaaggaggcagagagggccgagcgcgccaaggaaagagagaaacgacggaaagaacaagaggaagaggagcagaaggaaagagagaaggaggctgagagagagcgcaacaggcagttagaaagagaaaagaggagggagcatagcagagaacgggatcgggagcgtgagagagagcgggagcgggaccgaggcgatagagaccgggatagagaacgggaccgcgagaggggtcgggagcgtgatagacgcgatacaaaaagacacagcaggtcgagatcccgaagtacacctgtgagagacagagggggaagaaggtag

SEQ ID NO: 183535 - DNA, 4026 bp, Artificial Sequence
  derived and/or modified sequence
atgtggaggaggaagcaccccaggaccagcggcggcacccggggcgtgctgagcggcaacagaggagtggagtatggcagcggccggggccacctgggcacctttgagggccgctggaggaagctgcccaagatgcctgaggccgtgggcacagaccccagcaccagcaggaagatggccgagctggaggaggtgaccctggatggcaagcccctgcaggccctgcgggtgacagacctgaaggccgccctggagcagaggggcctggccaagagcggccagaagagcgccctggtgaagaggctgaagggggccctgatgctggagaacctgcagaagcacagcacccctcatgctgccttccagcccaacagccagattggagaggagatgagccagaacagcttcatcaagcagtacctggagaagcagcaggagctgctgcggcagaggctggagcgggaggcccgggaggccgctgagctggaggaggccagcgctgagagtgaagatgagatgatccaccctgagggcgtggccagcctgctgcccccagacttccagagcagcctggagaggcctgagctggagctgagccgccacagccccaggaagagcagcagcatcagcgaggagaagggggacagtgatgatgagaagcccaggaaaggagagcggcgcagcagccgggtgcggcaggcccgggccgccaagctgtctgagggcagccagcctgctgaggaggaggaggaccaggagacccccagcaggaacctgcgggtgcgggctgacaggaacctgaagacagaggaggaggaggaggaggaggaggaggaggaggaggatgatgaggaggaggagggagatgatgagggccagaagagccgggaggcccccatcctgaaggagttcaaggaggagggggaggagatcccccgggtgaagccagaggagatgatggatgagcggcccaagaccaggagccaggagcaggaggtgctggagcggggcggccgcttcaccaggagccaggaggaggccaggaagagccacctggcccggcagcagcaggagaaggagatgaagaccaccagccccctggaggaggaggagcgggagatcaagagcagccagggcctgaaggagaagagcaagagccccagccccccccggctgacagaggacaggaagaaggccagcctggtggccctgcctgagcagacagccagcgaggaggagaccccaccacccctgctgaccaaggaggccagcagccccccaccccacccccagctgcacagcgaggaggagattgagcccatggagggccctgccccagctgtgctgatccagctgagcccccccaacacagatgctgacacccgggagctgctggtgtcccagcacacagtgcagctggtgggcggcctgagccccctgagcagccccagcgacaccaaggccgagagccctgctgagaaggtgcctgaggagagcgtgctgcccctggtgcagaagagcaccctggccgactacagcgcccagaaggacctggagcctgagagtgacagaagtgcccagcccctgcccctgaagattgaggagctggccctggccaagggcatcacagaagaatgtctgaagcagcccagcctggagcagaaggagggccggcgggccagccacaccctgctgcccagccaccggctgaagcagagcgctgacagcagcagcagccgcagcagcagcagcagcagcagcagcagccgcagccgcagccgcagcccagacagcagcggcagccgcagccacagccccctgcggagcaagcagagagatgtggcccaggcccggacccacgccaacccccggggccggcccaagatgggcagccgcagcaccagcgagagccgcagccgcagccgcagccgcagccgcagcgccagcagcaacagcaggaagagcctgagccctggggtgtcccgggacagcagcaccagctacacagagaccaaggaccccagcagcggccaggaggtggccaccccacctgtgccccagctgcaggtgtgtgagcccaaggagaggaccagcaccagcagcagctctgtgcaggcccggcggctgagccagcctgagagcgctgagaagcacgtgacccagaggctgcagcctgagcggggcagccccaagaagtgtgaggccgaggaggccgagcccccagctgccacccagccccagaccagcgagacccagaccagccacctgcctgagagcgagcgcatccaccacacagtggaggagaaggaggaggtgaccatggacaccagcgagaacagaccagaaaatgatgtgcctgagccccccatgcccatcgctgaccaggtgtccaatgatgacaggcctgagggctctgtggaggatgaggagaagaaggagagcagcctgcccaagagcttcaagaggaagatctctgtggtgtctgccaccaagggcgtgcctgctggcaacagcgacacagagggcggccagcccggcaggaagaggcgctggggcgccagcacagccaccacccagaagaagcccagcatcagcatcaccacagagagcctgaagagcctcatcccagacatcaagcccctggccggccaggaggccgtggtggacctgcacgcagatgacagccgcatcagtgaagatgaaacagaaagaaatggagatgatggcacccatgacaagggcctgaagatctgcaggacagtgacccaggtggtgcctgctgagggccaggagaatggccagcgggaggaggaggaggaggagaaggagcctgaggccgagccccctgtgcccccccaggtgtctgtggaggtggccctgcccccacctgctgagcacgaggtgaagaaggtgaccctgggggacaccctgaccaggaggagcatcagccagcagaagtctggagtgtccatcaccattgatgatcctgtgaggacagcccaggtgcccagccccccccggggcaagatcagcaacatcgtgcacatcagcaacctggtgcggcccttcaccctgggccagctgaaggagctgctgggccgcacaggcaccctggtggaggaggccttctggattgacaagatcaagagccactgctttgtgacctacagcacagtggaggaggccgtggccaccaggacagccctgcacggcgtgaagtggccccagagcaaccccaagttcctgtgtgccgactatgcagagcaggatgagctggactaccaccggggcctgctggtggaccggcccagcgagaccaagacagaggagcagggcatcccccggcccctgcaccccccacctcctcctcctgtgcagcccccccagcaccccagggctgagcagcgggagcaggagagagctgtgcgggagcagtgggccgagcgggagcgggagatggagcggcgggagaggaccaggtctgagcgggagtgggaccgggacaaggtgcgggagggccccaggagccgcagccgcagccgggacagaagaaggaaggagcgggccaagagcaaggagaagaagtctgagaagaaggagaaggcccaggaggagcccccagccaagctgctggatgacctcttcaggaagaccaaggccgccccctgcatctactggctgcccctgacagacagccagatcgtgcagaaggaggccgagcgggcagagcgggccaaggagcgggagaagaggaggaaggagcaggaggaggaggagcagaaggagcgggagaaggaggccgagcgggagaggaaccggcagctggagcgggagaagaggcgggagcacagccgggagcgggaccgggagcgggagcgggagcgggagcgggacagaggagaccgggaccgggaccgggagcgggaccgggagcggggccgggagcgggaccggcgggacaccaagaggcacagccgcagccgcagccgcagcacccctgtgcgggaccggggcggcagaagatag

SEQ ID NO: 183536 - DNA, 4026 bp, Artificial Sequence
  derived and/or modified sequence
atgtggcggcggaagcacccccggaccagcggcggcacccggggcgtcctcagcggcaatagaggtgtggaatatggttccggccgtgggcatctcggaaccttcgaaggtcgatggaggaaactgcctaaaatgcccgaagccgtaggaaccgatccaagtacctctaggaaaatggccgaattagaggaagtcactctggatggtaagccgttacaggcactacgcgtcacggatctcaaggccgccctggagcagcgtgggctcgcaaaatccggacagaagagcgccttagtgaagcggctgaaaggagcattgatgctggagaacttgcaaaagcattccacgccacacgcggcctttcaaccgaatagtcagatcggggaagaaatgagtcagaactcttttattaagcagtaccttgagaagcaacaggaacttttgcgtcagaggctggagcgagaagcccgcgaagctgcagaactagaggaagccagcgctgagtctgaggacgaaatgatccatccagagggcgtggcctccctcctgcctcctgactttcagagtagcctggaaaggccagaactcgagcttagtcgccatagcccccggaaatcatcctccatcagcgaggaaaagggcgatagcgatgatgaaaaaccccggaaaggagaaagaaggagctctcgggttagacaagctcgcgcagccaaactgtcagaggggtcacagcccgcggaggaggaagaggatcaggagacccctagtaggaacctgagggtgcgtgctgaccggaatcttaagactgaggaagaggaagaagaggaagaggaagaggaagaggatgacgaggaggaggagggtgacgacgaagggcagaaaagtcgtgaagcccccattcttaaagagtttaaagaggagggcgaggaaatcccacgggtgaagcctgaagagatgatggacgaaaggccaaagacgcgcagccaggagcaggaagtgttggagcgtggcggccgctttacacggagtcaggaagaagctagaaaatcacacctggcacggcaacagcaggagaaagagatgaagaccacttccccacttgaagaggaagaacgcgaaataaaatcctcccagggcttgaaggagaagagcaagagccccagcccccctagacttacagaagatcgcaaaaaggcctcactggtagccctgccagagcaaaccgcctcggaggaagagacacctcccccactgttgactaaggaagcctcctcgccgcccccccatcctcagcttcacagcgaagaggagatcgaacctatggagggtcctgctcccgccgtgctgattcaactctcccccccaaatacagatgccgacacacgggaattgctggtgagtcagcacactgtgcaactggtgggtggacttagtccactttcatcaccctccgataccaaggccgagtcccctgcagagaaagtgcctgaggagtcagttcttccgcttgtacagaagtccacattggccgactactccgcccagaaagaccttgaaccagaatctgatcgatcagcgcaacccctgcccctcaagatcgaggagcttgctttagcgaagggcattaccgaggaatgcctgaagcaacctagcctggaacaaaaagagggccggagagccagtcacactctcctgccaagccatcgcctgaaacaatccgctgatagttcatcttcaaggtcaagcagctcatcatcttcatcttccagatcccgcagccggtcccccgacagcagcgggtcccggtcccattctcccctgagaagcaaacagagagatgtcgctcaggcacggacgcatgccaacccaagaggcaggccaaaaatgggcagcaggtcgacctctgaaagcagaagtagaagccggtcgaggtctcgttcggccagcagtaactctagaaagtcactgtcaccgggggtttctcgggactccagtactagctatactgagaccaaagacccttcttcgggccaagaggtagcaacaccgcctgttccgcagctccaggtgtgcgagcccaaagaacggacatccacgagtagcagcagtgtccaggcaaggcgtctgtcccagcctgaaagcgctgagaaacatgtcacccagaggctccagcccgaacggggtagccctaagaagtgtgaggccgaagaggcagagccacctgcagccactcagcctcagacctcagaaacacagacctcgcatctgcctgagtctgaacggattcaccacacagtcgaggaaaaggaggaggtgactatggataccagcgagaacagacccgaaaatgacgtaccagaaccacctatgcctatcgccgatcaagtcagcaacgacgaccggccggaggggtccgtcgaagacgaagagaagaaagagagctcgctccctaagtctttcaagcgcaaaatcagtgtcgtgagcgcgacaaagggtgtccccgccggcaattcggacacagaaggaggtcaacctggccgtaagcgacgctggggcgcttccacagccaccacacagaaaaaaccgtcaatcagtattacaaccgagagcttaaagagcctgatcccagacatcaagcccctggctgggcaggaagctgttgttgatcttcacgctgacgattcaagaatctctgaagacgaaacagaacgcaatggcgatgacgggactcatgacaagggcctgaaaatatgccggacagtcacccaagttgtccctgcggagggccaagaaaacggacagcgcgaagaggaagaggaggagaaagaaccggaagctgagccccctgtcccgccacaggtgagcgtcgaagtcgcgctgccgccgccagccgaacatgaggtgaagaaagtcacactcggcgatacattgactcggaggtccatcagtcagcagaaatcgggggtcagtatcacaatcgatgacccagtgaggaccgcccaggttccgagtcccccacggggtaagataagcaatattgtacatatctcgaatctggtgcgaccgttcaccctggggcagcttaaggaactgctggggaggactggaacactcgttgaggaagctttctggattgacaagattaaaagccactgcttcgttacgtactcaacggtggaagaagcagtcgctactcgtacagcgcttcacggcgtgaagtggccgcaaagcaaccctaaattcctctgtgccgactacgcagagcaggacgaactggactatcatcgcggtctgctcgtcgacagaccttcagagacgaagactgaggaacaggggatcccacgcccgctccatccacccccaccccctcccgtgcagcctccccagcaccccagggccgagcagcgagaacaagaacgtgctgtccgggagcagtgggcggaacgtgagcgcgaaatggagcgacgggaaaggacacgctcggagcgcgaatgggaccgagataaagtacgggaggggccaagatctaggtctcgatctagggacaggcggagaaaggagcgtgctaaatccaaagaaaaaaagagtgagaagaaggagaaggcccaagaggaacccccagctaagctcttggacgatcttttccggaagacaaaggccgccccttgtatctactggcttcctctgacagattcccagatcgtccaaaaagaggccgagcgggcagagcgcgcaaaggagagagaaaagcgaagaaaagagcaggaggaagaggagcaaaaggaacgggaaaaagaggcagagcgcgagagaaacaggcagctagaacgggaaaaaaggcgggaacatagcagggagcgagacagagagagagagcgggaaagagaaagagaccgaggcgatcgagaccgggacagagaacgcgatagggagcgagggagggagcgcgacagacgggatacaaagaggcacagtagaagccgtagccgcagcacgccagttcgggaccgggggggaagacggtag

SEQ ID NO: 183537 - DNA, 4026 bp, Artificial Sequence
  derived and/or modified sequence
atgtggagacgaaaacaccccagaacatcaggtggtactcgcggtgtcctaagtgggaatcgaggcgtggagtacggcagcggtcgcggacacttggggacattcgagggacggtggcgtaagcttccaaagatgcccgaagccgtgggcacagacccgtccacgtctaggaaaatggccgagctggaagaggttacactcgacggcaaacctctgcaggccttgagggtcacagatctaaaggctgctctggagcagcggggtctggcgaaaagcggtcaaaaaagcgccctggttaagcgcttgaaaggggctctaatgctcgagaatctgcagaagcattctacgccccatgctgcgtttcaacctaattcccagataggcgaggagatgtcccaaaattctttcataaaacaatacctggagaagcaacaggagctgttaaggcagcgcctcgagcgcgaagctcgtgaagccgcagagctcgaggaggcttcggcagaatctgaggacgaaatgatccaccctgagggggtcgccagcctgctgccgccagactttcagtcaagcctcgagagaccagagctagagctctcccgtcacagtccccgaaaaagcagtagcatatctgaggagaagggtgactccgatgacgagaagccccgaaagggggaaagacgctcgtcaagggtcagacaagcccgagccgcaaaattgagcgaaggcagccagcctgctgaagaagaggaggaccaggagaccccttcccgcaacctgcgggtaagggcagacagaaacctgaaaaccgaggaagaagaagaggaagaagaggaagaggaggaggacgatgaggaagaggagggggatgacgagggccagaagtcaagggaggctccaattctgaaagaatttaaggaagagggggaggagataccccgagttaaacccgaagagatgatggatgagcgccctaaaacccgttcccaggagcaggaagttctggaaaggggaggccgttttacgaggtcccaggaggaggcccgaaaatcacacctggcacggcagcagcaagagaaggagatgaagacaactagtccgttggaggaggaagagagagaaatcaagtcctcccaggggttgaaggagaagtctaagtcccccagcccaccacgcctaaccgaggaccgcaaaaaggccagtctggtggcactgccagaacagactgcctctgaagaggagacaccgccaccactgttaaccaaagaagctagctccccccctcctcacccacagttgcatagcgaggaggagatcgaaccaatggaaggacccgcaccagccgttttgatccaactcagccctcctaacaccgatgccgacacccgggagttgttagtcagccaacacactgtgcagctagtcggagggctgtccccactctcttctccgtctgacacaaaagctgaatccccagccgagaaggtccctgaagagtccgtgttgcccctcgttcagaagagtaccttagctgactattctgcccagaaagacctcgaacccgaaagcgataggagcgcacagccgctccctctgaaaatagaagagctagctttggcaaagggcatcacagaggaatgcttgaaacaacccagtctggagcagaaagaggggaggagggcatctcacactctgttgcctagccatcggttgaaacaatccgcggatagttcgtcctccaggtcttcttccagctcttctagttcttccaggagtcgctcaagatccccggatagttctggctcccgctcacacagtccccttcgaagtaaacagcgggatgtggcccaagctcgcactcatgctaatcccagagggagacccaaaatggggtcacggagcacaagtgaatcaaggagcagatccaggtctcgatcccggagcgcctcaagtaactcacgcaaatccctgtctcctggcgtgagtcgagactcatcaactagctacaccgaaactaaagacccaagtagtggacaggaggtagccaccccccctgtacctcaattacaggtgtgtgagcctaaggagcggacctcaacctccagtagcagtgtgcaggcgcgacgcttaagtcagccagagtccgccgaaaagcacgttacacagcggctgcagcccgaacggggttctcccaagaaatgtgaagccgaagaagccgagcctcccgcagccacccagccccagacttcagaaactcagacatcacatctcccagaatctgagcgcatacatcacaccgtggaggaaaaggaagaagttactatggacacctccgaaaaccggccagaaaacgatgtaccagagcctccaatgcccatagctgaccaagtgtcaaatgatgatcgccctgagggttccgttgaagacgaagagaagaaggagtctagcctgcccaagtccttcaaaagaaaaatcagcgtggtgtcagccaccaagggagtcccagcagggaacagcgatactgaaggcggacagcccggaaggaaaagaagatggggggcaagcacggccaccacacagaagaagccatccatctcaataaccaccgaaagcctcaagtctttaataccagatatcaagcccctagcaggccaggaggctgtggtggacctgcacgccgatgactccagaatatcagaggacgagaccgagaggaatggggacgatggcacacacgataaaggtctcaaaatctgtcggaccgtcacccaagtggtgcccgctgagggacaggaaaacggtcaacgagaggaagaggaggaggagaaggagccggaagcggaacccccagtgcccccacaagtctcagtggaggtggccctacctccgccagccgaacatgaggtgaagaaagtgacactgggggataccttaactaggaggtctatcagtcagcagaaatctggtgtctccattactatcgacgatcccgtcagaaccgcacaggttcccagtcctccacggggaaagattagcaatattgtccacataagcaatctggtgcggccttttaccctgggccaactaaaagagctcctgggaagaacaggcactctggtggaagaggccttctggatcgataagattaaatctcactgttttgtgacgtactcgaccgtcgaagaagccgtggcaaccagaaccgccttacacggcgtgaagtggccacagagtaatccgaaatttctctgtgcagattatgcagagcaagacgagctggactatcacagagggctgctggtcgaccgcccaagcgaaaccaaaactgaggagcagggtatcccccgacctttgcacccgccaccgcctccgcctgtccagcccccacagcacccgagggcagaacagcgggagcaagagcgagctgtccgggaacagtgggctgagagggagcgcgaaatggaaaggagagagaggaccaggtccgagagagagtgggacagggacaaagtgagggaagggccaagatctcggagtaggtcgagagaccgcaggcggaaagagagagccaagagcaaggaaaagaagtccgaaaaaaaagaaaaggcacaggaagagcccccagctaagttactggatgacttatttcggaagaccaaagccgctccgtgcatatactggctgccactgaccgatagtcagatcgttcagaaagaggctgaacgcgcagagagagccaaagagagggagaaacgacggaaggagcaggaggaagaggaacagaaagagagggagaaggaagctgagagagagcggaacagacagctggagagagaaaaaagaagagagcattctcgtgagcgggatcgcgagagagagcgggagcgggaacgcgacagaggagaccgggatcgtgacagagaaagagatcgcgagaggggacgcgagcgtgataggagggataccaagcggcattcccgatctcgatccagatctacaccagtgagagaccgcggtgggcgaaggtag

SEQ ID NO: 183538 - DNA, 4935 bp, Artificial Sequence
  derived and/or modified sequence
cttttctctcgaagggcacccgaagattgtcacgagtccttagactccaactactgcggcagcttccaaatttcctgaaaaccctaagctgggccagcccggcagcccacgcacttccggcctcggacccgccccaaacacccaagcgccccagcgcctcatctctaggtccggaaataaacgaacatctccgattatggttataccagggtcgagggtttccgaatatattcgattcaaagcttcggcaagacgaagaaaaccgagcctgaaagcagggcgagaaaaggggcgctgcagggcggatggaaagaattgattggtaacgatgtggagacggaaacatccgaggacatccggaggaacccggggagttctgagtggtaatcgaggggtagagtatggcagtgggcggggtcatctcggtacgttcgaagggcgttggcggaaattaccgaagatgcccgaagccgtcgggacggacccgagtacctcacgcaagatggcggagctggaggaggtgactctggacgggaagcctcttcaggcgctgcgggtgaccgacctgaaggccgcactggagcagcgaggcctagccaagagcgggcagaagagtgccctggtcaagcggctcaaaggggctctaatgctagaaaatttacagaaacactcaacaccccatgctgcattccagccaaattcccagattggtgaggaaatgagccagaacagtttcataaaacagtatctggaaaagcagcaggagctacttaggcagcgtctggaacgtgaagctcgagaagctgcagaacttgaagaagcttcagctgagtcggaggacgagatgatccatcctgagggagtggcttccctgctgcctcctgactttcagagcagcctggagagaccagagctggagctcagcagacattcgcccagaaaaagctcctcaatttctgaagagaaaggtgactctgatgatgagaaaccaaggaaaggagaaagacgatcatctagggtcagacaggcaagagcagctaaactgtctgagggcagccaacctgctgaggaggaagaggatcaagaaacaccttccagaaacctaagggtcagagcagatcgaaatttgaaaacagaggaggaagaagaggaggaggaggaggaggaagaagatgatgaagaagaggaaggtgatgatgagggacaaaaatctagggaggcaccaatcctgaaagagtttaaggaagaaggggaagagatacctagagtaaaaccagaggagatgatggatgagagacccaaaacaagatcccaggaacaggaggtgttagagagaggagggagatttacaagatcccaggaagaggctagaaaaagtcatctggccagacagcagcaggagaaggaaatgaaaacaacatctccccttgaggaggaagaaagagaaataaaatcttcacaaggcttaaaggaaaaatcgaagtctccttcccctcctcgactgactgaagatcgaaagaaggcctcacttgtagcgctgccagagcaaactgccagcgaggaggagactcctccacctttactaacaaaggaagcatcttctccaccacctcatccacagctccatagcgaagaagaaatagagcccatggaaggcccagcccccgctgtcctcattcagttatctcctcctaatacagatgctgacaccagggagctattagtatctcagcatactgtccagttggtaggaggcctgtctcctttgtcaagtccttcagacaccaaagcagaatctccagcagagaaagtgccagaggagagtgtcctgcctctggttcagaaaagcacactggctgactactcagcccagaaggatcttgaacctgagtcagacagatctgctcagcccctccctctaaaaattgaggaattagcactggccaaaggaatcactgaagaatgtctgaaacagccatctttggaacagaaggaaggcagaagagcttctcatacccttctcccaagccacagattgaaacagtcagctgattcatcctctagccggtcctcctcatcttcctcctccagttctagatcaagatctcgctctcctgacagttcaggttctcggtctcattcaccgctcagatccaagcagagagatgtagcccaggcacgtactcatgccaaccctcgtggtagacccaagatgggctccagatcaacatcagagtccagatcaaggtcacgttcacgttctcgttcagcatcaagcaacagcagaaaatctctgagccctggagtctccagggacagcagcaccagctatactgaaaccaaagatccctcttctggtcaggaggttgcaactccaccagtgccacaactgcaggtctgtgagccaaaggagaggacttccacctcctcatcctctgtccaagcaaggcgtctgagtcagcctgaatcagctgaaaagcatgtgacccagaggttacagcctgagcgggggagcccaaagaagtgtgaagctgaagaggcagagccaccagctgccacacagccccaaacctcagagactcagacctctcatctgccagaatcagaaagaattcatcacactgttgaggagaaggaggaagtgaccatggacacaagtgaaaacagacctgaaaatgatgttccagaacctcccatgcctattgcagaccaagtcagcaatgatgaccgcccggagggcagtgttgaagatgaggagaagaaagagagctcgctgcccaaatcattcaagaggaagatctccgttgtctcagctaccaagggggtgccagctggaaacagtgacacagaggggggccagcctggtcggaaacgacgctggggagccagcacagccaccacacagaagaaaccttccatcagtatcaccactgaatcactaaagagcctcatccccgacatcaaacccctggcggggcaggaggctgttgtggatcttcatgctgatgactctcgcatctctgaggatgagacagagcgtaatggcgatgatgggacccatgacaaggggctgaaaatatgccggacagtcactcaggtagtacctgcagagggccaggagaatgggcagagggaagaagaggaagaagagaaggaacctgaagcagaacctcctgtacctccccaggtgtcagtagaggtggccttgcccccacctgcagagcatgaagtaaagaaagtgactttaggagataccttaactcgacgttccattagccagcagaagtccggagtttccattaccattgatgacccagtccgaactgcccaggtgccctccccaccccggggcaagattagcaacattgtccatatctccaatttggtccgtcctttcactttaggccagctaaaggagttgttggggcgcacaggaaccttggtggaagaggccttctggattgacaagatcaaatctcattgctttgtaacgtactcaacagtagaggaagctgttgccacccgcacagctctgcacggggtcaaatggccccagtccaatcccaaattcctttgtgctgactatgccgagcaagatgagctggattatcaccgaggcctcttggtggaccgtccctctgaaactaagacagaggagcagggaataccacggcccctgcaccccccacccccacccccggtccagccaccacagcacccccgggcagagcagcgggagcaggaacgggcagtgcgggaacagtgggcagaacgggaacgggaaatggagcggcgggagcggactcgatcagagcgtgaatgggatcgggacaaagttcgagaagggccccgttcccgatcaaggtcccgtgaccgccgccgcaaggaacgtgcgaagtctaaagaaaagaagagtgagaagaaagagaaagcccaggaggaaccacctgccaagctgctggatgaccttttccgaaagaccaaggcagctccctgcatctattggctcccactgactgacagccagatcgttcagaaagaggcagagcgggccgaacgggccaaggagcgggagaagcggcgaaaggagcaagaagaagaagagcaaaaggagcgggagaaggaagccgagcgggaacggaaccgacagctggagcgagagaaacgtcgggagcacagtcgggagagggacagggagagagagagagaaagggagcgggacaggggggaccgagatcgggatagggaaagggaccgagaacgaggcagggaaagggatcgcagggacaccaagcgccacagcagaagccggagtcggagcacacctgtgcgggaccggggtgggcgccgctagctgggaaaacactagagctgcaggtaccagccactcggccccagggggttatggccacagagggataggcacagtctccaccaccctggagccaagggtctttcacatcacctatccctacatacataccaaatggaaaagtggccatccttttccccccaaacacacccccttaacctatctcttgggacttagcccgaccctccctctcatttcccattaagtctgagaggcaagagctaggttaggcaaggaggtggttggccagagatggggaacagccaggtgccccagtcctctgatttttcctccatcctgcttaccacctccctgggtacttacagccttctcttgggaacagccggggccaggactgggtcacctatgagctgaatcagcatctcctcctgagtcccagggcccctgcagttcccagtctcttctgtcctgcagcccttgcctctttcccacaggttccactttatatccaccttttccttttgttcaatttttatttttattttttttattattaaatgatgtggtctatggaaaaaaaaataaaaatctgacttagtttt

SEQ ID NO: 183539 - DNA, 4026 bp, Artificial Sequence
  derived and/or modified sequence
atgtggagaagaaagcaccccagaaccagcggcggcaccagaggcgtgctgagcggcaacagaggcgtggagtacggcagcggcagaggccacctgggcaccttcgagggcagatggagaaagctgcccaagatgcccgaggccgtgggcaccgaccccagcaccagcagaaagatggccgagctggaggaggtgaccctggacggcaagcccctgcaggccctgagagtgaccgacctgaaggccgccctggagcagagaggcctggccaagagcggccagaagagcgccctggtgaagagactgaagggcgccctgatgctggagaacctgcagaagcacagcaccccccacgccgccttccagcccaacagccagatcggcgaggagatgagccagaacagcttcatcaagcagtacctggagaagcagcaggagctgctgagacagagactggagagagaggccagagaggccgccgagctggaggaggccagcgccgagagcgaggacgagatgatccaccccgagggcgtggccagcctgctgccccccgacttccagagcagcctggagagacccgagctggagctgagcagacacagccccagaaagagcagcagcatcagcgaggagaagggcgacagcgacgacgagaagcccagaaagggcgagagaagaagcagcagagtgagacaggccagagccgccaagctgagcgagggcagccagcccgccgaggaggaggaggaccaggagacccccagcagaaacctgagagtgagagccgacagaaacctgaagaccgaggaggaggaggaggaggaggaggaggaggaggaggacgacgaggaggaggagggcgacgacgagggccagaagagcagagaggcccccatcctgaaggagttcaaggaggagggcgaggagatccccagagtgaagcccgaggagatgatggacgagagacccaagaccagaagccaggagcaggaggtgctggagagaggcggcagattcaccagaagccaggaggaggccagaaagagccacctggccagacagcagcaggagaaggagatgaagaccaccagccccctggaggaggaggagagagagatcaagagcagccagggcctgaaggagaagagcaagagccccagcccccccagactgaccgaggacagaaagaaggccagcctggtggccctgcccgagcagaccgccagcgaggaggagacccccccccccctgctgaccaaggaggccagcagcccccccccccacccccagctgcacagcgaggaggagatcgagcccatggagggccccgcccccgccgtgctgatccagctgagcccccccaacaccgacgccgacaccagagagctgctggtgagccagcacaccgtgcagctggtgggcggcctgagccccctgagcagccccagcgacaccaaggccgagagccccgccgagaaggtgcccgaggagagcgtgctgcccctggtgcagaagagcaccctggccgactacagcgcccagaaggacctggagcccgagagcgacagaagcgcccagcccctgcccctgaagatcgaggagctggccctggccaagggcatcaccgaggagtgcctgaagcagcccagcctggagcagaaggagggcagaagagccagccacaccctgctgcccagccacagactgaagcagagcgccgacagcagcagcagcagaagcagcagcagcagcagcagcagcagcagaagcagaagcagaagccccgacagcagcggcagcagaagccacagccccctgagaagcaagcagagagacgtggcccaggccagaacccacgccaaccccagaggcagacccaagatgggcagcagaagcaccagcgagagcagaagcagaagcagaagcagaagcagaagcgccagcagcaacagcagaaagagcctgagccccggcgtgagcagagacagcagcaccagctacaccgagaccaaggaccccagcagcggccaggaggtggccaccccccccgtgccccagctgcaggtgtgcgagcccaaggagagaaccagcaccagcagcagcagcgtgcaggccagaagactgagccagcccgagagcgccgagaagcacgtgacccagagactgcagcccgagagaggcagccccaagaagtgcgaggccgaggaggccgagccccccgccgccacccagccccagaccagcgagacccagaccagccacctgcccgagagcgagagaatccaccacaccgtggaggagaaggaggaggtgaccatggacaccagcgagaacagacccgagaacgacgtgcccgagccccccatgcccatcgccgaccaggtgagcaacgacgacagacccgagggcagcgtggaggacgaggagaagaaggagagcagcctgcccaagagcttcaagagaaagatcagcgtggtgagcgccaccaagggcgtgcccgccggcaacagcgacaccgagggcggccagcccggcagaaagagaagatggggcgccagcaccgccaccacccagaagaagcccagcatcagcatcaccaccgagagcctgaagagcctgatccccgacatcaagcccctggccggccaggaggccgtggtggacctgcacgccgacgacagcagaatcagcgaggacgagaccgagagaaacggcgacgacggcacccacgacaagggcctgaagatctgcagaaccgtgacccaggtggtgcccgccgagggccaggagaacggccagagagaggaggaggaggaggagaaggagcccgaggccgagccccccgtgcccccccaggtgagcgtggaggtggccctgcccccccccgccgagcacgaggtgaagaaggtgaccctgggcgacaccctgaccagaagaagcatcagccagcagaagagcggcgtgagcatcaccatcgacgaccccgtgagaaccgcccaggtgcccagcccccccagaggcaagatcagcaacatcgtgcacatcagcaacctggtgagacccttcaccctgggccagctgaaggagctgctgggcagaaccggcaccctggtggaggaggccttctggatcgacaagatcaagagccactgcttcgtgacctacagcaccgtggaggaggccgtggccaccagaaccgccctgcacggcgtgaagtggccccagagcaaccccaagttcctgtgcgccgactacgccgagcaggacgagctggactaccacagaggcctgctggtggacagacccagcgagaccaagaccgaggagcagggcatccccagacccctgcacccccccccccccccccccgtgcagcccccccagcaccccagagccgagcagagagagcaggagagagccgtgagagagcagtgggccgagagagagagagagatggagagaagagagagaaccagaagcgagagagagtgggacagagacaaggtgagagagggccccagaagcagaagcagaagcagagacagaagaagaaaggagagagccaagagcaaggagaagaagagcgagaagaaggagaaggcccaggaggagccccccgccaagctgctggacgacctgttcagaaagaccaaggccgccccctgcatctactggctgcccctgaccgacagccagatcgtgcagaaggaggccgagagagccgagagagccaaggagagagagaagagaagaaaggagcaggaggaggaggagcagaaggagagagagaaggaggccgagagagagagaaacagacagctggagagagagaagagaagagagcacagcagagagagagacagagagagagagagagagagagagagagacagaggcgacagagacagagacagagagagagacagagagagaggcagagagagagacagaagagacaccaagagacacagcagaagcagaagcagaagcacccccgtgagagacagaggcggcagaagatag

SEQ ID NO: 183540 - protein, 197 aa, Artificial Sequence
  derived and/or modified sequence
MGERKIFKKRKPGAQCALGRDHSGSVVSEPCVCANWDFECDYGYERHGESQCVPAFWYNPASPSKDCSLGQSYLNSTGYRRIVSNNCTDGLREKYTAKAQMCPGKAPRGLHVVTTDGRLVAEQGHNATFIILMEEGDLQRTNIQLDFGDGIAVSYANFSPIEDGIKHVYKSAGIFQVTAYAENNLGSDTAVLFLHVV

SEQ ID NO: 183541 - protein, 1222 aa, Artificial Sequence
  derived and/or modified sequence
MEAARTERPAGRPGAPLVRTGLLLLSTWVLAGAEITWDATGGPGRPAAPASRPPALSPLSPRAVASQWPEELASARRAAVLGRRAGPELLPQQGGGRGGEMQVEAGGTSPAGERRGRGIPAPAKLGGARRSRRAQPPITQERGDAWATAPADGSRGSRPLAKGSREEVKAPRAGGSAAEDLRLPSTSFALTGDSAHNQAMVHWSGHNSSVILILTKLYDFNLGSVTESSLWRSTDYGTTYEKLNDKVGLKTVLSYLYVNPTNKRKIMLLSDPEMESSILISSDEGATYQKYRLTFYIQSLLFHPKQEDWVLAYSLDQKLYSSMDFGRRWQLMHERITPNRFYWSVAGLDKEADLVHMEVRTTDGYAHYLTCRIQECAETTRSGPFARSIDISSLVVQDEYIFIQVTTSGRASYYVSYRREAFAQIKLPKYSLPKDMHIISTDENQVFAAVQEWNQNDTYNLYISDTRGIYFTLAMENIKSSRGLMGNIIIELYEVAGIKGIFLANKKVDDQVKTYITYNKGRDWRLLQAPDVDLRGSPVHCLLPFCSLHLHLQLSENPYSSGRISSKETAPGLVVATGNIGPELSYTDIGVFISSDGGNTWRQIFDEEYNVWFLDWGGALVAMKHTPLPVRHLWVSFDEGHSWDKYGFTSVPLFVDGALVEAGMETHIMTVFGHFSLRSEWQLVKVDYKSIFSRHCTKEDYQTWHLLNQGEPCVMGERKIFKKRKPGAQCALGRDHSGSVVSEPCVCANWDFECDYGYERHGESQCVPAFWYNPASPSKDCSLGQSYLNSTGYRRIVSNNCTDGLREKYTAKAQMCPGKAPRGLHVVTTDGRLVAEQGHNATFIILMEEGDLQRTNIQLDFGDGIAVSYANFSPIEDGIKHVYKSAGIFQVTAYAENNLGSDTAVLFLHVVCPVEHVHLRVPFVAIRNKEVNISAVVWPSQLGTLTYFWWFGNSTKPLITLDSSISFTFLAEGTDTITVQVAAGNALIQDTKEIAVHEYFQSQLLSFSPNLDYHNPDIPEWRKDIGNVIKRALVKVTSVPEDQILIAVFPGLPTSAELFILPPKNLTERRKGNEGDLEQIVETLFNALNQNLVQFELKPGVQVIVYVTQLTLAPLVDSSAGHSSSAMLMLLSVVFVGLAVFLIYKFKRKIPWINIYAQVQHDKEQEMIGSVSQSENAPKITLSDFTEPEELLDKELDTRVIGGIATIANSESTKEIPNCTSV

SEQ ID NO: 183542 - DNA, 3669 bp, Artificial Sequence
  derived and/or modified sequence
atggaggccgccagaaccgagagacccgccggcagacccggcgcccccctggtgagaaccggcctgctgctgctgagcacctgggtgctggccggcgccgagatcacctgggacgccaccggcggccccggcagacccgccgcccccgccagcagaccccccgccctgagccccctgagccccagagccgtggccagccagtggcccgaggagctggccagcgccagaagagccgccgtgctgggcagaagagccggccccgagctgctgccccagcagggcggcggcagaggcggcgagatgcaggtggaggccggcggcaccagccccgccggcgagagaagaggcagaggcatccccgcccccgccaagctgggcggcgccagaagaagcagaagagcccagccccccatcacccaggagagaggcgacgcctgggccaccgcccccgccgacggcagcagaggcagcagacccctggccaagggcagcagagaggaggtgaaggcccccagagccggcggcagcgccgccgaggacctgagactgcccagcaccagcttcgccctgaccggcgacagcgcccacaaccaggccatggtgcactggagcggccacaacagcagcgtgatcctgatcctgaccaagctgtacgacttcaacctgggcagcgtgaccgagagcagcctgtggagaagcaccgactacggcaccacctacgagaagctgaacgacaaggtgggcctgaagaccgtgctgagctacctgtacgtgaaccccaccaacaagagaaagatcatgctgctgagcgaccccgagatggagagcagcatcctgatcagcagcgacgagggcgccacctaccagaagtacagactgaccttctacatccagagcctgctgttccaccccaagcaggaggactgggtgctggcctacagcctggaccagaagctgtacagcagcatggacttcggcagaagatggcagctgatgcacgagagaatcacccccaacagattctactggagcgtggccggcctggacaaggaggccgacctggtgcacatggaggtgagaaccaccgacggctacgcccactacctgacctgcagaatccaggagtgcgccgagaccaccagaagcggccccttcgccagaagcatcgacatcagcagcctggtggtgcaggacgagtacatcttcatccaggtgaccaccagcggcagagccagctactacgtgagctacagaagagaggccttcgcccagatcaagctgcccaagtacagcctgcccaaggacatgcacatcatcagcaccgacgagaaccaggtgttcgccgccgtgcaggagtggaaccagaacgacacctacaacctgtacatcagcgacaccagaggcatctacttcaccctggccatggagaacatcaagagcagcagaggcctgatgggcaacatcatcatcgagctgtacgaggtggccggcatcaagggcatcttcctggccaacaagaaggtggacgaccaggtgaagacctacatcacctacaacaagggcagagactggagactgctgcaggcccccgacgtggacctgagaggcagccccgtgcactgcctgctgcccttctgcagcctgcacctgcacctgcagctgagcgagaacccctacagcagcggcagaatcagcagcaaggagaccgcccccggcctggtggtggccaccggcaacatcggccccgagctgagctacaccgacatcggcgtgttcatcagcagcgacggcggcaacacctggagacagatcttcgacgaggagtacaacgtgtggttcctggactggggcggcgccctggtggccatgaagcacacccccctgcccgtgagacacctgtgggtgagcttcgacgagggccacagctgggacaagtacggcttcaccagcgtgcccctgttcgtggacggcgccctggtggaggccggcatggagacccacatcatgaccgtgttcggccacttcagcctgagaagcgagtggcagctggtgaaggtggactacaagagcatcttcagcagacactgcaccaaggaggactaccagacctggcacctgctgaaccagggcgagccctgcgtgatgggcgagagaaagatcttcaagaagagaaagcccggcgcccagtgcgccctgggcagagaccacagcggcagcgtggtgagcgagccctgcgtgtgcgccaactgggacttcgagtgcgactacggctacgagagacacggcgagagccagtgcgtgcccgccttctggtacaaccccgccagccccagcaaggactgcagcctgggccagagctacctgaacagcaccggctacagaagaatcgtgagcaacaactgcaccgacggcctgagagagaagtacaccgccaaggcccagatgtgccccggcaaggcccccagaggcctgcacgtggtgaccaccgacggcagactggtggccgagcagggccacaacgccaccttcatcatcctgatggaggagggcgacctgcagagaaccaacatccagctggacttcggcgacggcatcgccgtgagctacgccaacttcagccccatcgaggacggcatcaagcacgtgtacaagagcgccggcatcttccaggtgaccgcctacgccgagaacaacctgggcagcgacaccgccgtgctgttcctgcacgtggtgtgccccgtggagcacgtgcacctgagagtgcccttcgtggccatcagaaacaaggaggtgaacatcagcgccgtggtgtggcccagccagctgggcaccctgacctacttctggtggttcggcaacagcaccaagcccctgatcaccctggacagcagcatcagcttcaccttcctggccgagggcaccgacaccatcaccgtgcaggtggccgccggcaacgccctgatccaggacaccaaggagatcgccgtgcacgagtacttccagagccagctgctgagcttcagccccaacctggactaccacaaccccgacatccccgagtggagaaaggacatcggcaacgtgatcaagagagccctggtgaaggtgaccagcgtgcccgaggaccagatcctgatcgccgtgttccccggcctgcccaccagcgccgagctgttcatcctgccccccaagaacctgaccgagagaagaaagggcaacgagggcgacctggagcagatcgtggagaccctgttcaacgccctgaaccagaacctggtgcagttcgagctgaagcccggcgtgcaggtgatcgtgtacgtgacccagctgaccctggcccccctggtggacagcagcgccggccacagcagcagcgccatgctgatgctgctgagcgtggtgttcgtgggcctggccgtgttcctgatctacaagttcaagagaaagatcccctggatcaacatctacgcccaggtgcagcacgacaaggagcaggagatgatcggcagcgtgagccagagcgagaacgcccccaagatcaccctgagcgacttcaccgagcccgaggagctgctggacaaggagctggacaccagagtgatcggcggcatcgccaccatcgccaacagcgagagcaccaaggagatccccaactgcaccagcgtgtag

SEQ ID NO: 183543 - DNA, 3669 bp, Artificial Sequence
  derived and/or modified sequence
atggaggcagctcggactgaacgacctgccggcaggccaggggccccactggtcagaacaggcctcttgctgttgagcacatgggtgctagcaggtgcagaaatcacctgggacgcaacaggcggccctgggcggccagcggcaccagcgtcaaggcctcctgccctgagtcccctgtcaccccgagcagttgcgagccagtggcctgaagaactggcatcagctaggagagccgctgtcttgggcagaagagccgggccagagcttctgcctcagcagggtggcggacgtggtggtgaaatgcaggttgaggccgggggcaccagccccgccggcgaaaggagagggagaggaatccccgcccctgctaaacttgggggagctagaaggtccaggagagctcagccccccattacacaggagaggggtgatgcatgggctactgcccctgccgacggtagcaggggctccagacccctggcaaaaggctccagggaggaggtgaaagctcccagagccggaggcagtgccgctgaagatttacgcctgcctagtacatctttcgcactcactggcgactcagcccacaatcaagccatggtccactggagcggacacaactctagtgtaatattgatcttgacgaagttatacgactttaacctggggtccgtgactgaaagctcactgtggcggtccaccgattacgggacaacatatgagaaacttaatgataaggtagggttgaagacagttctatcctacctgtatgtgaatccaacaaacaaacggaagataatgcttttgtccgaccccgaaatggagtcctcaattctcataagcagcgatgaaggagctacgtatcaaaaatataggctgaccttctatatccaaagcctcctgttccaccccaagcaggaagactgggtgctcgcttatagcctagatcagaagctgtactcatctatggacttcggcagacggtggcaattaatgcatgagaggatcacccctaataggttctactggtccgtggccggcctagacaaggaggctgatcttgtccatatggaggtgagaacgacagatgggtacgcccactatctcacctgtaggatccaagagtgtgcagagacgaccagatccggtccattcgcccggtccatagatatctcctccctggttgtacaggacgagtacatctttattcaggtgaccacaagtgggagagcaagctattacgttagctaccgcagagaggcctttgcacagatcaagctccctaaatatagcctgcccaaggacatgcacatcatatccaccgatgagaatcaggtgtttgccgctgtccaggaatggaaccagaatgatacctacaacctgtacatttccgatactcggggaatctactttaccctagccatggagaacatcaagagttcccgcgggctgatgggaaatattattatcgagttgtacgaggtggcgggcatcaaaggcattttcttggccaataagaaggtcgacgatcaggttaagacatatataacctataacaaagggcgggattggaggttgcttcaggctccagatgtggatctgcgcggcagcccggtgcactgccttcttcccttctgttctctgcatcttcacttacaactttcagagaatccgtattcctccggtagaatcagcagcaaggagacagccccaggccttgtagtcgccactggtaatatcggccccgaattgtcctacaccgatattggtgtattcatatcttccgatggcggaaacacgtggcggcagatcttcgatgaggagtataacgtctggtttctcgattgggggggcgccctggtggccatgaaacacacaccactcccggtgcggcatctttgggtctcattcgatgaaggtcacagctgggataaatacgggtttaccagcgtacctctgttcgtggatggagccctagtggaggctgggatggaaacccacataatgacagtattcgggcatttctccctgaggagcgagtggcagcttgtaaaagtggattacaagtcaatcttctccagacactgcaccaaggaggattaccagacgtggcacctcctgaaccagggggagccctgtgtcatgggcgagcgaaaaatttttaaaaaaagaaagcctggggctcagtgtgccctaggcagagaccactcaggaagcgtggtgagtgaaccctgtgtgtgtgccaattgggacttcgagtgtgattacggctacgagcgccacggggagtctcagtgtgtccccgccttttggtacaacccagcctcccctagcaaagattgcagcttgggtcaatcgtatctgaacagcacgggctacaggcgcatcgtatccaataattgcactgacggcctgcgtgagaagtatacagcgaaggcccaaatgtgcccaggcaaagcccccaggggcctccacgtggtgaccaccgacggtcggctcgtcgcggagcaggggcacaacgccacattcatcatactgatggaggagggggatctccagagaactaacattcagctcgactttggtgatggtatagccgtgagctacgctaatttctcccctatagaggatggaataaagcatgtgtacaagagtgcagggatctttcaggttaccgcatacgcagagaacaatctgggctccgataccgcagttcttttcttacacgtggtatgtcctgtagagcatgtacacctcagggtgccgtttgtggctattagaaacaaagaggtgaatattagtgccgtggtatggccttcccagttagggactctgacttatttctggtggttcgggaacagcacaaagccactgatcacccttgactcttcaataagcttcacatttcttgcggaaggcacagatactataactgtgcaggtggcagccgggaacgctctgattcaggataccaaggaaatcgctgtgcatgagtactttcagagccagcttctgagttttagtcctaacctggattaccataaccccgacattccagaatggcggaaagacataggcaatgtgattaagcgagccctggtgaaagtgacatcagttcctgaggatcagattctcatcgctgtattcccagggctgccgacttccgcagagctgtttattctgcctccaaagaatctgacagaaagaagaaaaggaaatgagggagacctggaacagatcgtggaaaccctcttcaatgctttaaatcaaaacctagtccagtttgagctgaaaccaggcgttcaagtgatcgtgtacgtcacacagctgacccttgcgccgctggtggactcatccgcggggcactcatcttccgctatgctcatgctactgtctgtagttttcgtaggcttggcagtgttcctgatttataagttcaaacgcaagattccttggattaatatctacgcccaggtccagcacgataaagagcaggagatgattgggagtgtctctcagagcgagaacgcccccaaaattactctgtccgatttcactgagcctgaggagttactggacaaggagttggatacccgggtaataggcgggattgccactattgccaactctgagtcaacaaaggagattccaaactgtacttcagtgtag

SEQ ID NO: 183544 - DNA, 3669 bp, Artificial Sequence
  derived and/or modified sequence
atggaggccgccaggacagagaggcctgctggccggcctggggcccccctggtgaggacaggcctgctgctgctgagcacctgggtgctggccggggctgagatcacctgggatgccaccggcggccctggccggcctgctgccccagccagccggcccccagccctgagccccctgagccccagggctgtggccagccagtggccagaggagctggccagcgcccggcgggctgctgtgctgggcagaagagctggccctgagctgctgccccagcagggcggcggccggggcggggagatgcaggtggaggccggcggcaccagccctgctggggagcggcggggccggggcatcccagccccagccaagctgggcggggcccggcgcagccggcgggcccagccccccatcacccaggagagaggagatgcctgggccacagccccagcagatggcagccggggcagccggcccctggccaagggcagccgggaggaggtgaaggcccccagggctgggggcagcgctgctgaggacctgcggctgcccagcaccagctttgccctgactggagacagcgcccacaaccaggccatggtgcactggagcggccacaacagcagcgtcatcctgatcctgaccaagctgtatgacttcaacctgggctctgtgacagagagcagcctgtggaggagcacagattatggcaccacctatgagaagctgaatgacaaggtgggcctgaagacagtgctgagctacctgtatgtgaaccccaccaacaagaggaagatcatgctgctgagtgaccctgagatggagagcagcatcctgatcagcagtgatgaaggagccacctaccagaagtaccgcctgaccttctacatccagagcctgctcttccaccccaagcaggaggactgggtgctggcctacagcctggaccagaagctgtacagctccatggactttggaagacgctggcagctgatgcatgagcgcatcacccccaaccgcttctactggagcgtggccggcctggacaaggaggccgacctggtgcacatggaggtgaggaccacagatggctacgcccactacctgacctgccgcatccaggagtgtgccgagaccaccaggagcggcccctttgcccggagcattgacatcagcagcctggtggtgcaggatgagtacatcttcatccaggtgaccaccagcggccgggccagctactacgtgtcctaccgccgggaggcctttgcccagatcaagctgcccaagtacagcctgcccaaggacatgcacatcatcagcacagatgagaaccaggtgtttgctgctgtgcaggagtggaaccagaatgacacctacaacctgtacatcagtgacacccggggcatctacttcaccctggccatggagaacatcaagagcagccggggcctgatgggcaacatcatcatcgagctgtatgaggtggccggcatcaagggcatcttcctggccaacaagaaggtggatgaccaggtgaagacctacatcacctacaacaagggccgggactggaggctgctgcaggccccagatgtggacctgcggggcagccctgtgcactgcctgctgcccttctgcagcctgcacctgcacctgcagctgtctgagaacccctacagcagcggccgcatcagcagcaaggagacagcccctggcctggtggtggccactggaaacatcggccctgagctgagctacacagacattggagtcttcatcagcagtgatggcggcaacacctggaggcagatctttgatgaggagtacaacgtgtggttcctggactggggcggggccctggtggccatgaagcacacccccctgcctgtgcgccacctgtgggtgtcctttgatgagggccacagctgggacaagtatggcttcacctctgtgcccctgtttgtggatggagccctggtggaggccggcatggagacccacatcatgacagtgtttggccacttcagcctgcggtctgagtggcagctggtgaaggtggactacaagagcatcttcagccgccactgcaccaaggaggactaccagacctggcacctgctgaaccagggcgagccctgtgtgatgggagagaggaagatcttcaagaagaggaagccaggggcccagtgtgccctgggccgggaccacagcggctctgtggtgtctgagccctgtgtgtgtgccaactgggactttgaatgtgactatggctatgaaagacatggagagagccagtgtgtgcctgccttctggtacaacccagccagccccagcaaggactgcagcctgggccagagctacctgaacagcacaggctaccgccgcatcgtgagcaacaactgcacagatggcctgcgggagaagtacacagccaaggcccagatgtgccctgggaaggccccccggggcctgcacgtggtgaccacagatggccgcctggtggccgagcagggccacaatgccaccttcatcatcctgatggaggagggggacctgcagaggaccaacatccagctggactttggagatggcattgctgtgtcctatgccaacttcagccccattgaagatggcatcaagcacgtgtacaagtctgctggcatcttccaggtgacagcctatgcagagaacaacctgggcagtgacacagctgtgctcttcctgcacgtggtgtgccctgtggagcacgtgcacctgcgggtgccctttgtggccatccggaacaaggaggtgaacatctctgctgtggtgtggcccagccagctgggcaccctgacctacttctggtggtttggaaacagcaccaagcccctcatcaccctggacagcagcatctccttcaccttcctggccgagggcacagacaccatcaccgtgcaggtggccgctggaaatgccctgatccaggacaccaaggagattgctgtgcatgagtacttccagagccagctgctgtccttcagccccaacctggactaccacaacccagacatccctgagtggaggaaggacattggaaatgtcatcaagagggccctggtgaaggtgacctctgtgcctgaggaccagatcctgattgctgtgtttcctggcctgcccaccagcgctgagctgttcatcctgccccccaagaacctgacagaaagaagaaaaggaaatgaaggagacctggagcagatcgtggagaccctcttcaatgccctgaaccagaacctggtgcagtttgagctgaagccaggagtgcaggtgattgtgtatgtgacccagctgaccctggcccccctggtggacagcagcgctggccacagcagcagcgccatgctgatgctgctgtctgtggtgtttgtgggcctggccgtgttcctgatctacaagttcaagaggaagatcccctggatcaacatctatgcccaggtgcagcacgacaaggagcaggagatgattggctctgtgtcccagagtgaaaatgcccccaagatcaccctgagtgacttcacagagcctgaggagctgctggacaaggagctggacaccagggtgattggaggcatcgccaccatcgccaacagcgagagcaccaaggagatccccaactgcacctctgtgtag

SEQ ID NO: 183545 - DNA, 3669 bp, Artificial Sequence
  derived and/or modified sequence
atggaggccgcccggaccgagcggcccgccggccggcccggcgcccccctagtccggactggactactgctcctttcaacgtgggttctggctggagccgagatcacttgggatgcgacaggcggaccgggcagacccgctgccccagcttcccgacctcccgcactgtccccactgtcaccgcgcgccgtcgcctcgcaatggcctgaggaattagcgtctgcacgtcgcgctgccgtgctggggcgcagggcaggacccgaactgctgccccaacaaggaggtggcagggggggtgaaatgcaggtcgaagctggcggcactagcccagctggcgaacgacgaggaaggggcatcccggcacccgcaaagctcgggggcgccaggcggtcccggagagcccagccgcctattacccaggaaaggggggacgcgtgggccaccgcacccgcagatgggtcccgtggctcccgcccactagccaagggaagcagagaagaggtgaaggctcccagggcggggggctcagccgcagaagatttaaggctgccctccacctcttttgccttgacaggggattcggcgcataaccaagccatggtccattggagtggacacaattcttctgttatactgattcttactaaactatatgattttaatctaggatccgtaacagaatcctcgctgtggcggtcaactgattatggaaccacttatgagaagctaaacgacaaagtgggcctgaaaacggtgctgagttacctgtatgtgaacccaacaaacaaaaggaagatcatgctgctgtccgatccggaaatggagtcttctattttgatttccagcgacgaaggagccacgtaccagaaataccgtctcacattctacattcagtcactcctgttccatcccaaacaggaggattgggtgctggcctactccctggatcagaagttgtactcttcaatggatttcggcagacgctggcagttgatgcacgagcggatcacccctaacaggttttactggtccgtcgcaggtctggataaagaggctgatcttgtacatatggaagtgagaaccactgacggatacgcacactacctgacgtgccgcatccaggaatgcgccgagactacgcgctcagggccattcgcgcgctcgatcgacatctcttcgctcgttgtgcaggatgaatacatcttcatccaggtcacaacatccggtcgcgcgagttactatgtcagttacagacgagaggcttttgcacagatcaaattgcccaagtactcgctgcctaaagacatgcacatcatatccaccgacgaaaaccaggtgttcgccgccgtgcaggaatggaaccagaatgatacatacaatctttacattagcgacacgcgcggaatttattttacactggcaatggaaaatataaagtccagccgcggcctcatggggaatataatcatcgagctgtacgaagtcgctggtatcaaggggatattcctggctaacaagaaggtggacgaccaggtgaaaacatatatcacttacaacaaaggacgcgattggcgcctcctgcaagcgcccgacgtagacctgcggggttcacccgtacactgccttttgccattctgtagcctccacctgcacctgcagctgtccgagaacccgtattcgagtggaaggattagcagtaaggagactgcccctgggctggtggtagctacgggtaatatcggcccagaactgtcatacacagacataggagtgttcatttcctcagacgggggtaacacttggcgccaaatctttgacgaagaatataatgtttggtttctggactggggaggcgctctcgttgccatgaaacacactcctcttcccgttcgacacttgtgggtctcttttgacgagggacatagctgggataaatatggtttcacttctgtgcctctttttgtagatggcgccctagtagaagcaggcatggagacacacattatgacagtttttggccatttctccctacgctccgaatggcagctcgtcaaagtggactacaagtccatcttctccagacactgcacaaaagaggattaccaaacgtggcacttgctcaaccagggggaaccctgcgtcatgggggagcgcaaaatctttaaaaaaaggaaacccggcgcccagtgtgcattgggccgggaccattctggctcagtcgtcagcgagccgtgcgtctgtgcgaactgggatttcgaatgcgactacggctatgagcggcacggggagtctcagtgcgtgcccgccttctggtacaacccagccagccccagcaaggattgcagcttggggcaaagctatctgaatagcaccggatatagacggatcgtctcgaacaattgtaccgacggcctcagggaaaagtataccgccaaggcacagatgtgcccaggtaaggctccccggggcctgcacgtcgtgacgactgacgggcgcctggtagccgagcaggggcataacgccacctttataattctgatggaagagggcgatctacagcggaccaatattcagctggattttggggatgggatcgccgtctcatacgctaatttctctccaattgaggacgggatcaaacacgtctacaagtctgccggcatcttccaggtgactgcctacgcggaaaataatctgggctccgacactgcagtactcttccttcacgtggtgtgtcctgtcgagcatgtacacttacgggtcccttttgtggccataagaaacaaggaggtcaacatttccgctgtggtctggcccagccagttggggacacttacatacttctggtggttcggcaacagcaccaagcccttgattaccctagattcctctatctcctttactttcttggcggaaggcaccgacactatcacagttcaggtcgctgctggaaacgccctgatccaggataccaaggaaatcgcagtgcatgagtattttcagagccagctgttaagtttctcacctaatttggactaccacaacccggatattcctgaatggagaaaagacattgggaatgtcataaaacgcgcgcttgtgaaggtgacatcagtgccggaggaccagatcttgatagccgtgtttcccggactcccaacttccgcagaactgttcatcctgcctcccaagaatcttactgaacgccggaaaggaaatgagggcgacctggagcagattgtggaaaccctgtttaatgccttgaatcagaacctggttcagttcgagctcaagccaggcgtgcaagttatcgtgtatgtcacccagctaactctggcacctctcgtggatagtagcgccgggcattcttcatctgccatgctgatgctcctaagcgtggtgttcgtggggctcgcagtctttctaatctacaagtttaaacgaaagatcccgtggatcaacatttacgcgcaagtccagcatgataaggaacaggaaatgattgggagtgtgagccaaagcgaaaacgccccaaagattacactttccgatttcaccgagcctgaagagctgctggacaaggaacttgacaccagggtgatcggtgggattgccacaatcgccaattcggagagcacaaaagagatccctaattgcacctctgtttag

SEQ ID NO: 183546 - DNA, 3669 bp, Artificial Sequence
  derived and/or modified sequence
atggaggctgctagaactgagcgccctgccggtagaccaggagccccactggtgcgaacgggactgcttctcctgtctacatgggtcctggccggtgctgagataacttgggatgccaccggtggacccggacggccagccgcacccgctagtcgtcctccagctttgtcacctctttcaccaagagccgtggcttcacaatggcctgaggagctggctagcgccaggagagctgccgtcctgggcagaagagcagggccagagcttctacctcagcagggcggaggaaggggcggagagatgcaggtagaggctgggggaaccagccctgcgggagagcggagaggcagaggcattccggctccagctaagctagggggtgcgagaaggagtcggagagcccaaccgccaatcacccaggagagaggagatgcgtgggccaccgcgccagccgacggaagcagagggtctagacctctcgccaagggctccagagaggaggttaaggcgcctagggctggtgggagcgctgcagaggatctgcggctgccgagcacctcatttgccttaacaggcgactcggcacacaatcaagcgatggttcactggagcgggcacaacagtagtgtgatcctcatattgacaaagttatatgatttcaacctgggttcagtgacagaaagtagcctgtggaggtccacagattacgggaccacttacgagaagcttaatgataaggtggggttgaaaacagtactctcatacctgtacgtaaatcccaccaataaaagaaagattatgctgctgagcgatccagagatggagagttcaattctgatctcgagcgacgagggcgctacatatcaaaagtataggcttacgttttacattcaatctctgctatttcatccaaaacaggaagactgggtgctggcatactcactggaccagaaattatacagcagcatggacttcggcagacgctggcagctcatgcatgagagaattactcctaataggttttactggagcgtagctggcctggacaaggaagctgatctggttcatatggaggtcaggactactgatggctacgctcactacctaacctgtaggatccaagagtgcgcggaaactacgcggtccggaccttttgccagatcgatcgacatctcgtcgctggttgttcaggacgagtatatttttatccaagtgaccaccagcggcagggcttcctactatgtgtcttatcgcagagaggcatttgcacaaatcaagctgccaaaatattccctgccgaaagatatgcatatcatttcaacagacgaaaatcaggtgttcgcggcagttcaggagtggaatcaaaacgacacctataatctctacatctctgacacacggggtatttattttacactggccatggaaaatattaaatctagccggggattgatggggaatatcataatcgagttatatgaggtggccggtatcaaaggaatctttctggcaaacaaaaaagtagacgaccaggtgaagacttacataacctacaataaggggagggactggcggcttctgcaagctcccgacgtagatctgaggggttccccggtgcattgccttctgcctttctgttccctgcatctgcatctgcagttgagcgagaacccatacagtagtgggcgaatcagcagcaaggaaaccgcccctggcttggtggttgctacaggcaacatcgggcctgagctgtcctacacagacatcggtgtgttcatcagcagcgacgggggaaatacctggcgacaaattttcgatgaagaatacaatgtttggtttctcgattggggtggcgctctggtggcaatgaagcacacccccctacccgtcagacacttgtgggtgtccttcgacgagggccactcatgggacaaatacgggtttacttccgtccccttatttgtagatggcgctcttgtggaggcaggcatggagactcacattatgactgtcttcgggcatttcagcctgagatccgaatggcagctggttaaggtcgactacaaaagcatcttctccaggcactgtactaaagaggactatcaaacctggcacctgctcaatcagggcgagccttgcgtgatgggcgagagaaagattttcaaaaaacggaaaccaggggctcaatgcgctctgggcagagatcattctggatccgttgtgtctgaaccatgcgtgtgtgccaattgggatttcgagtgcgattatggttatgagcggcatggtgagagtcaatgtgtgccagctttctggtacaaccctgcatccccgagtaaggattgttctctgggacaatcgtatcttaatagcactggttaccgacgcatagtttcaaataattgcactgacggactgcgcgagaagtacacagccaaagcccagatgtgcccagggaaagcgcctcgcggtctccatgtcgtcactacagacggtagattggtcgccgaacaggggcataacgcgacatttattattcttatggaggagggggacctccagcgcacaaatatacaactggattttggcgacggaatcgctgtaagctacgcaaacttctcgcctatagaggacgggattaagcacgtgtataagtctgcaggtatcttccaagtcacagcgtatgccgaaaataatctggggagcgatacggctgtactgtttctacatgtggtgtgtccagtggagcacgtgcacctgcgggtacccttcgtggcaattcgcaacaaggaagtgaacattagtgctgttgtttggccatcacagctgggcacactgacctacttttggtggttcggaaacagcacgaagcccctaattaccttggactcatcaattagttttacgtttctcgcagaagggaccgacaccatcacggttcaggtagccgctggcaacgcactgatacaagacaccaaggagatcgcagtgcacgaatactttcaaagccagctgcttagcttctcaccgaacctcgactaccacaatcctgatatccccgaatggcgaaaggatattggaaacgtgattaagcgagccctggtgaaggtgacgagtgtaccagaggaccagattctgatcgcagtatttcccggactgcccacctcagctgagttgtttatcctgccacccaaaaatttgacagaacggaggaagggtaatgagggagacctggaacagatcgtggagaccctgttcaatgccctcaatcagaacctcgtgcagttcgagctcaaacctggggtccaagtgatagtatacgtcacacagttaacattggctccccttgtggactcttccgcaggtcactcttcatcagccatgctgatgctgctgtctgttgtgttcgtaggacttgccgtgttcctaatctataagttcaagcgcaaaatcccttggatcaacatttacgcccaagttcagcacgataaagagcaagaaatgatagggtcggtttcccaatctgagaacgctccgaagatcacactgtcagacttcactgaaccagaggaactgctcgacaaggagctcgatacaagggtaatcggtggtatcgccactatagctaacagcgaatctaccaaggagatacctaattgcacctcagtgtag

SEQ ID NO: 183547 - DNA, 1522 bp, Artificial Sequence
  derived and/or modified sequence
attctgagtacttgaaacgtgacattccatccactaagccctcctgcttgggctgtttgtcgattctaatgtgttgaaatatatctgcaactctaggtgctgtctccgcccaagtccagaaatgcagttttgatcaaatctcataataatatggggagatgttgaagattaaaacctattgataatccacactgccagaaagcaagatacagaggaaaatttaataacctgaaaaacggttacagaagagtgtggctttattttcagctgtcttttttgtgtacttgtttccaacacaggagtttttggccacttcagcctccgctccgaatggcaattggtgaaagtggactacaaatctatcttcagccggcattgcaccaaggaggactatcagacctggcacctgctcaatcagggagagccttgtgtcatgggagaaaggaaaatattcaagaaacgtaagccaggagctcagtgtgccctgggccgagaccactcaggatcagtggtctcagaaccctgtgtctgtgccaattgggacttcgagtgtgactatgggtatgagagacatggggagagccagtgtgtcccagctttctggtacaatccagcatccccatcaaaggactgcagccttggtcaaagctaccttaacagcactgggtatcggcggattgtgtccaacaactgcacagatgggctaagggagaagtacaccgccaaggcccagatgtgccctggaaaagcccctcggggcctccatgtggtgacgaccgatgggcggctggtggcagagcaggggcacaatgcaactttcatcatcctcatggaggagggtgatctacaaaggacaaacatccagcttgactttggggatgggattgctgtgtcctacgcaaacttcagccccatcgaggacggcatcaagcacgtgtataagagtgcggggatcttccaggtgacagcctatgcagagaacaaccttggctcagacacagctgtcctcttcctgcatgtggtttgatgtcgggtcgaggaaatgttgtcttggggctgggattggtttcccacatgtgtatcagtgatattcgtgggtctaaggacttccatggttcttacttacataccccacaagagtttccaggtcctgtggagcatgttcatctccgagttccatttgttgccataagaaataaggaggtcaacatcagtgcagtcgtgtggcccagtcaactggggacccttacctatttctggtggttcggcaatagcacaaagcctctcatcactttggacagcagcatttccttcacattccttgcagaaggaaccgacaccatcacagtccaggtggctgctgggaatgccctcatccaggacacaaaagagattgcagttcatgaatatttccagtcccagcttttatcattctctcctaatctggattaccacaatcctgacattcctgagtggagaaaagatattggcaatgtcatcaagcgagctctggttaaagtaa

SEQ ID NO: 183548 - DNA, 5757 bp, Artificial Sequence
  derived and/or modified sequence
atcaccctctggacaagagaacgggcgagcgggagctaggagggaagagtggagaggaccggcgaggcgcgccagccggagccacctccttcccggccgccccctccccactccccctacacacacacgctcgctcgctcgccggcgcgcgcacaccccccgcgccggacccgcacctcggcgggcgccacacactcggcagcccgagccgcggtagccgcagcgggatggaggcggcgcgcacggagcgccccgcaggcaggccgggggcgccgcttgtccggacggggctcctactcttgtcgacgtgggtcctggccggcgccgagatcacttgggacgcgacaggcggtcccggacgcccggcggccccggcttcgcggccaccggcgttgtctccactctcgccgcgggcagtggccagccagtggccggaggagctggcgtcggcgcggagagccgccgtgctggggcgccgggccggaccagagctgctgccccagcagggcggcggcagaggcggtgagatgcaggtggaagccggagggacatcaccggcaggcgagcggcggggccggggcatcccagctcctgccaagcttggcggcgcgaggaggagtcgccgggcgcagcccccaatcacccaggaacgcggggacgcctgggccactgctccggccgatggttccagaggaagccgtccccttgctaagggttcccgggaggaggtgaaggcgccgcgggctggggggtcggcggctgaagacctccggctgcccagcacctccttcgcgctgaccggggactcggcccacaaccaagccatggtgcactggtcgggacacaacagcagcgtcatacttatcctgacgaagctgtatgacttcaacctgggcagcgtgactgagagttcactatggaggtcgacagattatggcaccacctatgaaaagctgaatgacaaagtgggtttgaagactgtcctcagttacctctatgtcaatccaaccaacaaaaggaagattatgcttctcagtgatcctgagatggagagcagcatattgatcagctcagacgaaggggcgacctatcagaagtatcggctcaccttctatatccagagcctgctctttcatcccaagcaagaggactgggtgctggcctacagtttggatcaaaagctctacagctccatggactttggaagacggtggcaactcatgcatgaacgcatcacacccaacaggttttattggtcggtggccggattggataaggaggcggacctggtgcacatggaggtgcggaccacggatggatatgctcactacctcacctgcaggatccaggaatgtgccgagacaactagaagtgggccttttgcccgctccattgacatcagttccctggttgtccaggatgaatatatcttcattcaggtaacaactagtggaagagccagctactacgtgtcttatcgaagagaggcctttgctcagataaagctgcctaagtactcgttgccaaaggacatgcacatcatcagtacagacgagaaccaagtatttgctgcggtccaagaatggaaccagaacgacacgtacaacctctacatctcagacacgcgtgggatttacttcactctggccatggagaacatcaagagcagcagaggtctaatggggaacatcattattgaattgtatgaggtagcaggtatcaaagggatatttctggcaaacaagaaggtggacgaccaggtgaagacatacatcacttacaacaaaggcagggattggcgcctgctgcaagctccggatgtggacctgagaggaagcccagtgcactgcctgctgcccttctgttccttacatctgcacctgcaactctctgaaaatccatattcctcaggaagaatctctagcaaggagacagccccaggacttgtggtggctacaggcaacattggcccggagctctcatatactgatattggtgtgttcatctcctccgatgggggcaacacatggagacagatctttgatgaagagtacaatgtctggttcctagactggggtggtgccctcgtggccatgaaacacacacctctgccagtcaggcatttgtgggtgagttttgatgagggccactcttgggacaagtatggtttcacttcggttcctctctttgttgacggggctctggtggaggcaggaatggagacccacatcatgacagtttttggccacttcagcctccgctccgaatggcaattggtgaaagtggactacaaatctatcttcagccggcattgcaccaaggaggactatcagacctggcacctgctcaatcagggagagccttgtgtcatgggagaaaggaaaatattcaagaaacgtaagccaggagctcagtgtgccctgggccgagaccactcaggatcagtggtctcagaaccctgtgtctgtgccaattgggacttcgagtgtgactatgggtatgagagacatggggagagccagtgtgtcccagctttctggtacaatccagcatccccatcaaaggactgcagccttggtcaaagctaccttaacagcactgggtatcggcggattgtgtccaacaactgcacagatgggctaagggagaagtacaccgccaaggcccagatgtgccctggaaaagcccctcggggcctccatgtggtgacgaccgatgggcggctggtggcagagcaggggcacaatgcaactttcatcatcctcatggaggagggtgatctacaaaggacaaacatccagcttgactttggggatgggattgctgtgtcctacgcaaacttcagccccatcgaggacggcatcaagcacgtgtataagagtgcggggatcttccaggtgacagcctatgcagagaacaaccttggctcagacacagctgtcctcttcctgcatgtggtttgtcctgtggagcatgttcatctccgagttccatttgttgccataagaaataaggaggtcaacatcagtgcagtcgtgtggcccagtcaactggggacccttacctatttctggtggttcggcaatagcacaaagcctctcatcactttggacagcagcatttccttcacattccttgcagaaggaaccgacaccatcacagtccaggtggctgctgggaatgccctcatccaggacacaaaagagattgcagttcatgaatatttccagtcccagcttttatcattctctcctaatctggattaccacaatcctgacattcctgagtggagaaaagatattggcaatgtcatcaagcgagctctggttaaagtaaccagtgtcccagaggaccagatcctcattgccgtgtttcctggtctccccacttcagcagagcttttcattcttccacccaagaacctgacagagaggaggaaaggcaatgaaggggacctggaacaaattgtagaaacactgtttaatgctctcaaccaaaatttggtccagtttgagctgaagccgggggtacaagtcattgtgtatgtcacacagctgacgttagctccattggtggactccagtgctgggcacagcagctcagccatgcttatgctattatcagtggtatttgttggcctggctgtgtttttgatctacaagtttaaaaggaaaatcccttggattaacatctatgctcaagtccaacacgacaaggagcaggagatgattgggtcagtgagccaaagtgaaaacgcccccaaaatcacactcagtgactttacggagcctgaggagctgctggacaaagagctggacacgcgggtcataggaggcattgccactattgcaaacagcgaaagcacaaaggagatccccaactgcactagtgtttaataccagcaagccacgtggtcaaccacctttctgactttttatttttgatgattactattactattattatggaaaaattaaaatgtcttttttaccttttgtttaccaagggccccttcataaatagcaggcaaatgcctagctttgggagaaaagggcattcttagctgattgaaatgagacaaagggaataaatggctgtatttgtgctaagagcaaaggatgcatcttcccacagcctcctcgctttactctgccattggtagcttaaagactttctttttccttgtggtctcccttttttcaaaattgaagttgggttggctctttgtgaacctctcatccccacagcagaatcaccaacactctccgcttcccccagcacacacacatacaacacagatcatttcccagttagatccgcaggaagtaggttggtgggggtggatgtagctgcagaaagcatgcacaactttgtgaaagaggccctgccttgtgcatgtccatagtgaggctacagatggcttattgtatataattacaatgtaaatagctttttatttcctaagaaataatttaatgtttagtaaaaaagaaaacagaaaaaagaaagatgcgtgtgttggcttacgcactggccctcagagctgaccaacccgccaggcctgctcaatgcattgggtttggatgctctcctgttgtctgtcacacttaactcttgcatctccttgtccatgccatagctggtttctacttatgtatataaaggggggtggggggaggggcttctctggggcaattgataaaggaaggactctagtgacatcatagaacatggcagtcgtttttgttccaagaatgatatgaaaggtgaagaagaggcccactagaggcttcatactgagacccagatgggggaaaacagcttcctctctaaaaggaaaaacttgatatttatcagtctgagaaaatatttttttctaaagaaggcagtcagtggatcttaaaatgacaatctgtttttaaattggattctatgaaaatgcataatgcttatggtgaattctcaggctattctgagctcagaaaagtcccctgggcactaggtaaagcccagtgaatgtctcttggcatgggaggagttaaagaggttggaagggaagaggcatttgtggaattatgagttcatgcaaaactctccaggccaagtaggggtctagcctttaatgatattagtcaaaggcaattttagcaaagctgtgctatttgcttgtcagatgtacacaacttccttaaagtcaaatgtctgccttcagttcccttaaggtagttcttgcctctggggtgagtggctttcaaagccttttagcttttccagcacctcagccccttcacacatttacacataccaatttttttcaatagggtcacgttaagccatgctgtaagcattgtttttattttcaggcttagcctgagcacacttatttttgaaaatgatataatgtatatatatgggaggaaaggccacattttgtacctgttaatttttgtgggatgttgttcccattcttctttgtgagacagagagaatgtgatatagagaaatctggctggctacagtgtagatcagtattaggaatatttctaaagatcctgcttttttgtttcaagggttaaatggggcagacaattgcaatacttgtactaaacactggaatacaaatgcatgactcatatctatatatacagtatatgtacatatactgttcttggttttattgttccacttgaatatttctactgtaaaaaaaagacagtggttttgaaattgttgaaaataaatgtatttttgtacatc

SEQ ID NO: 183549 - protein, 727 aa, Artificial Sequence
  derived and/or modified sequence
MEDSYKDRTSLMKGAKDIAREVKKQTVKKVNQAVDRAQDEYTQRSYSRFQDEEDDDDYYPAGETYNGEANDDEGSSEATEGHDEDDEIYEGEYQGIPSMNQAKDSIVSVGQPKGDEYKDRRELESERRADEEELAQQYELIIQECGHGRFQWALFFVLGMALMADGVEVFVVGFVLPSAETDLCIPNSGSGWLGSIVYLGMMVGAFFWGGLADKVGRKQSLLICMSVNGFFAFLSSFVQGYGFFLFCRLLSGFGIGGAIPTVFSYFAEVLAREKRGEHLSWLCMFWMIGGIYASAMAWAIIPHYGWSFSMGSAYQFHSWRVFVIVCALPCVSSVVALTFMPESPRFLLEVGKHDEAWMILKLIHDTNMRARGQPEKVFTVNKIKTPKQIDELIEIESDTGTWYRRCFVRIRTELYGIWLTFMRCFNYPVRDNTIKLTIVWFTLSFGYYGLSVWFPDVIKPLQSDEYALLTRNVERDKYANFTINFTMENQIHTGMEYDNGRFIGVKFKSVTFKDSVFKSCTFEDVTSVNTYFKNCTFIDTVFDNTDFEPYKFIDSEFKNCSFFHNKTGCQITFDDDYSAYWIYFVNFLGTLAVLPGNIVSALLMDRIGRLTMLGGSMVLSGISCFFLWFGTSESMMIGMLCLYNGLTISAWNSLDVVTVELYPTDRRATGFGFLNALCKAAAVLGNLIFGSLVSITKSIPILLASTVLVCGGLVGLCLPDTRTQVLM

SEQ ID NO: 183550 - DNA, 2184 bp, Artificial Sequence
  derived and/or modified sequence
atggaggacagctacaaggacagaaccagcctgatgaagggcgccaaggacatcgccagagaggtgaagaagcagaccgtgaagaaggtgaaccaggccgtggacagagcccaggacgagtacacccagagaagctacagcagattccaggacgaggaggacgacgacgactactaccccgccggcgagacctacaacggcgaggccaacgacgacgagggcagcagcgaggccaccgagggccacgacgaggacgacgagatctacgagggcgagtaccagggcatccccagcatgaaccaggccaaggacagcatcgtgagcgtgggccagcccaagggcgacgagtacaaggacagaagagagctggagagcgagagaagagccgacgaggaggagctggcccagcagtacgagctgatcatccaggagtgcggccacggcagattccagtgggccctgttcttcgtgctgggcatggccctgatggccgacggcgtggaggtgttcgtggtgggcttcgtgctgcccagcgccgagaccgacctgtgcatccccaacagcggcagcggctggctgggcagcatcgtgtacctgggcatgatggtgggcgccttcttctggggcggcctggccgacaaggtgggcagaaagcagagcctgctgatctgcatgagcgtgaacggcttcttcgccttcctgagcagcttcgtgcagggctacggcttcttcctgttctgcagactgctgagcggcttcggcatcggcggcgccatccccaccgtgttcagctacttcgccgaggtgctggccagagagaagagaggcgagcacctgagctggctgtgcatgttctggatgatcggcggcatctacgccagcgccatggcctgggccatcatcccccactacggctggagcttcagcatgggcagcgcctaccagttccacagctggagagtgttcgtgatcgtgtgcgccctgccctgcgtgagcagcgtggtggccctgaccttcatgcccgagagccccagattcctgctggaggtgggcaagcacgacgaggcctggatgatcctgaagctgatccacgacaccaacatgagagccagaggccagcccgagaaggtgttcaccgtgaacaagatcaagacccccaagcagatcgacgagctgatcgagatcgagagcgacaccggcacctggtacagaagatgcttcgtgagaatcagaaccgagctgtacggcatctggctgaccttcatgagatgcttcaactaccccgtgagagacaacaccatcaagctgaccatcgtgtggttcaccctgagcttcggctactacggcctgagcgtgtggttccccgacgtgatcaagcccctgcagagcgacgagtacgccctgctgaccagaaacgtggagagagacaagtacgccaacttcaccatcaacttcaccatggagaaccagatccacaccggcatggagtacgacaacggcagattcatcggcgtgaagttcaagagcgtgaccttcaaggacagcgtgttcaagagctgcaccttcgaggacgtgaccagcgtgaacacctacttcaagaactgcaccttcatcgacaccgtgttcgacaacaccgacttcgagccctacaagttcatcgacagcgagttcaagaactgcagcttcttccacaacaagaccggctgccagatcaccttcgacgacgactacagcgcctactggatctacttcgtgaacttcctgggcaccctggccgtgctgcccggcaacatcgtgagcgccctgctgatggacagaatcggcagactgaccatgctgggcggcagcatggtgctgagcggcatcagctgcttcttcctgtggttcggcaccagcgagagcatgatgatcggcatgctgtgcctgtacaacggcctgaccatcagcgcctggaacagcctggacgtggtgaccgtggagctgtaccccaccgacagaagagccaccggcttcggcttcctgaacgccctgtgcaaggccgccgccgtgctgggcaacctgatcttcggcagcctggtgagcatcaccaagagcatccccatcctgctggccagcaccgtgctggtgtgcggcggcctggtgggcctgtgcctgcccgacaccagaacccaggtgctgatgtag

SEQ ID NO: 183551 - DNA, 2184 bp, Artificial Sequence
  derived and/or modified sequence
atggaagactcttacaaggacagaactagcctcatgaaaggggctaaagacattgcaagggaggttaaaaaacagaccgtcaagaaagttaatcaagccgtagacagggcccaggacgaatacacccagcgcagttactccagattccaggatgaggaggacgatgacgactattatccagctggagaaacgtacaacggtgaggcgaacgacgacgagggcagctcagaggccacagagggtcatgacgaggacgacgaaatttatgaaggcgaataccaaggaattcctagcatgaatcaggctaaggattccatcgtgagtgtgggccaaccaaagggcgatgagtacaaagacaggagggagctcgagtccgagagacgggctgatgaggaggagctggctcagcagtatgaactaataatacaagagtgtggacatggacggttccagtgggcccttttcttcgtgctggggatggccctcatggccgacggggtagaggtgtttgtggtgggctttgtcttgccatccgctgagaccgacctgtgtatcccgaacagcggttcgggctggctgggcagcattgtgtacctgggcatgatggtgggtgccttcttctggggaggcttagcagacaaagttgggcgaaagcagtcgctcttgatctgtatgtcggtgaatggcttcttcgcatttttgtcctcgttcgttcagggatatggcttttttctcttctgtcgcctgctgagcggtttcggtatcggtggcgccatccctaccgtgttctcctactttgccgaagttttagcccgagagaaacgcggagagcatttgagctggctgtgtatgttctggatgatagggggaatttacgcttctgccatggcctgggcgatcatcccccactacggatggtccttctccatggggagtgcgtatcagtttcacagttggcgggtattcgtgattgtctgtgccctgccctgcgtgagttctgtcgtggctctcaccttcatgccggaatcaccccggttcctgctagaggtgggaaaacacgatgaagcttggatgatcctcaagctcattcacgatactaatatgcgcgcccgagggcagcccgagaaggtcttcaccgttaataagattaaaacgccaaagcagatcgatgaactcatcgagatagagtcagatactggaacatggtaccgcaggtgcttcgtgcgaatccgtaccgaactgtacggtatctggttgaccttcatgagatgttttaactatccagtcagagacaatacgataaagttaaccatcgtgtggttcacactgtcatttggctactacggattatcagtgtggttccccgatgtgattaaaccgttgcaatctgacgaatatgccttgctgacccgcaatgttgagagagacaagtacgcgaatttcaccatcaattttacaatggagaaccagattcatactggcatggagtatgacaacggtcgatttatcggtgttaagttcaagagcgttactttcaaggatagcgtgttcaagtcttgcacgttcgaggacgtgaccagtgtgaatacctacttcaagaactgcacttttattgatactgtgtttgataacaccgatttcgagccctataagtttattgactcagagtttaagaactgctcattcttccataataaaacaggctgccagattacattcgacgacgactattctgcctactggatttacttcgtgaatttcctaggtacactagctgtcctgcccgggaatattgtgtctgccctcctgatggatcgaataggacgtttgaccatgctgggcgggtccatggtgttgtcaggtataagctgtttctttctgtggtttgggacgtcggaaagtatgatgatcggaatgctgtgcctatataatggcctgaccattagtgcctggaatagtctggacgttgtgactgttgaactgtatccaacagaccgtcgcgcaacaggcttcggattcctgaatgccctttgtaaggctgctgctgtgcttgggaatttgattttcggctcgttagttagcataaccaagtccatccccattcttctcgcaagcaccgtgctggtctgtggggggttagtgggactgtgtctgcccgacacaaggacacaggttctgatgtag

SEQ ID NO: 183552 - DNA, 2184 bp, Artificial Sequence
  derived and/or modified sequence
atggaggacagctacaaggacaggaccagcctgatgaagggggccaaggacatcgcccgggaggtgaagaagcagacagtgaagaaggtgaaccaggccgtggaccgggcccaggatgagtacacccagaggagctacagccgcttccaggatgaagaagatgatgatgactactacccagctggggagacctacaacggggaggccaatgatgatgagggcagcagcgaggccacagagggccatgatgaagatgatgagatctatgaaggagagtaccagggcatccccagcatgaaccaggccaaggacagcatcgtgtctgtgggccagcccaagggagatgagtacaaggaccggcgggagctggagagcgagaggagagcagatgaggaggagctggcccagcagtatgagctgatcatccaggagtgtggccacggccgcttccagtgggccctcttctttgtgctgggcatggccctgatggctgatggagtggaggtgtttgtggtgggctttgtgctgcccagcgctgagacagacctgtgcatccccaacagcggcagcggctggctgggcagcatcgtgtacctgggcatgatggtgggcgccttcttctggggcggcctggccgacaaggtgggcaggaagcagagcctgctgatctgcatgtctgtgaatggcttctttgccttcctgagcagctttgtgcagggctacggcttcttcctgttctgccgcctgctgagcggctttggaattggaggagccatccccaccgtcttctcctactttgctgaggtgctggcccgggagaagagaggagagcacctgtcctggctgtgcatgttctggatgattggaggcatctatgccagcgccatggcctgggccatcatcccccactacggctggagcttctccatgggcagcgcctaccagttccacagctggagggtgtttgtgattgtgtgtgccctgccctgtgtgtcctctgtggtggccctgaccttcatgcctgagagcccccgcttcctgctggaggtgggcaagcatgatgaggcctggatgatcctgaagctgattcatgacaccaacatgagggcccggggccagcctgagaaggtgttcaccgtgaacaagatcaagacccccaagcagattgatgagctgattgaaattgaaagtgacaccggcacctggtaccgccgctgctttgtgcgcatcagaacagagctgtatggcatctggctgaccttcatgcgctgcttcaactaccctgtgcgggacaacaccatcaagctgaccatcgtgtggttcaccctgagctttggctactacggcctgtctgtgtggttcccagatgtgatcaagcccctgcagagtgatgaatatgccctgctgaccagaaatgtggagcgggacaagtatgccaacttcaccatcaacttcaccatggagaaccagatccacacaggcatggagtatgacaatggccgcttcatcggcgtgaagttcaagtctgtgaccttcaaggacagcgtcttcaagagctgcacctttgaagatgtgacctctgtgaacacctacttcaagaactgcaccttcatcgacacagtgtttgacaacacagactttgagccctacaagttcattgattctgagttcaagaactgcagcttcttccacaacaagacaggctgccagatcacctttgatgatgactacagcgcctactggatctactttgtgaacttcctgggcaccctggccgtgctgcccggcaacatcgtgtctgccctgctgatggacagaattggccgcctgaccatgctgggcggctccatggtgctgagcggcatcagctgcttcttcctgtggtttggcaccagcgagagcatgatgattggcatgctgtgcctgtacaacggcctgaccatcagcgcctggaacagcctggatgtggtgacagtggagctgtaccccacagaccggcgggccactggatttggcttcctgaatgccctgtgcaaggctgctgctgtgctgggcaacctgatcttcggcagcctggtgtccatcaccaagagcatccccatcctgctggccagcacagtgctggtgtgtggcggcctggtgggcctgtgcctgcctgacaccaggacccaggtgctgatgtag

SEQ ID NO: 183553 - DNA, 2184 bp, Artificial Sequence
  derived and/or modified sequence
atggaggacagctacaaggaccggaccagcctgatgaagggcgccaaggatattgcacgagaggttaagaagcagaccgtgaaaaaagtcaatcaagccgtcgaccgggcccaggacgaatacacgcagagaagctatagccgcttccaggacgaagaagacgatgatgactactacccagctggtgaaacatacaacggtgaggcaaacgacgatgaagggtcctcagaggcgacagagggccatgatgaggatgacgagatttacgagggggagtaccagggcataccgagcatgaaccaggccaaggacagcatcgtgtctgtaggacagccaaagggcgacgaatataaggataggcgagagttggaatcagagcgcagggctgatgaggaggagcttgctcagcagtacgaattgattatccaggagtgtggtcatggtagattccaatgggccttattctttgtcttaggaatggccctcatggccgacggcgtggaagtctttgttgtgggttttgtgttaccctcggccgagactgacctgtgcataccaaactctgggtctgggtggctcggttccatcgtatacttaggcatgatggtgggcgctttcttttggggagggttagctgataaggttggaagaaagcagtccctgctgatctgcatgagcgtgaacggcttcttcgccttcctgtcctcattcgttcaaggttacggcttcttcttgttttgtaggctgctctcaggttttgggataggcggcgcgattcctacagttttttcctatttcgccgaggttctggccagagaaaagagaggcgaacatctaagttggctctgcatgttttggatgattggggggatctatgcttcagctatggcatgggctataatacctcactacggatggagttttagcatggggtcagcataccagttccactcctggcgcgtattcgtcatagtttgcgcactgccttgcgtgagctcagtggtggcactcacctttatgcctgagtcccccaggttcttgttagaggtgggaaagcatgatgaggcgtggatgatcctcaaactgatccatgacacaaacatgcgggcccgcggacagccagagaaagtgtttactgtgaacaagatcaaaactcctaaacagattgacgagctgattgaaattgaaagcgacacagggacttggtatcgccgctgcttcgtacggatccggacagaactatatggtatttggctgacctttatgcgatgctttaattaccctgtacgcgataacacaattaagctgaccattgtgtggtttacgctatcatttgggtattatgggctgtccgtgtggtttcctgacgtgatcaaacccctgcagagcgacgagtatgccttgctgacccgaaacgtggagagagacaagtatgctaatttcaccataaacttcactatggaaaaccaaattcatacagggatggaatacgacaatggccgcttcatcggagtaaaattcaagtcagtaacattcaaagactccgtgttcaaatcttgcaccttcgaagatgtgactagtgtgaacacatatttcaaaaactgtaccttcatcgacactgttttcgataataccgacttcgaaccttacaagttcattgacagtgagtttaagaattgttccttctttcacaataaaacggggtgccaaattaccttcgacgacgactactctgcatactggatttactttgttaacttcctgggcacgctagctgtcttgccagggaacatagtgagtgctctcctgatggatagaatcggccggctgacgatgctcggtggctctatggtgcttagtggcatttcatgcttcttcctgtggtttggaacttccgaaagtatgatgatcggcatgctttgcctgtataatgggctgaccatctctgcttggaatagtctggatgtcgtgacagtcgaactgtacccaaccgatagaagggctaccggttttggcttccttaacgccctctgcaaggccgccgcagtcctgggtaacttaatattcggctctctagtgtccataacaaagagtattccaattctgctggcatctactgtcctcgtctgtggaggactggttggcctgtgtttgccagatactaggacccaggtgctgatgtag

SEQ ID NO: 183554 - DNA, 2184 bp, Artificial Sequence
  derived and/or modified sequence
atggaggattcttacaaagaccgcacctccctgatgaagggagctaaggacatcgccagagaagttaagaagcagaccgtgaaaaaggttaaccaggccgttgacagggcgcaggatgaatacacccagcgaagctattcacgattccaagacgaagaggacgacgacgactactaccccgctggcgagacgtacaacggagaggctaacgacgacgaggggagttcagaggctacggaaggtcacgacgaggatgacgagatctacgagggcgagtaccagggcatcccttctatgaatcaggctaaagactccatagtttctgtgggccaacccaagggggacgaatacaaagacagacgggagctagagtcagagcggcgtgccgatgaagaggaactggctcaacagtacgaactgataatccaggagtgcggccacggcaggtttcagtgggcactgtttttcgtgttggggatggccctgatggcggatggagtggaagtctttgtggtcggtttcgtcttgccctccgccgagactgacctgtgtattcccaacagcggttctggctggctcgggtctatcgtatacttaggcatgatggtgggcgcattcttctgggggggtctcgcggacaaagttggtaggaagcagtctctgctgatctgcatgtccgtgaacggcttcttcgcattcctttcttcgttcgtgcagggctacggcttttttctgttctgccgcttgttatccggatttggcatcggcggagccatcccaacagtgttctcctactttgctgaggtgctggcacgcgagaagcgaggagagcatctatcatggctgtgcatgttttggatgattggagggatctacgctagtgctatggcatgggccatcatccctcactacggctggtctttctctatgggctcagcatatcagttccacagctggcgtgttttcgtcattgtgtgcgccttgccgtgcgtatcctctgtggtcgctctgacctttatgcctgagtctccacggtttcttttggaggtgggcaagcacgatgaggcatggatgatcctaaagcttatacatgacaccaacatgcgcgcacggggacaacctgagaaggtattcacagtgaacaagattaaaacccccaagcagatagatgaactcatcgaaattgagtcagacaccggcacctggtacagacggtgtttcgtgagaatccgaaccgaactgtatggaatctggctgacctttatgcgttgcttcaactacccggtccgggataataccatcaagctgactatagtatggtttactttaagctttggttactatgggctgtctgtgtggtttcccgatgttataaaacccctgcagtcagacgagtatgccttacttacccgcaatgtggagcgagacaaatacgcgaactttaccataaactttacaatggagaaccagatccacactggcatggagtacgataatggcagatttatcggagtgaagtttaagagtgttactttcaaagattccgtctttaagtcttgtacttttgaagacgtcacttctgtcaacacctattttaaaaactgcaccttcatcgacacagttttcgataataccgactttgaaccttataagttcatcgactctgagtttaagaactgttccttcttccataacaaaactggatgtcaaatcacgttcgacgatgactattctgcatactggatttatttcgtgaattttcttggtaccctcgccgtcctgcctggcaacatcgtcagcgcactgcttatggatcggataggcaggctcacgatgctcggcggtagtatggtgctatctggcatttcatgtttttttctctggtttggtacttcagagagcatgatgattgggatgctatgtctgtataacgggctgacgatatccgcctggaattctctagatgttgttacagtggagctctaccccaccgataggagggcgaccgggttcggcttcttgaatgcgttatgtaaggcagcagccgttttaggtaacctgatctttgggtctctcgtaagtataaccaaatcgataccgattctcctcgcttccactgtgctggtgtgtgggggactggtgggtctgtgtctgcctgacacacggactcaagtgctgatgtag

SEQ ID NO: 183555 - DNA, 11035 bp, Artificial Sequence
  derived and/or modified sequence
gacttgccggagcaccgcgagtggcgcgcgggtcccgcctcccccgcgcgccgtgactccctgcgcaccgctggtactctcgccacgccgccgcccggcactgcagcaccagggggaggaggcaggcggaggagaggaggaggaccgcagcgtgcaagccgggagccactttcccgcccctcctctcgccgctgacacgctcagaggagtcaccactccgcgcgctgcaggcgagagtggcagacggaggcagcccggggaagcgagccggagcggcgcccgcactgaggcggctgcagtgctgacaccactcagggcaagggtgtccgacggctggagcgttctgttttgaacccaaagtggatgatgctgtcagagctgaaccactgaaaggaggctgtgaaaatttcccatcttctcattggccatcagttgagataagatggaagactcttacaaggataggacttcactgatgaagggtgccaaggacattgccagagaggtgaagaaacaaacagtaaagaaggtgaatcaagctgtggaccgagcccaggatgaatacacccagaggtcctacagtcggttccaagatgaagaagatgatgatgactactacccggctggagaaacctataatggtgaggccaacgatgacgaaggctcaagtgaagccactgaggggcatgatgaagatgatgagatctatgagggggagtatcagggcatccccagtatgaaccaagcgaaggacagcatcgtgtcagtggggcagcccaagggcgatgagtacaaggaccggcgggagctggaatcagaaaggagagctgacgaggaagagttagcccagcagtatgagctgataatccaagaatgcggtcatggtcgttttcagtgggcccttttcttcgtcctgggcatggctcttatggcagacggtgtagaggtgtttgtcgttggcttcgtgttacccagtgctgagacagacctctgcatcccaaattcaggatctggatggctaggcagcatagtgtacctcgggatgatggtgggggcgttcttctggggaggactggcagacaaagtgggaaggaaacagtctcttctgatttgcatgtctgtcaacggattctttgccttcctttcttcatttgtccaaggttatggcttctttctcttctgtcgcttactttctggattcgggattggaggagccatacccactgtgttctcgtactttgctgaagtcctggcccgggaaaagcggggcgaacacttgagctggctctgcatgttctggatgatcggtggcatctacgcctctgccatggcctgggccatcatcccgcactacgggtggagcttcagcatgggatcggcctaccagtttcacagttggcgtgtgtttgtcatcgtctgtgcactcccctgtgtctcctccgtggtggccctcacattcatgcctgaaagcccacgattcttgttggaggttggaaaacatgatgaagcttggatgattctgaagttaattcatgacaccaacatgagagcccggggtcagcctgagaaggtcttcacggtaaacaaaataaaaactcctaaacaaatagatgagctgattgaaattgagagtgacacaggaacatggtataggaggtgttttgttcggatccgcaccgagctgtacggaatttggttgacttttatgagatgtttcaactacccagtcagggataatacaataaagcttacaattgtttggttcaccctgtcctttgggtactatggattatccgtttggttccctgatgtcattaaacctctgcagtccgatgaatatgcattgctaaccagaaatgtggagagagataaatatgcaaatttcactattaactttacaatggaaaatcagattcatactggaatggaatacgacaatggcagattcataggggtcaagttcaaatctgtaactttcaaagactctgtttttaagtcctgcacctttgaggatgtaacttcagtgaacacctacttcaagaactgcacatttattgacactgtttttgacaacacagattttgagccatataaattcattgacagtgaatttaaaaactgctcgttttttcacaacaagacgggatgtcagattacctttgatgatgactatagtgcctactggatttattttgtcaactttctggggacattggcagtattgccagggaacattgtgtctgctctgctgatggacagaattgggcgcttaacaatgctaggtggctctatggtgctttcggggatcagctgtttcttcctttggttcggcaccagtgaatccatgatgataggcatgctgtgtctgtacaatggattgaccatctcagcctggaactctcttgacgtggtcactgtggaactgtaccccacagaccggagggcaacaggctttggcttcttaaatgcgctatgcaaggcagcagccgtcctgggaaacttaatatttggctctctggtcagcatcaccaaatcaatccccatcctgctggcttctactgtgctcgtgtgtggaggactcgttgggctgtgcctgcctgacacacgaacccaggttctgatgtaatgggaaaaaaagccatccttcctgcgtttcttcctcctgccctgggtcaattctccttcctgactcaaggcttcagagttttcctatatagaaaggtgatcaagtatcagaacataaacacgtgctgtgacttaaaatttagaagcatatcatcttgcccctttgtgattttgcacaggttgtttgtttgttttgttttgtttgaatgcattgttatctttccaaactgtgatgctactgcctcccgcaaatcagtggaagcatttctaaaatgccctaggcagccaggcttccctggggttctgctcattgaaagtttagaagctaagaagactgggctggtgtaagaaatagatcctgctcctaatttaacattaacaggaaatataagtcggcacattattgcatttgtgctgagaagagggattctttttttttttttttctaacagagtgatatttcctgtttacttagaaaaggacacccagtaattctcactgttatagcagagcctttcaaagaaaaccatgtggcaccaaacagggctgggtggggctctttggggcaagacaattaaggtgaccgctgacaagaaaaataaaagctctgcaattagcagcaaaaatctgagtgtgctgcataagcaagatttctgtcagaaagcccaattaaacctctgaaaagtgtgaggaaaaagaactgtaacagtatctgtgactgtggcatgtggttcagaatgtttgaaaatcagagatccgagagagagcttctgcctccatttaccactcccactccttcagctgcccttggtcttgccagacagcagattcagggaaagaaagctgcttcttaaaaactgtctgcctacctgattctgccacttacccacactgtctctagtctagagattgccagtggatagctaaattgtaaattgcaaattaggaagaaattcacacccagagccatttggaaatacaaaatggtacctctttccagtacctctttgctgtgggactggcccgccaggacccccaccccacctggcccgcagttgacattcagcttcccagctggcatcagcaaagagggtttgtccctctagcttccccagggctggcccactgctcaatgcgctcctggctccctgtaaaatcacagcccgcctgcactcctgagggcccctctcacagacagaccatctccctgtggttgtttgactgctcattttacctctggaatctgcctgggcttggaagaaagaggtcagccaggacattcccacgggcccgctgtcagctacatgaccttctcgcctctcaggctccccttcccccaggctcgtcctttttacacctcttctttgaaatctgaaccttccttgtagacttgcagccaatgaccagaagccaggaataaatcccatatttaaacaatattccttttttaactgcctcgatagaggtttattcttgttacttattataggcattttcaggcaagccatagcttggggcctccaggaagggaaagcttttgtttccactgatcattattttcagagatgtcctaactcccctgaggcccccctgcctccccctccccttcctaatgatccctcgcagagctcagactaagtgaaaagcttctttcattaacataagccattaatcgacttccccttgaagtaattcaggtctgcagaggggggaagactggtgttgggggcagtgggaagagggtggttccctgggggtctgtgatcagggctagaacatcaggaaaacccgaaccaaaaactgcaaaggtggcaggaagaagaaaaatcactgaaggctagacaagatgcatttgaaagataccaaccgcacagggaaagaaacaactttctctcacttctgcctcctatcattttattggagaacaaagacagcagtcaaacaacccaagaaagtaccctgtatgtttttcttcttccacatgtacccattttcccacctatctctccctgatttgtcttctttaaaaagacatttggggacctgagcaggtcttttagttgaatgcagcatgtgcagaaataactgcaaaagccaggagtgcatctccatcaacccatcaaaagaaaaatagaaatgtacatgggcatcgctgtctctagtcctctgtgatagttcactttgctaactagactacctttacttttcaaaatatctctaatgtctgctctggggtctaaatgcataaaacatctcccaagctgcagagcacagttattcagaattttatttgaacactgggttgggtcagcataggataaaccagcaaaaccttacttcatgagacctgccatccgtgtcccctgcagaaggaccgttcttggcctacttgttacctaatccaagcatccttggtggcctaagagggatcttttctcatctcctggacagtctgtggtcacaaaccttcttggtcaccacctctcccaccttttgtgcactcttccctgcctccttgagactgttcatcaccttgattttctaagagagctcaaatcatttccaaagcatgtggtgtggcctgtatagcttgctccagatttagctggagattaagaaacagccaggatattaaacagaaactctcagttgtatcagtgtagcaggccactggcacctaaacacgcaactggcatctcatttcgcctacagtagaaggaaaatgaaaatttgtacaaaaatgaaaacctaggaaatagtccacttgctcctatatttttaccaccttttctaactaaaatttccctgttgctctttggaatcaatccagaatgctcccaagtcccattattatcacagaatcttctcagtagggaaaaacaaacaactgcttcaaactgtgaattctgtatgtaccacattctatcccaggtattgggttttaaggcacccaactcacattcagtcctgctgcctgaatcatctcacaccagagtacagaccttggagacgcgatagatgggtcctagcctgaccttcaccactaagcggtacagggacccagatcttgctgtggagactgtaagtcgttgaacatctctagttctcactttccccgtgcacaaaataaaggattgggactagtctgctctccactctccagcattgtagaagacagtaatgaaaatagcttcatcttatctgccttcttatgctaaactcattttttttttttttaggtggagtttcactctgttgcccaggctggagtgcagtggtgggaactctgctcactgcaacctccgcctcccaggttcaagtgattctcccacctcagcctcccaagtagctgggaccacacgcatgcgccaccacgcccagctaatttttgtatcttttagtagaggtggggtttcaccgtgttggtcaggctggtctcgaactcctgacctcaagtgatcggcccacctcagcctcccaaaatgctgggattacaggcgtgagccactggcggcctcaactcatttttacaagcactaaataggtttagtttataaactgaaaaattaggaaataggcacgcataaaaagagtgtaggaagttgtttgggaagcccgcatggaataggccagaaagcacagtccccatgctgtctgccctgccagcatctcagcatcctgactagtatctctgttcactgcaggtttgacagttaccatcacccagccagaaaagggccccgccttgccagataaacgcgcttaggttagaagactataattgcaatattaccctacagctctcctgactgtttattccattattttcttgaaacatggccttaagtattatacataggcttcagaaacagtttttcagtgattttacctatattggcaaatagacaaatctcaccaaatcagagttcaggttttcaccaaaaactgcttagttgtctttcaagataccttaagagatcaaaggggaggtgggaaaagaaatgtagtgacagaagggagagtccaagataccactgataaggttccagcaaagagattaggacacagcagagactttctaaatgctggggtcatttccaaagcagtccaggggaatactttctgattccctctgccaatcaaaatagatagaatatgatattctccaattttttttctgtttgatgtcaaaatggcctttacctatttcttcagtaatatacctgatctgttcatgcactaaaggctctggagccaggaatgtctgaatttggccttcacctggtatcacagaaagacaactgggatattggtgttaaggggcatatcggctgtatgttaggttttctttaatcctcacatcgtgccaaacttagtctggttactaagcctaaaaacaccagtattgcaacaacttctgaaactctgaagtggactatatgtttctcacagtttttgtttatgctcagcaaagtatgtattttaagtaaagcttctcttgttatctgtaatgtagacaaaaaaaaaaaaaaacctgttagtatattctggatgtattgtgtgtcccttcattgtttcaggtatggcgtaacagttctccgtgtgatgttcttttgctctaaatgttgaccattcctcttgtcgcccgtctctcaccaaccagtcacagagccattgccagggctcccttcagtctttcttaaacaatatctaaatgcagtttagtaatcccaggattttgagttacaagaatacagtttatgggtctgtttcagctcttacttaaggctagcatggttgggcaggggaagagctgagccgagccttcactgatctcttgtcatttcatatgattatccagtaaatacttattgagcacctcccatgtgatacgtattgagacactgctgtgtgcaataattaagcctatggaggacttaaatgagggcaaggaaaacagaatgagagaagacactctcacactgacccccattacatgtgaaccctccgcgcccccccccataaatacaaagtgttatttttccacatttaaaacaaataatagccttcagcaggcagtgcaggaactattcagtcattgagataacctttgatgagaggagaaagctccttgattacctggtttttgttggagagactattaactagtacttggaaaatgagaaaaatgaaaccacacataagttgttcccttaaataatctcagcaggatattgcactaagatattattcaaggaaaagaatcaggagcagagatagccccatctctctagagcattttttttttttttttgggcgggggggcgggggacggagtctcgctctattacttaggccggagtgcagtggtgcaatctcggctcaatgcaacttccgcctcccaggttcaagcaattctcctgcctcagcctcccaggtagctgggattacaggtgcatgccactatgtccggctaattttttgtatttttagtagagacgaggtttcaccattttggccaggctggtctccaactcctaacttcaagtgatctacccaccttggcctcccaaagtgctgggattacaggcatgagccactacacctggcctaaagtcccgctttcttctgaggtgttcttttcatggtgtgaaaccagagacaggagctagggggtctgttccccagcgaatagtgttggggttttctcttcagagctaagtcagcaaagcctgcagctgctgccactcccctggtctgtgcctcccagggtgtttcctttctgattttgaagatttgtgggtgagtcaattatctttgcagacatcctaaagcagcttccctcctcgctaccctcagcagataagccatccagaaaacaggttctgacagccagtagcaggggtattttgggtttcagtttaaaactggtgcgtgttgttgcaagtgtcttgaagttgcaaaggatgtttggggttctagggcctgcaggggggcagagcagaaagagggtagttgtcagtgaccctctaccctcctctgagagccccattgccatttttgcccaccagttctcttcttacctcctcagggcagtgcccactcatttcctttatttcccttttgttttttttcttttcctcctctggtcgacaacctcttaattctagcagtgtacaaaagcaaggccaagctttcctggggcacttgggatgaaaggcccatccatgcctgttgtggaggcacagaggaggagaaggtgaagaacaggaatgggtgcagggggagtgtgaacgcaaggctgctggctttggcacagctccctgtgcagggctggatttccaattgcttttcagtgcctgtgccctgataggatgggcacagctggtatggaatcagagcagcccatctccagagcagaagtctgagagctcagcgtttgactcctgaaagaccaggatgttcctacctgggttcttgagattcattggctagtggaggtagatggtactctccatgtctgcagaagattccccacttggtgctgaaggctaggtgccttccagtcaggtctgaatgctgaaattgctgagattgtccactctctgcctactttattgcattcatgctccccttagatccaagagtgcccaggactaggagcagaaagcagttttcaaccctttgttcagactcagacgggtttcaactcaagcgggtaatctaccccagcagcaggggtgcaaagtccaaaacagctttgtggtgcctggggagtgactaggcagcctgctcacaggggctggagtcatctaaagctagtgatgagctggaatagctttgaaccggttcatccgaactgattgttaaactttcagaacttttgagagtcagttgagaaacatagctattactaaaaaattaaataagattagataaattatagctaaaagcaaaggcaacatatagtcaaagctcatcactttctacttattttactacattttaccattatctgtgcccatgaggtaatgtatgcctattatgtctgtatggtagaaatactgtatacaggtatactactacacacaccttcccaagtgacagtatttttgtagtttgagatcagctatagtggtggtatttataccatggaaagcaacaaagccatggaaagcaacaaagccatgcaaatcagactcctcctaacccctaagacagttgttaaacatttgccagcataccaccatctaaagccctaaagaatgcttggcctcccactgcatagacacaggccacatcacattgagtatcatggatttatgggtcagcattgcccctaagtccaaggaaggggaaagacttagcaagctcaacctcatgtgattcacaaagggtttctttctgcatttgtattgactcagaataggacccagtacagagaatccactgttatctatgggtgtcattccttcagaaagaatgtacagtaaaattggctatttcatgctatgcaaacaaaatgaaactagtttgaagttgcaaagtgtctcccctcttgcgcccacgtagtcatccaagaaggaaactcctttcttgccttgatattcaccaggcctacctagatagaacttgacaaattggcctaacttcatctccgctgctattgttatatatttgctttactgaatctatgtcctatgtcagtcagaagaaaaaagaaatgtcttttttaatatacactttcttagcatccatgcagttatgtatcctcatcctgatccaggaacatattgaacagatcatatgtcttttgttactatctagatacactaaataacatgatagaagagttttctctttcaggtgaacttccattttgaacatatgctaaacgtactatccactgtctattttaatgagatcttggcaatggtcctgtcggttttggtgtttggattgtttggctttgttttccttttttattcttcctgtttttaatgctgtgtaagatctcctgctatgaatgttccagttacccctattgtactgtatatacgtgtgctgcatgtgtaaattctgtttcaggttttggagttttcatcttaagtacagctggtcctgttgtgaactcatctttcctgtatgctcctctgtgtctgatttccaattgccaaaatgtttgaccaaatgtgttttgacaaatatcccgagacagccatgcgtatccttgtgaaagggcatgctccatgtgggatggctcgtgtacagcataaatctatcaaacttggaattgtgtatacatttatatgccagataactaacattcatgtaacagctgcaaagatatttagtgtatatcagattaataaaagagcattttttttttgctccattatattcaaataca

SEQ ID NO: 183556 - protein, 1186 aa, Artificial Sequence
  derived and/or modified sequence
MKKFNFRKVLDGLTASSPGSGSSSGSNSGGGAGSGSVHPAGTAGVLREEIQETLTSEYFQICKTVRHGFPHQPTALAFDPVQKILAIGTRTGAIRILGRPGVDCYCQHESGAAVLQLQFLINEGALVSASSDDTLHLWNLRQKRPAILHSLKFNRERITYCHLPFQSKWLYVGTERGNTHIVNIESFILSGYVIMWNKAIELSTKTHPGPVVHLSDSPRDEGKLLIGYENGTVVFWDLKSKRAELRVYYDEAIHSIDWHHEGKQFMCSHSDGSLTLWNLKSPSRPFQTTIPHGKSQREGRKSESCKPILKVEYKTCKNSEPFIIFSGGLSYDKACRRPSLTIMHGKAITVLEMDHPIVEFLTLCETPYPNEFQEPYAVVVLLEKDLIVVDLTQSNFPIFENPYPMDIHESPVTCTAYFADCPPDLILVLYSIGVKHKKQGYSNKEWPISGGAWNLGAQTYPEIIITGHADGSIKFWDASAITLQMLYKLKTSKVFEKQKVGEGKQTCEIVEEDPFAIQMIYWCPESRIFCVSGVSAYVIIYKFSRHEITTEIVSLEVRLQYDVEDIITPEPETSPPFPDLSAQLPSSRSLSGSTNTVASEGVTKDSIPCLNVKTRPVRMPPGYQAELVIQLVWVDGEPPQQITSLAVSSAYGIVAFGNCNGLAVVDFIQKTVLLSMGTIDLYRSSDLYQRQPRSPRKNKQFIADNFCMRGLSNFYPDLTKRIRTSYQSLTELNDSPVPLELERCKSPTSDHVNGHCTSPTSQSCSSGKRLSSADVSKVNRWGPGRPPFRKAQSAACMEISLPVTTEENRENSYNRSRSSSISSIDKDSKEAITALYFMDSFARKNDSTISPCLFVGTSLGMVLIISLNLPLADEQRFTEPVMVLPSGTFLSLKGAVLTFSCMDRMGGLMQPPYEVWRDPNNIDENEKSWRRKVVMNSSSASQEIGDHQYTIICSEKQAKVFSLPSQTCLYVHNITETSFILQANVVVMCSSACLACFCANGHIMIMSLPSLRPMLDVNYLPLTDMRIARTFCFTNEGQALYLVSPTEIQRLTYSQEMCDNLQDMLGDLFTPIETPEAQNRGFLKGLFGGSGQTFDREELFGEASAGKASRSLAQHIPGPGSIEGMKGAAGGVMGELTRARIALDERGQRLGELEEKTAGMMTSAEAFSKHAHELMLKYKDKKWYQF

SEQ ID NO: 183557 - DNA, 3561 bp, Artificial Sequence
  derived and/or modified sequence
atgaagaagttcaacttcagaaaggtgctggacggcctgaccgccagcagccccggcagcggcagcagcagcggcagcaacagcggcggcggcgccggcagcggcagcgtgcaccccgccggcaccgccggcgtgctgagagaggagatccaggagaccctgaccagcgagtacttccagatctgcaagaccgtgagacacggcttcccccaccagcccaccgccctggccttcgaccccgtgcagaagatcctggccatcggcaccagaaccggcgccatcagaatcctgggcagacccggcgtggactgctactgccagcacgagagcggcgccgccgtgctgcagctgcagttcctgatcaacgagggcgccctggtgagcgccagcagcgacgacaccctgcacctgtggaacctgagacagaagagacccgccatcctgcacagcctgaagttcaacagagagagaatcacctactgccacctgcccttccagagcaagtggctgtacgtgggcaccgagagaggcaacacccacatcgtgaacatcgagagcttcatcctgagcggctacgtgatcatgtggaacaaggccatcgagctgagcaccaagacccaccccggccccgtggtgcacctgagcgacagccccagagacgagggcaagctgctgatcggctacgagaacggcaccgtggtgttctgggacctgaagagcaagagagccgagctgagagtgtactacgacgaggccatccacagcatcgactggcaccacgagggcaagcagttcatgtgcagccacagcgacggcagcctgaccctgtggaacctgaagagccccagcagacccttccagaccaccatcccccacggcaagagccagagagagggcagaaagagcgagagctgcaagcccatcctgaaggtggagtacaagacctgcaagaacagcgagcccttcatcatcttcagcggcggcctgagctacgacaaggcctgcagaagacccagcctgaccatcatgcacggcaaggccatcaccgtgctggagatggaccaccccatcgtggagttcctgaccctgtgcgagaccccctaccccaacgagttccaggagccctacgccgtggtggtgctgctggagaaggacctgatcgtggtggacctgacccagagcaacttccccatcttcgagaacccctaccccatggacatccacgagagccccgtgacctgcaccgcctacttcgccgactgcccccccgacctgatcctggtgctgtacagcatcggcgtgaagcacaagaagcagggctacagcaacaaggagtggcccatcagcggcggcgcctggaacctgggcgcccagacctaccccgagatcatcatcaccggccacgccgacggcagcatcaagttctgggacgccagcgccatcaccctgcagatgctgtacaagctgaagaccagcaaggtgttcgagaagcagaaggtgggcgagggcaagcagacctgcgagatcgtggaggaggaccccttcgccatccagatgatctactggtgccccgagagcagaatcttctgcgtgagcggcgtgagcgcctacgtgatcatctacaagttcagcagacacgagatcaccaccgagatcgtgagcctggaggtgagactgcagtacgacgtggaggacatcatcacccccgagcccgagaccagcccccccttccccgacctgagcgcccagctgcccagcagcagaagcctgagcggcagcaccaacaccgtggccagcgagggcgtgaccaaggacagcatcccctgcctgaacgtgaagaccagacccgtgagaatgccccccggctaccaggccgagctggtgatccagctggtgtgggtggacggcgagcccccccagcagatcaccagcctggccgtgagcagcgcctacggcatcgtggccttcggcaactgcaacggcctggccgtggtggacttcatccagaagaccgtgctgctgagcatgggcaccatcgacctgtacagaagcagcgacctgtaccagagacagcccagaagccccagaaagaacaagcagttcatcgccgacaacttctgcatgagaggcctgagcaacttctaccccgacctgaccaagagaatcagaaccagctaccagagcctgaccgagctgaacgacagccccgtgcccctggagctggagagatgcaagagccccaccagcgaccacgtgaacggccactgcaccagccccaccagccagagctgcagcagcggcaagagactgagcagcgccgacgtgagcaaggtgaacagatggggccccggcagaccccccttcagaaaggcccagagcgccgcctgcatggagatcagcctgcccgtgaccaccgaggagaacagagagaacagctacaacagaagcagaagcagcagcatcagcagcatcgacaaggacagcaaggaggccatcaccgccctgtacttcatggacagcttcgccagaaagaacgacagcaccatcagcccctgcctgttcgtgggcaccagcctgggcatggtgctgatcatcagcctgaacctgcccctggccgacgagcagagattcaccgagcccgtgatggtgctgcccagcggcaccttcctgagcctgaagggcgccgtgctgaccttcagctgcatggacagaatgggcggcctgatgcagcccccctacgaggtgtggagagaccccaacaacatcgacgagaacgagaagagctggagaagaaaggtggtgatgaacagcagcagcgccagccaggagatcggcgaccaccagtacaccatcatctgcagcgagaagcaggccaaggtgttcagcctgcccagccagacctgcctgtacgtgcacaacatcaccgagaccagcttcatcctgcaggccaacgtggtggtgatgtgcagcagcgcctgcctggcctgcttctgcgccaacggccacatcatgatcatgagcctgcccagcctgagacccatgctggacgtgaactacctgcccctgaccgacatgagaatcgccagaaccttctgcttcaccaacgagggccaggccctgtacctggtgagccccaccgagatccagagactgacctacagccaggagatgtgcgacaacctgcaggacatgctgggcgacctgttcacccccatcgagacccccgaggcccagaacagaggcttcctgaagggcctgttcggcggcagcggccagaccttcgacagagaggagctgttcggcgaggccagcgccggcaaggccagcagaagcctggcccagcacatccccggccccggcagcatcgagggcatgaagggcgccgccggcggcgtgatgggcgagctgaccagagccagaatcgccctggacgagagaggccagagactgggcgagctggaggagaagaccgccggcatgatgaccagcgccgaggccttcagcaagcacgcccacgagctgatgctgaagtacaaggacaagaagtggtaccagttctag

SEQ ID NO: 183558 - DNA, 3561 bp, Artificial Sequence
  derived and/or modified sequence
atgaaaaagttcaactttcgtaaagtacttgatggcttaactgcaagttcgcctggcagtggctcatccagtggaagcaactctggaggaggtgctgggagcggcagcgtgcatccggcaggcaccgctggagttctgcgtgaagaaatacaggagacgcttactagcgagtacttccaaatctgtaaaaccgtgaggcacggctttccccatcaaccaaccgcactggcatttgaccccgtccagaaaattctagctatagggacacggacaggcgccatccgaatactcggccgcccaggtgtcgactgctactgtcaacacgaatccggagctgctgtgttgcaactgcaatttctgattaatgagggggccctggtctccgctagcagcgacgacactttacacctgtggaacctgagacagaaaaggcccgcgattcttcattctctcaaatttaacagagagcgcataacatactgccacctgccttttcagtcaaaatggttatacgttggtacagagcgtgggaatactcatatagtgaatatagaaagtttcatcctatccggttacgtgatcatgtggaacaaggctattgagttgtctaccaagactcaccctggacccgtggtacaccttagcgattcccctagggacgagggcaagctgctgataggctacgagaacggcacagttgtgttttgggacctcaagtccaaacgggctgaattgcgggtgtattacgacgaagccatacattctattgactggcatcatgagggtaagcaatttatgtgtagtcactcagatggcagcctgaccctgtggaacctgaaaagcccgagcaggccattccaaaccaccataccccatggaaaatctcagagggagggcagaaagtccgaatcctgtaaacccatcttgaaagtcgaatataagacttgtaagaattctgagccattcattattttctctggaggcttgagttacgacaaggcctgtagacggccaagccttactattatgcacggaaaggcaataacagtactggagatggatcacccaattgtcgagttcctgactctgtgcgagaccccctaccccaatgaatttcaagagccctatgcggtcgtggtgttactggagaaagatctaatagttgtcgatttgacacagagtaactttcccattttcgaaaatccgtatcccatggatatacacgaatccccagtgacatgcactgcctatttcgctgattgtccaccagatcttatactcgtactctacagcatcggggtcaagcataagaagcaaggctactcaaataaggagtggcctatatccgggggcgcatggaacctgggagcccaaacatatccagagataatcataacaggtcacgccgacggctcaatcaagttttgggacgccagtgctattactctgcagatgctctataagttgaagacctccaaagtgttcgaaaagcagaaggtcggcgaagggaaacagacctgcgagattgtggaagaagatcccttcgctatacagatgatctactggtgccctgaatctagaatcttttgcgttagtggggtctctgcatacgtgatcatctataaattctctcgacacgaaatcactactgagattgtatctcttgaggtgagacttcaatatgatgtggaagacatcattactccagagccagaaacgagccctccctttcccgatctgtccgcccagctgccatcttcaaggtccctgtccggttccaccaacacagtcgccagtgagggtgtgaccaaggacagcattccttgcctgaatgtcaaaaccagacccgtgaggatgccccccggctatcaggcagagctggtaattcagctggtgtgggtggatggcgagcctcctcagcaaatcaccagcctcgcagtgtcctctgcttatggcatcgtagctttcgggaattgtaacggcttggccgttgtggattttatccagaagacagtccttctgagcatggggacaatcgacctatataggtcttcagatttgtaccagcggcagccaaggtcacccagaaagaacaaacagtttatcgcagacaatttttgcatgaggggtctgtcgaatttttacccagatctaacaaaaaggatcaggaccagctatcaaagtttgacagaactgaacgactccccagtgcctctggagctggagagatgtaagagccccacctctgatcatgttaacggtcattgtacttctccgacctcccagtcgtgctcctcaggtaagcggctgtctagcgccgatgtgagcaaggttaaccgctggggaccagggcgtcctccttttaggaaggcccagagcgccgcttgtatggagatttccctgccagttaccaccgaggaaaatcgcgagaattcctacaaccggagtagaagctctagcatctcatccattgataaggactccaaggaggctataactgctctttattttatggacagttttgctagaaagaatgattcaaccatctccccatgtctgttcgtgggcacctctctggggatggttctcatcatttctctgaatttgccgctggcagatgagcagagatttaccgaacccgttatggtgctgccttccggcactttcctttctttgaaaggcgctgtgcttacgttctcatgtatggatcgaatgggaggattgatgcagcccccctatgaggtctggagagaccccaacaacattgatgaaaacgaaaaatcatggcgccgtaaggtggtcatgaattcctcatctgccagtcaggagataggcgatcaccagtataccatcatttgttctgaaaagcaggccaaggtgttctcgctgccttcacagacttgcttatacgtacacaacatcaccgagacatcatttatcctgcaggccaacgtcgtagtcatgtgtagtagcgcctgcctggcctgcttttgcgccaatggacatataatgatcatgtctctgccttcgcttcgtcccatgctagacgtcaattatctcccactgacggatatgcggatagcccggaccttttgttttacaaacgagggtcaggccctctatctggtgtctcccacagagattcagcgattaacgtacagtcaggagatgtgcgataacctccaggacatgctgggggacctcttcaccccaatcgaaactcctgaggctcagaaccgtggcttcctgaagggattgtttgggggttcagggcagactttcgacagggaggaactttttggggaggctagcgccggtaaggctagtaggtcactggcccaacatattccagggcctgggtccattgagggcatgaagggagctgccggcggagtaatgggagagttgacgagagcccgtattgcattggacgagagggggcagaggttgggcgaactggaggagaagactgctggaatgatgacaagtgctgaagctttttctaaacacgcgcacgagctgatgttgaagtataaggataaaaagtggtatcagttctag

SEQ ID NO: 183559 - DNA, 3561 bp, Artificial Sequence
  derived and/or modified sequence
atgaagaagttcaacttcaggaaggtgctggatggcctgacagccagcagccctggcagcggcagcagcagcggcagcaacagcggcggcggggccggcagcggctctgtgcaccctgctggaacagctggggtgctgcgggaggagatccaggagaccctgaccagcgagtacttccagatctgcaagacagtgagacatggcttcccccaccagcccacagccctggcctttgatcctgtgcagaagatcctggccatcggcaccaggactggagccatccgcatcctgggccggcctggggtggactgctactgccagcacgagagcggggctgctgtgctgcagctgcagttcctgatcaatgaaggagccctggtgtctgccagcagtgatgacaccctgcacctgtggaacctgcggcagaagaggcctgccatcctgcacagcctgaagttcaaccgggagcgcatcacctactgccacctgcccttccagagcaagtggctgtatgtgggcacagagcggggcaacacccacatcgtgaacatcgagagcttcatcctgagcggctacgtgatcatgtggaacaaggccatcgagctgagcaccaagacccaccctggccctgtggtgcacctgagtgacagccccagagatgagggcaagctgctgattggctatgaaaatggcaccgtggtgttctgggacctgaagagcaagagagctgagctgcgggtgtactatgatgaggccatccacagcattgactggcaccacgagggcaagcagttcatgtgcagccacagtgatggcagcctgaccctgtggaacctgaagagccccagccggcccttccagaccaccatcccccacggcaagagccagcgggagggcaggaagtctgagagctgcaagcccatcctgaaggtggagtacaagacctgcaagaacagcgagcccttcatcatcttcagcggcggcctgtcctatgacaaggcctgccggcggcccagcctgaccatcatgcacggcaaggccatcaccgtgctggagatggaccaccccatcgtggagttcctgaccctgtgtgagaccccctacccaaatgagttccaggagccctatgctgtggtggtgctgctggagaaggacctgattgtggtggacctgacccagagcaacttccccatctttgagaacccctaccccatggacatccacgagagccctgtgacctgcacagcctactttgctgactgccccccagacctgatcctggtgctgtacagcattggagtgaagcacaagaagcagggctacagcaacaaggagtggcccatctctggaggagcctggaacctgggcgcccagacctacccagagatcatcatcaccggccatgctgatggcagcatcaagttctgggatgccagcgccatcaccctgcagatgctgtacaagctgaagaccagcaaggtgtttgagaagcagaaggtgggggagggcaagcagacctgtgaaattgtggaggaggacccctttgccatccagatgatctactggtgcccagagagccgcatcttctgtgtgtctggagtgtctgcctacgtgatcatctacaagttcagcagacatgagatcaccacagagatcgtgtccctggaggtgcggctgcagtatgatgtggaggacatcatcaccccagagcctgagaccagcccccccttcccagacctgagcgcccagctgcccagcagccgcagcctgagcggcagcaccaacacagtggccagcgagggcgtgaccaaggacagcatcccctgcctgaatgtgaagaccaggcctgtgaggatgcctcctggctaccaggccgagctggtgatccagctggtgtgggtggatggagagcccccccagcagatcaccagcctggccgtgtcctctgcctatggaattgtggccttcggcaactgcaatggcctggccgtggtggacttcatccagaagacagtgctgctgtccatgggcaccatcgacctgtaccgcagcagtgacctgtaccagaggcagcccaggagccccaggaagaacaagcagttcatcgctgacaacttctgcatgaggggcctgagcaacttctacccagacctgaccaagaggatccgcaccagctaccagagcctgacagagctgaatgacagccctgtgcccctggagctggagcgctgcaagagccccaccagtgaccacgtgaatggccactgcaccagccccaccagccagagctgcagcagcggcaagaggctgagcagcgcagatgtgtccaaggtgaaccgctggggccctggccggccccccttcaggaaggcccagagcgctgcctgcatggagatcagcctgcctgtgaccacagaagaaaatcgggagaacagctacaacagaagccgcagcagcagcatcagcagcattgacaaggacagcaaggaggccatcacagccctgtacttcatggacagctttgccaggaagaatgacagcaccatcagcccctgcctgtttgtgggcaccagcctgggcatggtgctgatcatcagcctgaacctgcccctggctgatgagcagcgcttcacagagcctgtgatggtgctgcccagcggcaccttcctgagcctgaagggagctgtgctgaccttcagctgcatggacaggatgggcggcctgatgcagcccccctatgaggtgtggagggaccccaacaacattgatgaaaatgagaagtcctggaggaggaaggtggtgatgaacagcagcagcgccagccaggagatcggggaccaccagtacaccatcatctgcagcgagaagcaggccaaggtgttcagcctgcccagccagacctgcctgtatgtgcacaacatcacagagaccagcttcatcctgcaggccaacgtggtggtgatgtgcagcagcgcctgcctggcctgcttctgtgccaacggccacatcatgatcatgagcctgcccagcctgcggcccatgctggatgtgaactacctgcccctgacagacatgagaattgcccggaccttctgcttcaccaatgaaggccaggccctgtacctggtgagccccacagagatccagaggctgacctacagccaggagatgtgtgacaacctgcaggacatgctgggggacctcttcacccccatcgagaccccagaggcccagaacagaggcttcctgaagggcctgtttggaggcagcggccagacctttgaccgggaggagctgtttggagaggccagcgctgggaaggccagccgcagcctggcccagcacatccctggccctggcagcattgagggcatgaagggagctgctggaggagtgatgggagagctgacccgggccagaattgccctggatgagcggggccagaggctgggggagctggaggagaagacagctggcatgatgaccagcgctgaggccttcagcaagcacgcccacgagctgatgctgaagtacaaggacaagaagtggtaccagttctag

SEQ ID NO: 183560 - DNA, 3561 bp, Artificial Sequence
  derived and/or modified sequence
atgaagaagttcaacttccggaaggtgctggacggcctgaccgcctcctcgcccggaagcggttcgagttccggttccaactctggaggaggcgccggttctggcagcgtgcacccagctggcaccgcgggagtgctgcgcgaggagattcaggaaacactgacttccgaatacttccagatctgtaagactgtgaggcatggattcccacatcagcccaccgcccttgccttcgacccagtccagaagattttggctataggcactcgaaccggcgccattcgaattcttggccgccctggcgttgactgctactgccaacacgagagtggggctgccgtgctgcagctgcagttccttatcaacgagggcgccttggtttccgccagctccgacgacactctgcacttgtggaacttacgacagaagagaccagccatcctgcactctcttaagttcaatagggagcggatcacatactgtcatctcccatttcaaagtaagtggctgtacgtcgggacagagcgcgggaacacacacatagtgaatattgagtctttcattctgagcggctacgtaatcatgtggaacaaggctatagagctctcaaccaagacccatcctggtcccgttgtccacttgtcagacagcccacgggacgaaggtaagcttctgatcgggtatgaaaacggcacagtcgtcttctgggacttgaagtccaagcgggcagaactgcgcgtgtactatgatgaagccatccattccattgactggcatcatgaagggaaacaattcatgtgtagccactcagacgggtctctcacactgtggaacttaaagagcccttcccgtccgttccagacaaccattccacatggcaaaagccaaagggaagggagaaagagtgagtcatgcaaaccgatactgaaagtggagtacaaaacttgtaagaacagcgagccctttattatctttagtggagggctgtcatacgataaggcatgccgccggccaagtctcaccatcatgcacggtaaggccattacggtccttgaaatggaccatccgattgttgagttccttacactgtgcgagaccccttatcctaacgagtttcaggaaccatacgcggtcgtcgtccttctggagaaggatttgatcgtagtggatctgacccagtcaaatttccctattttcgagaacccctaccccatggacatccacgagtcgcccgtgacttgcacagcttatttcgctgattgtccacccgatctcatcttggtgctttacagtatcggtgttaagcataaaaaacaagggtattccaataaagaatggcctatatcagggggcgcttggaacctcggtgctcagacctaccccgagataattattactgggcacgccgatggctcaatcaaattctgggatgcatctgcaatcactttgcagatgctatataagctcaagacctctaaagtatttgaaaaacaaaaagtcggggaaggaaagcagacatgcgaaattgttgaggaggaccctttcgccatccaaatgatctactggtgccccgaatcacggattttctgtgtgagcggagttagcgcctacgtaatcatctacaagttctccagacatgaaatcactaccgaaattgtctccctggaagtcagactgcaatacgacgtcgaggacataatcactcccgaacctgaaacctctcctccctttcctgacctctctgctcaacttccttcttctcgcagcttatctggtagcaccaataccgtggcctcagagggtgtgaccaaggattccatcccctgcctcaacgtaaagacacgtcccgtgcgtatgcctcctggataccaagcagaactcgtcattcagctggtttgggtggatggtgagcccccccagcagatcacaagcctcgcggtatccagtgcctatggaatcgtagccttcgggaattgtaacgggctggcagtagtggactttatacagaagactgtgctgttatccatgggcactatcgatctctaccggagttcagacctgtaccaaagacagccaagaagtccgcggaagaataagcagtttattgcagacaacttttgtatgagaggactgtccaatttctatcccgacctcaccaaacgcatccggacgtcttaccaaagcctgactgagctgaacgactcaccggtacccctcgaactggagagatgcaaaagtcctacctccgaccacgtcaacggccactgcacttcacctaccagtcagagttgctcctctggaaaaaggctgtcgagtgccgatgtttcgaaagtaaataggtgggggccagggcgcccacccttcaggaaagctcagtctgcggcctgcatggagatctctctacccgtgactaccgaggagaaccgggagaactcctacaacaggtcccgcagttcatccatctcctcaatagataaggacagtaaagaagccatcactgcgctgtattttatggatagtttcgcacgcaaaaacgatagcacaataagtccttgcctctttgtgggcacatcccttggcatggttctgataatctcactgaacctcccactggctgatgagcaacgcttcaccgagcccgtaatggtgcttcccagtggaactttcctcagtctgaagggcgccgtcctgaccttctcatgcatggaccggatggggggtctcatgcagcccccatacgaggtctggagggatccaaacaatatcgatgagaatgagaagagttggcgcagaaaggttgtgatgaattcttcaagcgcctcacaggaaatcggtgaccatcagtatactatcatttgttctgagaagcaagctaaagtgttttcacttccctcgcagacctgcctttacgtgcataatatcacagagacctcctttatcttgcaggctaatgtggtagtgatgtgctccagcgcctgcctggcgtgcttttgcgccaacgggcatatcatgataatgagcctcccctcactcaggcctatgctggatgtgaactacctgccattgacagacatgcggatcgcacggacattttgcttcacaaacgagggtcaggctctctatctggtgtctccaacagagattcagagacttacttattcacaggagatgtgtgataatctgcaggacatgttgggcgacctatttactccaatcgaaaccccggaggcacaaaataggggattcttgaaggggctgttcggaggtagcggccagacttttgatcgggaggagcttttcggagaagcctccgcagggaaggcctctagaagtcttgcccaacacatccccggccccgggtcgatcgaagggatgaaaggtgccgcaggcggggtgatgggagaactaacacgggctcgcattgccctcgatgagcgcggacaaaggttgggggagctggaggaaaagaccgctggcatgatgacatcagccgaggccttctctaaacacgcacatgaactcatgctgaaatacaaagataaaaagtggtaccagttctag

SEQ ID NO: 183561 - DNA, 3561 bp, Artificial Sequence
  derived and/or modified sequence
atgaaaaaatttaatttccgaaaagtgcttgacggcctcacagcaagttctcctgggagcggttcttcctcaggcagtaatagcgggggaggcgcaggctccggctccgttcaccctgctggcaccgccggagtcctccgggaagagatacaggagacactcacgtccgagtatttccagatctgtaaaaccgtgcgtcacggattccctcaccaacctaccgctctcgctttcgatccggttcagaaaattcttgccattggcactcgcactggagctatacggattttaggcaggcctggcgtggattgctattgtcagcatgagtccggagcagcggttctgcagttgcagtttctgattaacgagggggcattagtcagcgcctcatccgacgacaccctccatctctggaatctgcggcagaagcgtcccgctatcctacattccctaaagttcaaccgagagagaattacttactgtcatcttccattccagtcaaagtggctgtacgttgggactgaacggggtaacactcacattgtcaacatcgaaagctttattctgtctggttacgtcattatgtggaacaaagccatcgagctcagcactaagactcacccaggccctgtggttcacctgtccgattctccgagggatgaaggcaaactgctgatcggctacgagaacgggacggtcgtgttttgggatctgaaatctaaaagggccgagttgcgggtgtattatgacgaggctattcattcaatagactggcaccatgagggtaaacagttcatgtgtagtcacagcgatggttcactcacactctggaacctcaaatcaccctctaggccgtttcagacaaccatacctcacggtaagtctcagcgggaggggagaaaatctgagtcttgtaaacctatcttaaaggtggagtacaagacttgcaaaaattctgagcctttcatcatcttctctggcggactctcctatgacaaagcttgtagacgcccatccctcaccatcatgcatggcaaggcaatcacagttttagagatggatcaccccatcgtggaattccttaccctgtgtgaaaccccatatcctaacgagtttcaggagccctacgccgtcgtagtcttgcttgagaaagatctgatcgtggtagacctcacgcagagcaatttccccattttcgaaaatccgtatccgatggatatccacgagtcccctgtgacctgtacggcatattttgccgattgcccaccggatcttattctagtcttgtactccatcggggtcaagcataagaagcaggggtacagcaataaggaatggccaatcagtggaggtgcctggaatctgggggctcagacttaccccgaaattattattactggccatgccgatggctccataaagttttgggacgccagcgccataactctgcagatgctgtataagctaaagacctccaaagtcttcgagaagcagaaggtgggggagggcaagcagacctgtgagatagtggaagaagacccattcgccatccagatgatctactggtgtccagagtctaggattttctgcgtaagcggagtttctgcttacgttatcatctacaaattttctcggcacgaaatcactacagagattgtgtcactggaagtgaggcttcagtacgatgtcgaggacatcattaccccggagccagaaacatcccctccattccccgatctctcagctcagttaccttcctctcgtagtttgagcggaagcacaaataccgttgcctcagaaggcgtgacaaaagactctatcccatgcttaaatgtgaagacaagacctgtgcgcatgccccctggctaccaggcagagctcgtgatccaactcgtgtgggtagatggagagccccctcagcagattacctctcttgccgttagttctgcctatggcatcgtcgcctttggtaactgcaatggcctggctgtcgtagattttattcagaaaaccgttctgctcagtatgggtaccattgatctgtataggtcgagcgacctctatcaacggcagccaagatctccacggaaaaacaagcagttcattgctgacaacttctgtatgagaggcctcagtaatttctaccctgaccttaccaagcgcatacggacctcctatcagtccctgactgaactgaatgacagtcccgttcccctggaacttgaaaggtgtaagtccccgaccagcgatcatgtgaacgggcactgtacatcccctaccagccaaagctgctcatcaggaaagcgtctgagcagtgccgacgtgagcaaagtaaatcgctggggcccagggaggccaccattccgtaaggcacaaagcgctgcctgcatggagatctctctccccgtgaccacagaggagaatcgcgagaattcctacaatcggtctcggtcgtcatctatctcttctattgacaaggacagcaaggaggccatcaccgccttgtactttatggatagttttgctcggaagaatgactctaccatttcaccatgtctcttcgtgggcacatctctgggaatggttttgattataagccttaatctcccactcgctgatgagcaacgctttaccgaaccagtcatggtgctaccctctggtacttttctcagtctcaagggggctgtcctaaccttctcctgcatggaccgtatgggcggtcttatgcaacctccttatgaggtatggagagaccccaacaatatcgatgagaacgagaagagttggcggaggaaagtggtaatgaacagctctagtgcctctcaggagatcggcgaccaccagtacaccatcatctgtagcgagaaacaggcaaaagtgttctccctaccttcccagacctgcctgtatgttcacaacataacagagacaagctttatcttgcaagccaacgtcgtcgtcatgtgctccagtgcgtgcttagcctgcttctgcgcaaacggacacattatgatcatgtctctcccttccctccgacctatgttggatgtgaattacctccctctgacagacatgcgcattgctcgaaccttctgtttcaccaatgaggggcaggctctttacctggtaagcccgaccgaaattcagcgactgacgtactcccaggagatgtgtgacaatttacaggatatgttaggagacctcttcacgcccatcgagacacccgaggcccagaataggggattccttaaaggcctcttcggcggaagcggccagacctttgatcgtgaagaactgtttggagaggccagcgccggtaaggccagcagatctctggctcaacatattcccggtccaggttcaatcgaagggatgaagggcgctgccggaggtgtcatgggagagttgacccgagcgcgaatcgcccttgacgaacgcggacagcgtctgggggaacttgaggagaagactgcgggtatgatgacttctgcggaggccttttctaaacatgcccacgagttaatgctgaaatataaagacaaaaagtggtaccaattctag

SEQ ID NO: 183562 - DNA, 9496 bp, Artificial Sequence
  derived and/or modified sequence
gacgtccccgggcaccccgcccccttcacctcccagctttgccggggaagaagcagggcggggcaagctaggggccggcccgggggcggggcctgcctcccacggcgggagggcggagcctgctctggagcctgactgctcggttaggacctcggagagcgccaggcgccgcgaccagagggcccagagaagcggccggagcccgcctacctcggccccctcagcttcccgggctggcaggcggctagaggcgtctgaggaagtgtttaaaatgaagaagtttaatttccgaaaagttttggatggcttaactgcctcctcccctggcagtggtagcagcagtggcagtaacagtggtggtggggctggaagtggttccgtacatccggcggggactgcaggggttctcagagaggaaattcaggaaactttgacttcggagtatttccagatttgcaagacagttcggcatggttttcctcatcagcccacagcattagcctttgatccagttcagaaaatcttggctattgggacgagaacaggtgctatacgaatactcgggagacctggtgttgattgctattgccaacatgaaagtggtgcagctgtcctacagctccaatttttgatcaatgagggtgccttggtcagtgcaagttcagatgatacacttcatttgtggaaccttagacaaaaaaggccagccatactccattctcttaaatttaaccgggaacgaattacttactgtcatctacctttccagagtaaatggctttatgttggaacagaaagaggaaatacacatattgtaaatattgaatctttcattctttctggatatgttatcatgtggaacaaggcaattgaactatccactaagactcatccaggtccagttgtacatttaagcgatagcccaagagatgaaggcaaactgctaataggttatgaaaatggtactgtagtattctgggacttgaaatctaaaagagcagaactgagagtttattatgatgaggctattcattcaattgattggcatcatgagggcaaacagttcatgtgcagccattcagatggtagtttgactttatggaacctgaaaagcccaagtcgccctttccagaccacaattccacatggaaaaagtcaaagagaaggaagaaaatctgaatcttgtaaaccaattcttaaagtagaatacaagacctgcaaaaacagcgaaccattcataatattctctggtgggctgtcctatgacaaagcttgtagaagaccaagtttaaccatcatgcatggaaaagcaattacagtacttgaaatggatcatcctattgttgaatttctaactttatgtgaaacgccctatccaaatgaatttcaagaaccctatgctgtcgtggtacttctggagaaagatctcattgtagttgatctgacacaaagcaattttccaatctttgaaaatccatatcccatggacattcatgaatcaccagttacatgcacagcatactttgcagattgtcctccggatttgattctagtactgtattctataggagtcaagcataaaaaacaaggatacagtaataaggagtggccaatcagtggaggagcttggaaccttggagcacaaacatatccagaaattattattactggtcatgcagatggatcaataaaattttgggatgcttctgcaataactctgcagatgctgtacaagctaaaaacttcaaaagtgtttgaaaaacagaaggtaggagaaggaaaacaaacatgtgaaattgtagaggaagacccatttgccattcagatgatttactggtgtccagagagcagaatattctgtgtatcaggagtctctgcatatgtcataatttataaattcagcagacatgaaattacaacagaaatagtgtcattagaggtacgacttcagtatgatgttgaagatattattacccctgaaccagaaacaagtcctccgtttccagatctctcagcccagcttccttcttcaaggagtctttctgggagcactaacactgttgctagtgaaggagtaacaaaggacagtattccatgcctcaatgtgaagacacggccagtgcgaatgcctccaggatatcaagcagaacttgttattcaattggtgtgggtagatggtgaacctccacaacagattactagtcttgctgtaagctcagcatatggaatagttgcatttgggaactgcaatgggttggctgtggtggattttatacagaagacagtactgttaagcatggggaccattgacctatatagatcaagtgacttataccagcgacaaccacggtctcctcgaaaaaacaaacagttcattgcagacaacttttgcatgcgtggcctgtctaacttttatcctgatttaacgaaacggatccgtacttcctatcagagtttaactgaactgaatgacagtccagttcccctagaacttgagcgctgcaagtctcctacctcagaccatgtaaatggacactgcacaagtccaacttctcagagttgcagttctggaaaacgtctttctagtgccgatgtttcaaaagtaaatcgctggggtcctggaagaccaccatttcgaaaggcccagtcagcagcctgcatggagatttctttaccagttacaacagaagaaaaccgagaaaattcctataatcgttctagaagctctagtatctccagtattgacaaagattctaaagaagcaattacagcactatacttcatggactcctttgcacggaaaaatgactctaccatctctccttgtctgttcgttggaaccagtctgggaatggtgttaatcatctccttaaacctaccattagcagatgaacaaaggtttacagagccagtcatggtattgccaagtggtacattcctctcattgaaaggagctgtgctaacattctcctgtatggaccgaatgggtggattaatgcaaccgccatatgaagtttggagggatccaaacaacatagatgaaaatgaaaaatcttggagaaggaaagtggtaatgaactcatcttctgcatcccaagaaataggagatcatcagtatacaataatctgctcagaaaaacaagccaaagtcttctcactgccttctcagacttgcctttatgttcataacatcacggagacatcttttatactgcaagcaaatgtggtggtcatgtgtagcagtgcctgcttggcatgcttttgtgctaacggacatatcatgataatgagcctacctagtcttcgcccaatgttggatgttaattatttgccactgacagacatgaggatagcacgaacattttgttttaccaatgaaggacaggcattatacctcgtctctcctactgaaattcagcggttaacatacagccaagaaatgtgtgataatctacaggacatgctaggagatttgtttactcccatagagacaccagaagctcaaaacagaggctttctcaagggactgtttggtggaagcggacaaacatttgacagagaagagctctttggggaagcttcggcaggaaaagcatcccgcagccttgcgcaacacattcctggaccaggtagtatagaagggatgaaaggcgctgctggaggggtgatgggagagctgacccgtgcacggattgcacttgatgaaagaggacagaggctaggagagctggaagagaaaactgcaggcatgatgaccagtgcagaagcattttccaaacatgcacatgagttaatgctgaaatacaaggataagaaatggtaccaattctgacttctaaagaagctgtgactgctttgagaaaccatattcagggaaaccaaatttattcccagcatcactactcaactgctagaagccagtttcttctacaaaatgttccatttacagtcaatctgaaattttcataaaagagatgtatcagagacactgtgcaacccaaaggctggagccctggttaaaatcccaaaatacggctgaatttgccttttcccatgtggaatggagctatcatcttggcatgtcattcgataaggatttatatttagtaactacggggagtcctcttgatttgaaaattcctgtacaaacaaaagcattaatgcacttaatgaaaaaaaatctttgcatgataaattaacatcttaaggggaaaagaaaaaaaagcatgttgtgatagaagaaaaaaagattcatggtaaactatttctatcaattgggccacactcaacaatttaaaaaatctgcatttgaagatgtcagtgcatttcaaatatatttgccatacccaactgaaacggaaaacaaaacaaaacaagaacccagagttttctcctcatctgtaactttcattgtactagaaccttattgaattcttatggcaagagtctgattaatgttctctctccatgttttacatcattcacagttgtgtcaaaatcaaatattgccagtatagtaaattattcccaacacaatcagtttcatttctatcaccttcagaatgggttgctgtttttagcacaaaccatgcagggttgggtcacctcaaagcattttcttcagcctggcttgtactctataggggagttggtagtaggtgtggggaatctataggaacaatagagttagctatgagaactgacttcacaaaaagggaaatttcacacaccccaatttcagcttctaaagtgatatattttaaaagcttcatttgtatccttgtctgccagttacacagtatattactgttcaaacccagtagggtctgcaatcgaaaggtgctcttgcagcctgacattcacaaaccaaactggtcattctctttagtgtgattcagtaaaatctcagttaatgttttgggaaagggattctgatttatgacatttctgatttacaagggctttccttagaaaatacctttcggtttgatacttaccactggaaattggttcgatacttaccactggaaatctttataaaatatagtgatctgtttgctatcttggtctcagtcatcattatagacaatagaaatacataaagagtttaatgatacaaaatcaatgcttttgtccctaggtcaaataatataagccactagattatgtcaatagatgccaaacacttgtcccttattaaagactcttttaaagctggaataaagaatatccttaacatgatacaaggtatctataactcaccagaaaagcaccagagtcaaaaccaaatagagacacctactaccatttaacatgattctggaagtcaaaagttataggaatgtatatatacacattccaggacccatcctgtaatatgttgtttcgtcaagaaaagttttaattatggttttggcttattgaatttttgtttatcaaggtctcattggatttacatttgtgtttcttaagacttcacaattttcctggatttcaggttattttattagccaaaaaatcgtatttttatttcctttttagtctaattttttgctagaagttgtactttctagcaaatgtttctagtggtacaatgttctcagtaattttgaggagaacaaagatgagtgaaagagttagataatgtacactaggatagcatttctcagagtccttgaatcctcttgttaagaaagcctctctgaatctcccagactcctgtgaacagccttacggtaacagaatctggcttggaaacacagacattacatgactgtataatttatagaattataaaattatatggtaaaaatattaaagaaacttaagagtaggatctagaaaatactagtggccaaattgcaatgtattctttgtaccatctgtttcaaagacttagttttctgattttcagaacaaatactttatcgtttctgtattttaaaaaaaactaaaagagtaaaatattagtttattttagaaataatgaaattcagtccaaagtagcagtacatttgatgagtatttctgaagccttcaataagatttaacttgttttaacttgatctacatcgagatttctcaaaagcagcactattagctgaaagtctttgttgtggggaactgtcctgtgtattgtaggatgttagcaacatccctggcctctgtctactagatgccagtaagaacctcctagtaatgacaatcaaaatgtctccagtcattgccaaaatttctcccagttcacagccactattctacatcatacaaagaggtagattgtgtgaatatgtaatatatgttgttgtataaaactgtacaataagtatacaatgtcttagcaagataaattattatacccaaaattacatgtgtggttcatatgcaataagatacaattttgaagaaagcttataggaatcagtgaaaaataacaactacagaatattttaaggcacacagagaaaatatcaaaaaggacattatagcatttcactgtagaagtgcttaaaaccttggcctcagtgaatagatcaaaagtttataattagcacaccaattggaagtaaacaggtgcttctcaaatgcttgaaaagaaaaggctctttgaagtagttaaaacgtgtctttcaaaattgcttttataagcccttccttaacgtaagggtaacttcatctcacaaactcctggttagtggaatccaaattaatgaggttttactgtatcaaaattatttttataattcaaagagatgatagcaataagaagaatctaatgtggatgtgatttttctctttgaacaattctgttctgttgcactgaccttagcacgcacgcacacacacacacaccatcgccaccactaccatcatcatcttatcctcatctttggaaaataagtactgttgatccatgtaatcctttgcatagtctcatctttactatctttcttctatttcggaacataagaaaaatactcctaataacttggacaatgatacagaaagtgactctgagccttagttaccatcaaaattacattctatctgctaaagcgacatcagaagataaggcttgcaaaccacagtcccaacaagttgaccttgtctccctatgatttccttggaagataaggcctttttagtgttacagtagaaaatgggccttttcatttattcatctgtgagaagctagaggtatttgtttccctgataataacgtgagcaatagtccctaccttgaaatcatccattagtcttggagtttggagggaggaatgattgattcctcatttgttttaatcacctacaaaagcagtactactgactttgcttcttacacttcactgagccccagactttagggccccaatcattgtcaagatcattgtctaactggaactctgaaaggacagtgacagaactgaatgagatgttttccagtgattcagtcacaaagacaattttctcagatcttttgaaagtgattctcaaataaataaatcaaaatccaactcctttccctcaaagtttctagggatctgaaggaaaaggtttactgttggagtccctttttatgtgacccatgtaccagttttaaaggcatcatctatactttatctacatgaagggatcaccatgactttgagagaaaaaagaatcagattaggcctaacattggttgaagaagattaaaatagattcttatattcaagcagaagggaaaaatgaagccaatctagaaaagtaagctaaaaatcctctccttggcttaggatcattgggtcaaactgggagtatatctgtgtgattacaacctgctgctatgagaaaaaagaattgtaacttgaccatgttggctcacacagggcaatgcaaaagaagtcaaaacattcatatcaggtcttggtatctgtgtcaggagaaacgtggtggctttcacagcttcttcacctctgtcctctgtcatgcaactccatttttggctaggtactatttcacatgcacactgtcctgggtgccagaaatacttgtggtgtacttggtttgagcagtacctctagtatgcaccattccagggaacatggttgtcaacataacaagtttagtgtgtgtatttgcagacaacatagccctgaaagcatgaaatgtagaataggtaaggtctgtcttagaaaaggaggaggaagtaccaatttggtgcaagaagatcgtggtgaggaaggacatgggagccacagtgaagtgaaagaggctttaaggaatcagatgcacagatggatgctttgatttacacatttatctagaggagtgattctcaaccttgactgtacataagaatcacctcaggaaatttttaaattcccaattatattaaaatcatttggagtgggaaccagacaccaatatttgcgaaagcctccaaggcggttctaatgtccagccaaagttgattatcactgctttatggccaactaaggaaaccttgtttgtctgccttggctggtgctccagccccagttctgagtggtcagggaaggcaagatgtaagatatagtaatggtatttattctgtatgtctcacagaacaaaagcatttgagaatttctgaccaggcagtgctccatcaactcttaataatcatctttgtgatattctcctatgtgacttgtccatcaattattccaattcaaaggtctaggttttttttcaattgtcttacacatgtgacatcacaagataccagaagtagcacagtaaattcaagagcatataaagctaagtggaaaactaattcttcatatttagacagtggaaattctcaaaacaatcatttgctaaattaggtccaaatttattattcattcttcttctggaggagacatgggtaccaggtacctgttctgctgtaggtatatttcactggacttggtcttagcaaaaaggaagaacaaatcttcctttttgattgttatctcaatcaaaagctcccagggccacttggatttattttcttagtctttggacatgtgtttaaaggaaaagaatacctgtaacttcctatatgacatccagtgccctgaaagggtgcttacaccttcaaaaaaggagagtccagcctatcaaaggcagtaacacataatgagaagaaactcagagttattgcctttcatactgctttccctctgctgttggcccacccttcttgactgcaaagccagaaaataaactagatggtggttttggacaattgtacacaggaacagaatctctaataacctataatttttagtacttaattatgtgatgttttattctaggaaataagaaacagatgacatcattgatgtatctttctttcatcttcagaatttttgcatcttttcagaaaatgacaaattactatttttctgttgcactcagcaattgtgactatacttaacaaaattcttgtagtctgtagagatatcaataaaattgtatatgtttgtacata

SEQ ID NO: 183563 - protein, 1946 aa, Artificial Sequence
  derived and/or modified sequence
MVESCLLTFRAFFWWIALIKMDLSDLGEAAAFLRRSEAELLLLQATALDGKKKCWIPDGENAYIEAEVKGSEDDGTVIVETADGESLSIKEDKIQQMNPPEFEMIEDMAMLTHLNEASVLHTLKRRYGQWMIYTYSGLFCVTINPYKWLPVYQKEVMAAYKGKRRSEAPPHIFAVANNAFQDMLHNRENQSILFTGESGAGKTVNSKHIIQYFATIAAMIESRKKQGALEDQIMQANTILEAFGNAKTLRNDNSSRFGKFIRMHFGARGMLSSVDIDIYLLEKSRVIFQQAGERNYHIFYQILSGQKELHDLLLVSANPSDFHFCSCGAVTVESLDDAEELLATEQAMDILGFLPDEKYGCYKLTGAIMHFGNMKFKQKPREEQLEADGTENADKAAFLMGINSSELVKCLIHPRIKVGNEYVTRGQTIEQVTCAVGALSKSMYERMFKWLVARINRALDAKLSRQFFIGILDITGFEILEYNSLEQLCINFTNEKLQQFFNWHMFVLEQEEYKKESIEWVSIGFGLDLQACIDLIEKPMGILSILEEECMFPKATDLTFKTKLFDNHFGKSVHLQKPKPDKKKFEAHFELVHYAGVVPYNISGWLEKNKDLLNETVVAVFQKSSNRLLASLFENYMSTDSAIPFGEKKRKKGASFQTVASLHKENLNKLMTNLKSTAPHFVRCINPNVNKIPGILDPYLVLQQLRCNGVLEGTRICREGFPNRLQYADFKQRYCILNPRTFPKSKFVSSRKAAEELLGSLEIDHTQYRFGITKVFFKAGFLGQLEAIRDERLSKVFTLFQARAQGKLMRIKFQKILEERDALILIQWNIRAFMAVKNWPWMRLFFKIKPLVKSSEVGEEVAGLKEECAQLQKALEKSEFQREELKAKQVSLTQEKNDLILQLQAEQETLANVEEQCEWLIKSKIQLEARVKELSERVEEEEEINSELTARGRKLEDECFELKKEIDDLETMLVKSEKEKRTTEHKVKNLTEEVEFLNEDISKLNRAAKVVQEAHQQTLDDLHMEEEKLSSLSKANLKLEQQVDELEGALEQERKARMNCERELHKLEGNLKLNRESMENLESSQRHLAEELRKKELELSQMNSKVENEKGLVAQLQKTVKELQTQIKDLKEKLEAERTTRAKMERERADLTQDLADLNERLEEVGGSSLAQLEITKKQETKFQKLHRDMEEATLHFETTSASLKKRHADSLAELEGQVENLQQVKQKLEKDKSDLQLEVDDLLTRVEQMTRAKANAEKLCTLYEERLHEATAKLDKVTQLANDLAAQKTKLWSESGEFLRRLEEKEALINQLSREKSNFTRQIEDLRGQLEKETKSQSALAHALQKAQRDCDLLREQYEEEQEVKAELHRTLSKVNAEMVQWRMKYENNVIQRTEDLEDAKKELAIRLQEAAEAMGVANARNASLERARHQLQLELGDALSDLGKVRSAAARLDQKQLQSGKALADWKQKHEESQALLDASQKEVQALSTELLKLKNTYEESIVGQETLRRENKNLQEEISNLTNQVREGTKNLTEMEKVKKLIEEEKTEVQVTLEETEGALERNESKILHFQLELLEAKAELERKLSEKDEEIENFRRKQQCTIDSLQSSLDSEAKSRIEVTRLKKKMEEDLNEMELQLSCANRQVSEATKSLGQLQIQIKDLQMQLDDSTQLNSDLKEQVAVAERRNSLLQSELEDLRSLQEQTERGRRLSEEELLEATERINLFYTQNTSLLSQKKKLEADVARMQKEAEEVVQECQNAEEKAKKAAIEAANLSEELKKKQDTIAHLERTRENMEQTITDLQKRLAEAEQMALMGSRKQIQKLESRVRELEGELEGEIRRSAEAQRGARRLERCIKELTYQAEEDKKNLSRMQTQMDKLQLKVQNYKQQVEVAETQANQYLSKYKKQQHELNEVKERAEVAESQVNKLKIKAREFGKKVQEE

SEQ ID NO: 183564 - DNA, 5841 bp, Artificial Sequence
  derived and/or modified sequence
atggtcgaatcctgcctgcttacttttcgcgccttcttttggtggattgcactgatcaagatggatctgtctgatcttggtgaggcggccgcctttctacgcagatccgaggcagaactgcttttgctgcaagctacagcactggacggtaaaaaaaagtgctggatccccgacggcgagaacgcctatatagaggcagaggtcaaggggagcgaagacgacggtactgtgattgtcgaaactgctgacggggaatccctgtctatcaaggaggacaaaatccagcagatgaaccccccagagtttgaaatgatcgaagacatggctatgctcacccacctcaatgaagcttccgtcctgcacacgttgaagagacgatatgggcagtggatgatctacacctactccgggttgttctgtgtcactataaacccttataagtggctccctgtgtaccagaaggaggttatggctgcttacaaggggaagcggaggagcgaggcccctccccacatattcgccgtggccaataacgccttccaggatatgctgcacaatcgagaaaaccagtccatcttgttcaccggggaatccggcgctggaaaaacggtcaattctaagcacattattcagtatttcgcaaccatcgctgctatgatcgagtcaaggaaaaagcagggagctctggaggaccagatcatgcaggccaatactatattggaagctttcggtaatgcaaagaccctccgcaatgacaatagttcgcgttttggaaagttcatccggatgcattttggtgctcgaggaatgctaagtagtgttgacatcgatatctacctcctcgaaaagtccagagttattttccaacaggcgggagaaaggaactatcacatcttctaccagattttgagcggccagaaggaacttcacgatctgctgctcgtgtcggcaaacccaagcgatttccacttctgtagctgcggagcagtgaccgtcgaatcactggatgatgctgaggagttattggccacagagcaggctatggacattcttggctttcttccggatgaaaagtacgggtgttacaagctgacaggggccattatgcatttcgggaatatgaagttcaagcaaaaaccgcgggaggagcagctcgaagctgatggcactgagaatgcagataaggctgctttcctgatgggtattaactcaagtgagctcgtaaagtgtttaattcacccgaggattaaggtgggtaatgagtacgttacacgcggtcagacaattgaacaggtgacctgcgctgtgggtgccctctcaaagagtatgtacgagcgaatgttcaaatggcttgtggcgaggatcaaccgcgcactggacgccaagctgtctaggcagttcttcatcggcatcctcgacatcactgggttcgagattcttgagtacaactcgttggaacagctctgtatcaattttactaacgaaaagctccaacagttctttaactggcacatgtttgtattagagcaggaggagtacaaaaaggagtcgatcgagtgggtcagcataggtttcggtcttgatcttcaggcgtgtatcgacttaatcgagaaacccatggggatcctgagcattctcgaggaggaatgcatgttcccaaaggccacagatttgacattcaagactaagcttttcgataatcactttgggaagagcgtgcacctgcaaaaacccaagccagacaagaaaaagtttgaggcccattttgagctcgtgcattacgccggagtcgtcccctacaatatatcaggatggcttgaaaagaataaggatttgctgaatgagaccgtggtggcagttttccagaaatcgtcgaacagactcctggcgtccttattcgagaattacatgagtacagattctgccatcccctttggagaaaaaaagcggaaaaaaggagccagctttcagacagttgccagtctgcacaaggagaatctaaataagctgatgactaacctaaagtctaccgcaccccattttgtcaggtgtatcaaccccaacgtgaataagattccgggcatcctagacccatacctggtcctgcaacagctgcgatgtaacggggtgctagaaggcacacgtatctgtcgcgaaggctttccgaatcggctgcaatacgccgatttcaaacaacgctactgcattctcaatcccaggacctttcccaagagtaagtttgtgtcctctcgcaaagcagcagaggagctgctcgggtcccttgagatagatcacacacaatacaggttcggcatcacgaaggttttcttcaaggccggattcttaggacagctggaagccatccgcgacgagagattatcaaaggtgtttacacttttccaggcccgagcccagggcaaattgatgaggattaagttccagaaaatcctggaggaaagggacgctctgattcttatccaatggaacatccgtgccttcatggctgtcaagaactggccctggatgcgcctattcttcaagatcaagcctctcgttaagtcatcagaggtaggggaagaggtggctgggcttaaagaagagtgcgctcagctgcagaaagccctggagaaatccgagttccagagggaagaactgaaggcaaagcaggtcagcttgactcaggagaagaacgacctgatcctgcaacttcaggctgagcaagagactcttgctaatgtggaggagcagtgtgaatggttgattaagagcaaaatccagctggaggctagagtcaaagaactgtctgagcgggtggaagaggaggaggagataaactctgagttgacagctcgcggccgaaaactcgaggacgagtgtttcgagctgaaaaaagaaatagatgatctggaaacaatgctggtgaagtcagagaaggagaaaagaacaaccgagcacaaggttaagaatctgaccgaggaagtcgagttccttaatgaagatatcagtaagctgaacagagcagctaaagttgtccaggaggcacaccaacagacactagacgacctgcacatggaggaagagaaacttagctctctgtccaaagcaaatcttaagttggagcagcaggtggacgagctagagggagcactcgagcaggaacggaaggcgaggatgaactgtgaacgcgaacttcataaattagaaggaaacctgaagctgaatagagaaagcatggagaatttggaatcttcacagcgccacctggcagaagaactgcgcaaaaaggaattggagctgtcgcagatgaactctaaagtggagaacgaaaaaggactcgtggcccagttgcagaaaaccgtgaaggaactccaaactcagatcaaagacttgaaagagaaactggaagctgagcgcaccacaagggcgaagatggaaagagaaagagctgatttgacccaggatttggcagacttgaacgagcggctggaagaggtaggtggctcttcccttgcgcagctcgaaattactaagaaacaagaaaccaaattccagaagctgcaccgcgatatggaggaagctactcttcactttgaaaccacaagcgccagtttgaagaagaggcatgcagattccctggccgagctggagggtcaagtagaaaatttacagcaagttaagcagaagctagagaaggataagtcagatttacagctcgaggtcgacgatctcctgactcgggtcgagcagatgacacgcgctaaagctaacgccgagaaactttgcaccctgtacgaggaacgtttacacgaagcaactgccaaactggataaagttacgcagctcgccaacgacttggcagcgcagaagaccaagctctggagtgagagtggcgagttcctgagaagactggaggaaaaggaggcactcataaaccaattgtctagagaaaaatccaacttcactcgtcaaatcgaagacctcaggggccagctggagaaagaaacaaagagccaatctgctctcgctcatgccttgcagaaggcacagcgtgactgtgacctcctccgcgaacagtatgaagaggaacaggaggtgaaggctgaactacatcggacactcagtaaggtcaacgccgagatggtacagtggcgcatgaaatacgagaataacgttatacaaagaaccgaagatctggaggatgctaaaaaggaactggccatacggctgcaggaagccgccgaggccatgggagttgccaatgctagaaacgcaagcttggagagggccaggcaccagttacagttggagctgggtgacgccctgtctgacctgggaaaggtccgctccgccgccgctagactggatcagaagcagctgcagtcaggtaaggccctggctgattggaaacagaaacacgaagaaagtcaggctctcctggacgcgtcccaaaaggaggtacaggccctgtccacagagcttcttaaactaaagaatacatatgaagaatcaattgtcggtcaggagaccctgcgccgcgagaataagaacttgcaggaagagatttcgaatctcactaatcaggtgagagagggaacgaaaaacttaaccgaaatggaaaaggtgaaaaagttgattgaggaagagaagactgaagtccaagtaactctcgaggagactgagggggccttggaacggaacgaatccaaaatcctgcacttccaattagaactcctggaggcaaaggccgagctagagcgtaagcttagcgagaaggacgaagagatcgaaaacttccggcggaagcagcagtgcaccatcgacagcctgcagtcgagcctggattccgaggccaaaagtaggatcgaggtgactcgtctaaagaaaaagatggaggaagatttaaatgagatggagctgcagctaagctgcgcaaaccgccaggtcagcgaggcgacaaaaagcttggggcagctccagattcaaattaaggatctccagatgcagctggacgacagtacccaactgaatagcgacctgaaggagcaggtcgctgtggctgagcggaggaattccctccttcagtccgaactggaagatcttcgttctctacaggagcagacagaacggggacggcgtttaagtgaggaggaactactggaggctactgagcgcattaacctgttttacacacagaacactagcttactgtcccagaagaagaagttggaagcagatgtagcaaggatgcagaaagaggctgaagaagtcgtgcaggagtgccaaaatgctgaggagaaagctaaaaaggccgctattgaggctgctaacctctccgaagagttaaagaaaaaacaggacacgatagctcatctcgagaggacccgtgagaacatggaacaaactatcacagacctacagaaacggctcgccgaagctgagcagatggccctaatgggctctaggaaacagattcagaaactggaaagcagagtccgcgaattggagggggagctggagggggagattaggagatcagcggaagcgcagcggggtgcacgaagactcgaacggtgcatcaaggaacttacctatcaggccgaggaggataagaaaaacctgagtcgcatgcagacccagatggacaagcttcagctgaaagtgcagaattataagcagcaggttgaggtggccgaaacccaagctaatcagtacctcagtaaatacaaaaaacaacagcacgagttgaacgaggtgaaggagagggccgaggtagctgaatcacaggttaataagctgaagataaaagcaagagagtttggcaagaaggtacaggaggaatag

SEQ ID NO: 183565 - DNA, 5841 bp, Artificial Sequence
  derived and/or modified sequence
atggtggagagctgcctgctgaccttccgggccttcttctggtggatcgccctgatcaagatggacctgagtgacctgggggaggccgccgccttcctgcggcgctctgaggccgagctgctgctgctgcaggccacagccctggatggcaagaagaagtgctggatcccagatggagaaaatgcctacatcgaggccgaggtgaagggctctgaagatgatggcaccgtcatcgtggagacagcagatggagagagcctgagcatcaaggaggacaagatccagcagatgaaccccccagagtttgagatgattgaggacatggccatgctgacccacctgaatgaggcctctgtgctgcacaccctgaagagaagatatggccagtggatgatctacacctacagcggcctcttctgtgtgaccatcaacccctacaagtggctgcctgtgtaccagaaggaggtgatggccgcctacaagggcaagagaagaagtgaggccccaccccacatctttgctgtggccaacaatgccttccaggacatgctgcacaaccgggagaaccagagcatcctcttcaccggggagagcggggccggcaagacagtgaacagcaagcacatcatccagtactttgccaccatcgccgccatgattgagagcaggaagaagcagggcgccctggaggaccagatcatgcaggccaacaccatcctggaggcctttggaaatgccaagaccctgagaaatgacaacagcagcagatttgggaagttcatccgcatgcactttggagcccggggcatgctgagctctgtggacatcgacatctacctgctggagaagagcagggtcatcttccagcaggccggggagaggaactaccacatcttctaccagatcctgagcggccagaaggagctgcatgacctgctgctggtgtctgccaaccccagcgacttccacttctgcagctgtggggctgtgacagtggagagcctggatgatgctgaggagctgctggccacagagcaggccatggacatcctgggcttcctgcctgatgagaagtatggctgctacaagctgactggagccatcatgcactttggaaacatgaagttcaagcagaagccccgggaggagcagctggaggctgatggaacagaaaatgctgacaaggccgccttcctgatgggcatcaacagcagcgagctggtgaagtgcctgatccacccccgcatcaaggtgggcaatgaatatgtgacccggggccagaccatcgagcaggtgacctgtgctgtgggcgccctgagcaagtccatgtatgaaagaatgttcaagtggctggtggcccgcatcaacagagccctggatgccaagctgagccggcagttcttcatcggcatcctggacatcactggatttgagatcctggagtacaacagcctggagcagctgtgcatcaacttcaccaatgagaagctgcagcagttcttcaactggcacatgtttgtgctggagcaggaggagtacaagaaggagagcattgagtgggtgtccattggatttggcctggacctgcaggcctgcatcgacctgattgagaagcccatgggcatcctgagcatcctggaggaggagtgcatgttccccaaggccacagacctgaccttcaagaccaagctgtttgacaaccactttgggaagtctgtgcacctgcagaagcccaagccagacaagaagaagtttgaggcccactttgagctggtgcactacgccggcgtggtgccctacaacatcagcggctggctggagaagaacaaggacctgctgaatgagaccgtggtggccgtgttccagaagagcagcaaccggctgctggccagcctgtttgagaactacatgagcacagattctgccatcccctttggagagaagaagaggaagaagggggccagcttccagacagtggccagcctgcacaaggagaacctgaacaagctgatgaccaacctgaagagcacagccccccactttgtgcgctgcatcaaccccaacgtgaacaagatccctggcatcctggacccctacctggtgctgcagcagctgcgctgcaatggagtgctggagggcacccgcatctgccgggagggcttccccaaccggctgcagtatgctgacttcaagcagcgctactgcatcctgaaccccaggaccttccccaagagcaagtttgtgagcagcaggaaggctgctgaggagctgctgggcagcctggagattgaccacacccagtaccgcttcggcatcaccaaggtgttcttcaaggccggcttcctgggccagctggaggccatcagagatgagcggctgagcaaggtgttcaccctcttccaggcccgggcccagggcaagctgatgaggatcaagttccagaagatcctggaggagagagatgccctgatcctgatccagtggaacatccgggccttcatggctgtgaagaactggccctggatgaggctcttcttcaagatcaagcccctggtgaagagcagcgaggtgggggaggaggtggccggcctgaaggaggagtgtgcccagctgcagaaggccctggagaagtctgagttccagcgggaggagctgaaggccaagcaggtgtccctgacccaggagaagaatgacctgatcctgcagctgcaggccgagcaggagaccctggccaacgtggaggagcagtgtgagtggctgatcaagagcaagatccagctggaggcccgggtgaaggagctgtctgagcgggtggaggaggaggaggagatcaacagcgagctgacagcccggggcaggaagctggaggatgagtgctttgagctgaagaaggagattgatgacctggagaccatgctggtgaagtctgagaaggagaagaggaccacagagcacaaggtgaagaacctgacagaggaggtggagttcctgaatgaagacatcagcaagctgaacagagctgccaaggtggtgcaggaggcccaccagcagaccctggatgacctgcacatggaggaggagaagctgagcagcctgagcaaggccaacctgaagctggagcagcaggtggatgagctggagggcgccctggagcaggagaggaaggccaggatgaactgtgagcgggagctgcacaagctggagggcaacctgaagctgaaccgggagagcatggagaacctggagagcagccagaggcacctggccgaggagctgaggaagaaggagctggagctgagccagatgaacagcaaggtggagaatgagaagggcctggtggcccagctgcagaagacagtgaaggagctgcagacccagatcaaggacctgaaggagaagctggaggccgagaggaccacccgggccaagatggagcgggagagagctgacctgacccaggacctggccgacctgaatgaaaggctggaggaggtgggcggcagcagcctggcccagctggagatcaccaagaagcaggagaccaagttccagaagctgcaccgggacatggaggaggccaccctgcactttgagaccaccagcgccagcctgaagaagagacatgctgacagcctggccgagctggagggccaggtggagaacctgcagcaggtgaagcagaagctggagaaggacaagagtgacctgcagctggaggtggatgacctgctgaccagggtggagcagatgacccgggccaaggccaatgctgagaagctgtgcaccctgtatgaggagcggctgcacgaggccacagccaagctggacaaggtgacccagctggccaatgacctggccgcccagaagaccaagctgtggagcgagagcggggagttcctgcggcggctggaggagaaggaggccctgatcaaccagctgagccgggagaagagcaacttcacccggcagatcgaggacctgcggggccagctggagaaggagaccaagagccagagcgccctggcccacgccctgcagaaggcccagagggactgtgacctgctgcgggagcagtatgaggaggagcaggaggtgaaggccgagctgcacaggaccctgagcaaggtgaatgctgagatggtgcagtggaggatgaagtatgagaacaacgtcatccagaggacagaggacctggaggatgccaagaaggagctggccatccggctgcaggaggccgctgaggccatgggcgtggccaatgccagaaatgccagcctggagcgggcccggcaccagctgcagctggagctgggagatgccctgagtgacctgggcaaggtgcgctctgctgctgcccggctggaccagaagcagctgcagagcggcaaggccctggccgactggaagcagaagcatgaggagagccaggccctgctggatgccagccagaaggaggtgcaggccctgagcacagagctgctgaagctgaagaacacctatgaggagagcatcgtgggccaggagaccctgcggcgggagaacaagaacctgcaggaggagatcagcaacctgaccaaccaggtgcgggagggcaccaagaacctgacagagatggagaaggtgaagaagctgattgaggaggagaagacagaggtgcaggtgaccctggaggagacagaaggagccctggagagaaatgaaagcaagatcctgcacttccagctggagctgctggaggccaaggccgagctggagaggaagctgtctgagaaggatgaggagattgagaacttccggaggaagcagcagtgcaccatcgacagcctgcagagcagcctggacagcgaggccaagagcagaattgaggtgacccggctgaagaagaagatggaggaggacctgaatgagatggagctgcagctgagctgtgccaaccggcaggtgtctgaggccaccaagagcctgggccagctgcagatccagatcaaggacctgcagatgcagctggatgacagcacccagctgaacagcgacctgaaggagcaggtggccgtggccgagaggaggaacagcctgctgcagagcgagctggaggacctgcggagcctgcaggagcagacagagcggggccgccgcctgtctgaggaggagctgctggaggccacagagcgcatcaacctcttctacacccagaacaccagcctgctgagccagaagaagaagctggaggctgatgtggccaggatgcagaaggaggccgaggaggtggtgcaggagtgccagaatgctgaggagaaggccaagaaggccgccatcgaggccgccaacctgtctgaggagctgaagaagaagcaggacaccatcgcccacctggagaggacccgggagaacatggagcagaccatcacagacctgcagaagaggctggccgaggccgagcagatggccctgatgggcagcaggaagcagatccagaagctggagagccgggtgcgggagctggagggggagctggagggggagatcagaagatctgctgaggcccagagaggagcccggcggctggagcgctgcatcaaggagctgacctaccaggccgaggaggacaagaagaacctgagcaggatgcagacccagatggacaagctgcagctgaaggtgcagaactacaagcagcaggtggaggtggccgagacccaggccaaccagtacctgagcaagtacaagaagcagcagcacgagctgaatgaggtgaaggagcgggcagaggtggccgagagccaggtgaacaagctgaagatcaaggcccgggagtttgggaagaaggtgcaggaggagtag

SEQ ID NO: 183566 - DNA, 7074 bp, Artificial Sequence
  derived and/or modified sequence
catttctacttcatatgatcattttaattgtatttacctcatcttaccaaaaagatcatggttgaatcttgcctactcacgtttagggcctttttttggtggattgctttaataaagatggatctgtcagaccttggagaagccgcagccttcctcagaagaagtgaagctgagctgcttctactacaggccacagccttggatgggaagaagaaatgctggattcctgatggtgagaatgcttatatcgaggctgaggtaaaagggagtgaagatgatggaacagtaattgttgagacagcagatggagagagtctgagcataaaggaggacaaaatccagcagatgaatcctccagagtttgaaatgattgaagacatggcaatgctgactcacctcaatgaggcatccgtgctgcataccctgaagcggcgctatggccagtggatgatctatacatattcaggtctcttctgtgtgaccataaacccttacaaatggcttcccgtgtatcagaaagaagtcatggccgcctacaaagggaagaggcgatcagaggctccccctcacatctttgctgttgccaataacgcctttcaggacatgcttcacaatcgagaaaatcagtctatactcttcacaggagaatctggtgctggaaagactgtgaacagcaaacatattatccagtattttgccaccatagcagccatgattgaatccaggaaaaagcagggggcgttagaagatcaaatcatgcaagcgaatactatcttggaagcatttggaaatgctaaaaccctgagaaatgacaactcctctcgttttggcaaattcatcaggatgcactttggtgccagaggcatgctgtcatctgtggacattgatatctatttgcttgaaaagtccagggtgattttccagcaggctggagagaggaactaccacatattctatcaaattctatctggacaaaaagagcttcatgacctgctcctggtatctgcaaatccctcagacttccacttttgctcctgtggagcagttactgtggagagcttggatgatgctgaagaattgctggccacagaacaagccatggacatcttgggctttcttcctgatgagaagtatggatgctataaactcactggagccatcatgcactttggaaatatgaaatttaaacagaaacctagagaagagcaactggaagcagatggcacagaaaatgctgacaaagctgctttcctcatgggcattaactcctctgagttggtaaagtgcttgatccatcctagaatcaaagttggtaacgaatatgttaccagaggtcaaactatagaacaggtaacctgtgctgtcggtgccctgtccaagtcaatgtatgaaaggatgtttaagtggctagtggcacggatcaacagggccctggatgccaagctgtcaaggcagttcttcattggcattcttgacatcactggttttgaaatccttgagtataatagccttgagcaactttgcattaattttaccaatgaaaaattacaacaattcttcaattggcacatgtttgttctggagcaagaggaatataagaaagaaagcattgaatgggtgtctattggctttggtctggatttgcaagcttgcatagatctcattgagaagccaatgggcatcctttccatccttgaagaagagtgtatgtttcctaaggctacagacctgactttcaagaccaaactctttgacaaccattttggaaagtcggttcatctccagaagcccaagcctgataagaagaaatttgaagctcattttgaacttgtccattatgcaggagtggtaccttataatatcagtggttggctggaaaagaacaaagacctccttaatgaaacagtggtagctgtatttcagaagtcttccaacagactcctggcgagcctttttgaaaattacatgagtactgacagtgctataccatttggggagaagaaacgaaagaaaggagcttcattccaaacggttgcatctctgcataaagaaaacctgaataaattgatgactaatctgaaatcaacagcacctcattttgtgagatgcataaatcccaatgtgaacaaaataccaggtatactggacccttacttggttctacagcagttgcgctgtaatggtgtcttggaagggactaggatatgccgtgaaggttttccaaaccgactgcagtatgctgattttaaacaaaggtactgcattctgaatccaaggacctttccaaagagcaagtttgtgagcagcagaaaagcagctgaagaattacttggctccttggagatagaccatacccagtaccgatttggaatcactaaggtgttttttaaagctgggtttctgggccaactggaagcaataagagatgagagactatctaaagtcttcacattgttccaagccagagcacagggcaaactgatgcgaatcaaattccagaagattctggaagaaagggatgcacttattttgatccaatggaacataagagctttcatggctgtgaagaactggccctggatgaggctcttcttcaagatcaagcctcttgttaaatcttcagaagtaggagaagaagtagctggactgaaggaagagtgtgcacaattacagaaagccttggagaaatcagagtttcagagggaggaactgaaagcaaagcaagtatccctcactcaggaaaaaaatgacctgattcttcagcttcaggctgagcaagagacactggcaaatgttgaagagcagtgcgagtggctgattaaatccaagatccagctggaggccagagtaaaggagctgtcggagagggtggaggaagaagaggagataaattctgagctgactgccagggggcggaaactcgaagatgaatgttttgagttgaagaaagaaatcgatgacctggaaacaatgttggtgaagtcagagaaggagaagcgtactacagagcacaaggtcaagaacttgactgaggaagtagagtttctaaatgaggatatcagcaaacttaacagagcagccaaggttgtgcaggaggcccatcagcagaccctggatgacctgcacatggaggaggagaagctcagcagcctgagcaaagcaaatctgaagctggaacagcaagttgatgagcttgagggtgcccttgagcaggagagaaaagcgagaatgaactgtgaaagggaactgcacaaactggagggcaatttaaagctgaatcgggaaagtatggagaacctggaaagcagccagcgacacctggcagaagagctgaggaaaaaagaattagaattgagtcagatgaattcaaaagtggagaatgagaaaggcctggtagctcagcttcagaagacggttaaagagcttcagactcaaataaaggatttgaaagagaaactagaagctgaaaggaccactcgagccaagatggaaagggagagagctgacctcacccaagacctggctgacttgaatgagaggctggaggaggtaggaggatccagtttggctcagctggaaataactaagaaacaggaaaccaaattccagaagctgcaccgagacatggaagaggccactctgcactttgagacaacttctgcatctttgaagaagagacatgcagacagcctggctgagctcgagggccaggtagaaaatctacagcaggtcaagcagaaactggaaaaagacaagagtgacttgcagctagaagtagatgacctcctgacccgtgttgagcagatgacaagagctaaggcaaatgctgagaaactctgtactctatatgaagagcgcttgcatgaagcaactgcaaagctagataaggtgactcagttggcaaatgacctggcagcacaaaagacaaagctgtggagtgagagtggcgagttcctacggaggcttgaagagaaggaggctctgataaaccaactttccagggaaaagagcaacttcactcggcagattgaagacctgagagggcagctggaaaaggagaccaaatcccagagtgccctggcccatgccctgcagaaggctcagcgtgactgtgaccttctacgagagcagtatgaggaagaacaagaggtcaaggctgagctgcaccggaccttatccaaagtcaatgctgaaatggtgcaatggagaatgaagtatgaaaacaatgtcatccagagaacagaagacttggaggatgccaagaaggaactggcaattagattgcaggaggcagccgaagccatgggggtggccaatgccagaaatgcctccttggagagagccaggcaccagctgcagctggagctcggggacgccctgtctgacctcgggaaggtccgctctgcagcagccaggctggaccagaagcagctgcagtctggcaaggcccttgccgactggaagcagaagcacgaggagtcccaggcgttgctggatgcctctcagaaggaagttcaggctctcagtacagagctcctcaagctcaagaacacctatgaggagagcatcgtgggccaggagacactcaggagggagaacaagaacctccaagaagagatttctaatctgacaaaccaggttagagaagggaccaagaacttaactgaaatggaaaaggtcaagaaactaattgaagaagagaagacagaagtccaggtgacactggaagaaacagagggagccctggaacgtaatgaaagcaagattcttcatttccagcttgaactcttggaagctaaagcagaacttgaaagaaagctttcagagaaagatgaagaaatagaaaattttaggaggaagcagcagtgtaccattgactccctgcagtctagtctggattctgaagctaagagcagaattgaggttacccggctgaagaagaagatggaagaggacctcaatgagatggaactccagcttagctgtgccaaccggcaggtgtcagaagcaaccaaatccctgggccagcttcagattcaaatcaaggaccttcaaatgcagctggatgacagcacacaactgaacagtgatctgaaggagcaggtggctgtggctgagcggcgcaactctcttcttcagtctgaactagaggatctaaggtccctgcaagagcagacagagcgtggccgcaggctgtcagaagaagagctcctggaagcaacagaaagaatcaatcttttctatacccagaacacaagcctcctcagccagaagaagaaactggaggctgatgttgcccggatgcagaaagaagctgaagaggtggtgcaggagtgtcaaaatgcagaagagaaggccaagaaggcagccattgaggcagcaaacttgtcagaagaactgaagaagaagcaagacaccattgcccacttggaaaggacaagagaaaatatggagcagacaattacagacttacagaaaaggctggctgaagctgaacagatggccctgatggggagtagaaagcaaatccagaaactagaatccagggttcgtgaactggaaggtgaactggagggtgaaatccgtcgcagtgcagaggcccagaggggagcccgcagacttgagcgatgcatcaaagagctgacctatcaggcagaggaagacaagaagaatctgagcaggatgcaaactcagatggataaacttcagctaaaagtgcaaaattacaagcagcaagtcgaggtggcggaaacacaagccaatcaatacctttccaagtataagaaacagcaacatgagttgaatgaagtgaaggaaagggcagaggtggcagaatctcaagtcaataaactcaaaattaaagcaagagagtttgggaaaaaggttcaagaagaatagcatcccctgctttgaaaggacaacagctggagaagtacaaggaaggtgctgtttcatggccaaaaacttaggttgcatggaaacatttttaaaaacatgtttaaattgcttttcacaccatataaacaaggcaattagaaaaataattaaagggaatatcattgcttccacagttaatggggattttttgatcctcaaatgcaagtaaactaccttctaatgcttcacatgacagattaaataaatggaagaaccttttcaattctgatgtttaaaaaatgaataaatacttgatcctttgtccatatttcctcttaatgggtaggactcatagaagatgtccttagaccagtcacgcttcatggggactagggcatgttggtgaatggtttttactaaagttaggcaactttggcttgattcacccctaaatctatgaatgtatattgtgagccagcagtggtagaatggaagtcataagatctcctcagcattgtgatataaatatagctatagttaggcaatttgaacatgtaggcaaaactctcctaatcaacacacatgtaggctatatgctggtacatgctttaaacatggaggtaaccccacacgagacattcagtgacaggtaatatgctggatttgtgcagtaccgatttggctcagctggaggaacatgtcccggaattcctctctctcatggttctggattggagtaggtcataaagaaatttgcattaatttgatcagcagctattttatactcataaggtcagtgtacagacccaagcatggtgacagcttgaaaatatgactccaggccaaaaaggggagctagaagagaccagagacagctccctggacccagagctcttccagctcctgccagcctcctccttcagctttgcaaagtactggccaggtgtgtgtgcagctccatggcaaccagcatcagcttttcctgagatcacacacagcattgcagtggaggccgtgagacagacatgggttctgtttgttcttatggacttcccttcatccttgctgcattcacagtcgacctacagtgacttcaggcccagaaccagatgcagagggaacagcctggcctagacttctccaccagcacccacaattgtgtaaggctgaagctctataataaatctttattctgtc

SEQ ID NO: 183567 - DNA, 5841 bp, Artificial Sequence
  derived and/or modified sequence
atggtggagagctgcctgctgaccttccgggccttcttctggtggattgcactcattaagatggacctgtccgatctcggggaggcggccgccttcttgcgacgatcagaagcagagttactgctcctgcaagctaccgctctggacgggaagaagaagtgctggatcccagacggagagaatgcgtacattgaggccgaggtgaaaggcagcgaagacgatggcactgtgattgtcgaaacagcggacggagaatcgctttcaattaaggaagataaaattcagcagatgaacccaccagagttcgagatgatcgaagacatggcaatgctcacccacctcaacgaggccagcgtactgcacactctaaagaggcggtacggccagtggatgatctacacatatagtggacttttctgcgttaccatcaatccttataaatggctgcctgtgtaccagaaagaggtcatggccgcctataagggtaagagaaggagcgaagctccaccacacatcttcgccgtggccaacaatgcttttcaagacatgctccacaaccgtgagaatcagtcaattctcttcacaggagaatccggtgcaggcaagactgttaactcaaagcacattatacaatattttgcaaccatcgcagcgatgatcgagtccaggaaaaaacagggagccctcgaggatcaaattatgcaagcaaataccattctggaagcatttggcaatgccaaaacactgcgcaatgacaactcatcgagatttggcaagtttatcagaatgcacttcggagccagaggcatgctttctagcgtggacatcgacatctacctcttggaaaaaagtcgggtgatattccagcaagccggtgaaaggaattaccatatcttttaccagatccttagcggccaaaaggaactccacgatctcttactcgtttccgctaatcctagcgacttccacttctgttcttgtggcgcagtaactgtcgagagcctcgacgacgcagaagagctgctggcaacagagcaggctatggatattctggggttcctaccagatgaaaaatacggctgttataagttaactggtgccataatgcacttcggaaatatgaagtttaaacaaaaaccccgggaggaacaacttgaggccgacggcaccgaaaatgccgacaaagcagcatttttgatgggcatcaattccagcgaactggtgaagtgtttaatccaccctcgcattaaagtgggtaatgaatatgtcactaggggacagacaatagaacaggtcacatgcgcagtgggcgccctgtccaagtctatgtacgagcgcatgtttaagtggctggtggcacggattaaccgtgccctggacgctaagttaagtcgtcaattcttcatcggaatcttggacattactggattcgagatcctggagtacaattcactggagcagctgtgcatcaactttaccaatgagaagctgcagcaattctttaactggcatatgtttgtgctggagcaggaagagtacaaaaaagaatccatcgagtgggtgtcaatcggatttggactcgacctccaggcatgcatagacctgattgagaaacctatgggtatcctgagcatactcgaggaggaatgcatgttccccaaggccacagacctcacatttaaaactaaactgtttgataaccattttggtaagtccgtgcatctgcagaagccgaaaccggataagaaaaaattcgaggctcacttcgaactcgtgcactatgcaggagtagtgccatacaatattagcggatggctcgagaagaataaggacttgttaaacgagactgtggtggccgtctttcaaaaaagcagtaatcgcctgttggcaagtctgttcgagaactacatgagcactgattcggccatcccattcggcgaaaaaaagaggaagaaaggcgcctcttttcagactgtcgccagtcttcataaggaaaacctcaataaactgatgaccaatctcaaatctaccgcccctcattttgtgcggtgcatcaacccaaacgtgaataagatccctgggattcttgatccgtacctggttcttcagcagctcagatgtaacggagttctggaaggaacacgtatatgcagagaaggattcccgaatcgactccaatacgcagatttcaagcagcgctactgtatcctaaatccccggacattccccaagtctaaattcgttagctccagaaaggccgcagaagaactccttgggagcctggaaatagaccacactcagtatcggttcggaatcactaaggtatttttcaaagcaggcttcttaggtcagctcgaggcgattagggatgagcggctgtccaaggtattcacgcttttccaggctcgagctcagggtaagctaatgcgtatcaaattccaaaaaatactcgaagagcgggatgccttgatcctgatccagtggaacatccgagcatttatggcagtgaaaaactggccctggatgcggcttttctttaagatcaagcccctagtcaagtctagtgaggttggtgaagaggtcgctggtctcaaagaggagtgtgcgcagctccagaaagcgctcgagaaaagcgagttccagcgcgaggaattgaaggcgaagcaggtttccctgactcaggaaaagaacgacctgatccttcagctgcaggcagaacaggagaccttagcaaatgtggaggagcagtgtgagtggttgatcaaaagcaaaattcagttggaagctagggtaaaggaactcagcgaacgtgtcgaagaggaggaggagatcaacagcgagctgaccgctagaggcaggaagctggaagacgaatgcttcgagctgaagaaagagatagatgatcttgagacgatgctcgtcaagtccgaaaaagagaagcgcacaaccgagcataaagtgaaaaacctcaccgaggaagtagaattcctgaatgaggatatctccaagctcaatcgggccgctaaagttgtgcaggaggctcatcagcaaactttagacgatctgcacatggaagaggaaaagctgtcctccttatctaaggcgaacctgaaactcgaacagcaagtcgacgaactcgaaggggccctagaacaggagagaaaggcccgaatgaattgtgagagggaactccataagctggaggggaatctgaagctcaacagggaatctatggagaatttggaaagctcccagcggcacttggccgaagaactgaggaaaaaagagctggaactgtcccagatgaactccaaagttgaaaacgagaagggcctggttgcacagctgcagaaaacagtcaaggagctgcagacccagattaaggatctgaaggaaaagctggaggccgaacgcactacaagggccaagatggaaagggagcgagctgatctgacacaggacctggccgatctcaacgaacgcctcgaggaggtgggaggcagttccctggctcaactagagatcacgaagaagcaggagacaaagtttcagaagctgcacagggatatggaggaagctaccctccatttcgaaacaaccagcgcctctttaaagaaacgccacgccgacagcctagcagaactcgagggccaggtggaaaaccttcaacaggtgaagcagaagctggagaaagacaagtctgatttgcagctggaggtggatgatctactcactcgggtggaacaaatgacacgggccaaggcaaacgctgagaaactttgtacattatatgaagagcgcctccatgaagccactgccaagctcgacaaggtcacccaactcgcaaacgacctggcggcacagaaaacgaaattatggtcagaatccggggagtttctcaggaggctggaggaaaaggaggctctcattaaccaattgtcgagggaaaagtctaattttacaagacagattgaggatcttcgaggtcagctggaaaaagagactaagtctcagtccgctcttgcgcatgctcttcaaaaggcacaaagagactgtgatctcttgagggagcagtacgaggaggagcaggaggtcaaagcagagctgcataggactctgtctaaggtcaacgcggaaatggtgcaatggaggatgaaatacgagaacaatgttattcagcggacagaagatctcgaagatgcgaagaaagagctggctatcaggctccaagaagccgctgaggccatgggggtggcaaacgctcgaaacgccagtctggaacgtgctcgccatcagctccagctcgaacttggcgacgccctttccgacctggggaaagttcggagcgccgccgctcgactggaccagaagcaactgcaatctggtaaagctctcgctgactggaagcaaaaacacgaggagagtcaggccttactggacgcctcacagaaggaagtgcaggctctgtctacggagctactgaaattgaagaacacttatgaagaatctatcgttggacaggagactctgcgtagggagaacaagaacctgcaagaagagatcagtaacctgaccaatcaagtcagagaaggcacgaaaaacctcaccgagatggaaaaggttaaaaaactgatcgaggaggaaaagaccgaagtgcaggtaactctggaggagaccgaaggtgcactcgagcgtaatgaatcgaagattttgcacttccagctggagctgctagaggctaaagccgaattggagaggaagttaagcgaaaaggatgaggaaattgagaattttaggagaaaacagcagtgtacaatagacagcttacagtccagcttagattccgaagctaagagcagaatagaagtcactagacttaagaagaaaatggaagaggacttgaacgaaatggagctgcagctcagctgtgctaaccggcaggtgtctgaagcaacgaaatccttaggtcagttgcaaatacagatcaaagatctgcagatgcagctggatgacagcactcagcttaattctgacctgaaggaacaggttgctgtggcagaaaggcgtaactcactcctacaaagcgaactggaagatctaagaagccttcaggagcagacagagcggggccggcgattgtcggaagaggagttgttggaggccaccgagagaatcaacttgttctatacccaaaacaccagcctcctgtcccagaaaaaaaagctcgaggccgacgtggccaggatgcagaaagaagccgaagaagtggtgcaagagtgccagaatgctgaagagaaggcaaagaaagcagccatcgaagcagctaatctgagcgaggagctcaagaagaaacaggacacaattgcccatctggaaagaactcgcgaaaatatggagcagacaattactgacctccaaaagagattggcagaagccgagcagatggctctcatggggtccaggaaacaaatacagaaacttgagagccgggttagggagttggagggagagctggagggagaaattcggaggtccgcggaggctcagagaggagcccgcaggttagagcggtgcataaaagagctcacatatcaggccgaagaagataaaaaaaatctctccagaatgcaaacccagatggacaaattacagctgaaggtccagaactacaagcagcaggtcgaggtggctgagactcaggctaatcagtacttgtcgaaatacaagaaacaacaacacgagctgaatgaagttaaggaaagagctgaggtggcggagtcccaggttaacaagctgaagataaaggcgagggagtttggcaagaaagtccaggaagagtag

SEQ ID NO: 183568 - DNA, 5841 bp, Artificial Sequence
  derived and/or modified sequence
atggttgagagttgcctcttgaccttccgggcattcttttggtggatcgcgcttattaagatggacctaagcgatctgggcgaagcggcagctttcctgcgtaggagcgaagctgagttgctgttgctgcaggccaccgctctggatggaaagaaaaagtgctggatccccgatggtgagaatgcgtacatcgaagccgaggtgaaaggctccgaggatgacggaacagtgatcgttgagaccgccgatggagaaagcctgtcgattaaggaggacaagatacagcagatgaaccctcccgagttcgagatgattgaagacatggcaatgctcactcacctgaacgaagcttcggtgctacacacccttaagcgaagatacggtcagtggatgatttatacttactccggtctcttctgtgtgactataaacccttacaaatggctcccggtctaccagaaggaagtgatggcggcttataagggaaagaggcggtctgaggctcccccacacatcttcgccgtggcaaataatgcatttcaggacatgttgcataatcgcgagaaccagagcattttgtttacaggagagtcaggagccggtaaaaccgttaattcaaagcacatcattcagtacttcgcaacaattgctgccatgatcgagtcccgaaaaaagcagggggctctggaggatcagattatgcaagcgaacaccattctggaggcctttggaaacgcgaagacacttcggaatgacaattcatcgagattcggcaagttcattcgcatgcactttggtgctagaggaatgctttcttcagtcgacatcgatatctatctgcttgagaagagcagagtcatattccaacaagctggcgaacgaaattatcacattttctatcagatcctgtcaggacagaaagagcttcatgacctgctcttggtgtccgcgaatccgtctgactttcacttctgcagctgcggcgcagtcactgtggagagcctcgacgatgccgaggaactcctggccactgagcaggcaatggacattctgggttttcttcctgacgaaaagtatgggtgttataagttgaccggtgcgatcatgcattttggaaacatgaagttcaagcaaaagccccgagaggagcagctggaggcagacggcaccgagaacgctgacaaggccgcattcctcatggggattaattcttccgagttggtgaagtgtctcatccaccctcgcattaaagtgggaaatgagtatgtgacacgcggtcagaccatcgagcaggtcacttgtgctgtgggcgcacttagtaaaagcatgtacgagaggatgttcaaatggctagtggcacgtattaacagagccctggacgccaaactgagcagacaattctttatcggtattctcgacattactggctttgaaatcctggagtacaacagcctcgagcagctgtgcattaacttcactaatgagaagcttcagcagtttttcaactggcacatgtttgtgctggagcaggaggagtataaaaaagaatcaatcgaatgggtgagcattggattcggattggacctccaggcttgtatcgatctgatagagaagccaatgggtatactaagtatcctggaggaggagtgcatgttccctaaggccactgatttgacttttaaaaccaaattgtttgacaaccactttggtaagtctgtgcacctgcaaaaacctaagcccgataagaaaaagtttgaggcccactttgaactggtgcattacgccggtgtagtgccatacaacatttccggatggcttgaaaagaacaaggacctgctgaatgaaacagtggtggctgtctttcagaaatcttctaataggctccttgccagtctgttcgaaaattacatgtcgaccgactccgcaatcccttttggagaaaagaagcgaaaaaagggtgcttccttccagaccgtggcctctctgcacaaagaaaacctgaataagttaatgacgaatctgaagagtactgctcctcacttcgttcgttgcatcaaccccaatgtcaataagattccgggaatcctcgacccatatctggttctgcagcaactgcggtgtaatggggtcttggaagggactcgcatctgccgggaggggttccccaacagactgcagtacgcggactttaagcagagatactgtattctgaaccctcgtaccttccccaagtcgaagtttgttagttcgcggaaagcggctgaagaactgctgggatccctggaaattgaccatacccagtatcggtttggaattaccaaggtgttcttcaaagcaggatttctcggacaactcgaggcaatccgggacgaacgcctgtcaaaggttttcacgctatttcaggcacgcgctcaggggaagttaatgagaattaaattccaaaagatcttagaagaacgggacgccctcatactaatccagtggaacattcgggcattcatggcagtgaagaactggccgtggatgagattgttcttcaagatcaaaccactggttaagtcctccgaggtcggcgaagaggttgccggactgaaagaagaatgtgcccagctgcagaaggctcttgaaaagagcgagttccagagggaagagttgaaagccaaacaggtgtcacttactcaggaaaagaacgatctcatactgcaattacaggccgagcaagaaacactggctaatgtggaagaacagtgtgagtggctgatcaaatcaaagatacaactagaagctagagtcaaagagctgagtgagcgcgtggaggaggaggaagaaattaattcagagctgacagctcggggacgtaagctggaggatgaatgttttgagctgaagaaagaaatcgatgacttggaaacaatgctagtcaagtcggagaaagagaagcgcaccacggagcacaaggtaaaaaacctgaccgaagaggtagaattcctcaacgaggatattagcaagctcaatagagccgcaaaggtcgttcaagaagcccaccaacagacactcgacgaccttcatatggaggaagagaagctgtcaagcttgtcaaaggcaaatctgaaactggagcaacaggtggatgagcttgagggtgccctggaacaggaaagaaaagccagaatgaattgtgagcgcgagctacacaagttggagggtaatctgaaactgaatagagagagtatggagaacctcgagtccagtcagcgacacctggcggaagagctgcggaagaaggagctagaactgtcccagatgaactctaaggtagaaaatgaaaaggggctggtggcgcaactccaaaagacagtgaaagaactgcagacacagattaaggatctgaaggaaaagctggaagctgagagaaccactagggctaagatggagcgcgaacgcgcagatctgacgcaggatcttgcagacctgaacgaacgtctggaagaagtggggggaagctctctggcccaactggaaatcaccaaaaaacaggaaactaaattccagaagctgcacagggatatggaggaggccacgctgcacttcgaaaccacctcagcttcactgaagaagcgccacgccgactctttggcagagctggaaggtcaagttgaaaacctgcagcaggtgaaacagaagttggagaaagacaagtcagatctgcagttagaggtagacgacctgctcacccgagtggagcagatgactagagccaaggcaaacgccgaaaaactgtgcacgctgtacgaagagcgactgcacgaggctaccgctaagcttgacaaggtgactcaactggcaaatgacctcgcagcccagaaaacaaagctgtggtccgagtctggggagttcctgcgaaggttggaagagaaggaggccttgatcaatcagctctcccgtgagaagagcaacttcactcgccagatcgaggaccttcggggacagttagaaaaagaaaccaaaagtcagagtgctttggcccatgcccttcaaaaggcccagagagactgcgaccttttgagggaacagtacgaagaagaacaggaggtgaaagccgaactgcataggacactttccaaagtcaatgccgaaatggttcagtggcggatgaaatacgagaataacgtaatccagcggaccgaggatcttgaagacgctaagaaggaactcgcaatacgcctgcaggaggcggctgaagccatgggagtggccaacgccaggaacgctagcctcgaacgagcacgacatcaactacaactcgaacttggcgatgccctctctgacctcggtaaggtgagatcggccgctgctaggttggaccagaagcagttgcaatccggaaaggccctcgccgattggaagcagaagcacgaagagagccaggctctgttggatgcatcacagaaggaggttcaggcgctgtctaccgagttactgaaactgaagaacacctatgaggagtcgatcgtcgggcaggaaaccctgcgacgcgagaacaagaatctgcaagaagaaatctctaacttgacaaaccaggtgagggagggcaccaagaatctgactgaaatggagaaggttaagaagctcattgaggaggagaaaaccgaagtacaggtgaccctggaggagactgagggcgctctggagcgaaacgaatcaaagatcctccactttcagcttgagcttttagaggcaaaggccgaattggagagaaagttatccgagaaggatgaggaaatagagaatttccgacggaagcagcagtgtaccatcgattccctacaaagctccctggactctgaggctaagagccgtatcgaagtaactcgcctgaagaaaaagatggaagaagatctgaacgaaatggagctacagctgtcttgtgctaaccgccaagtcagcgaggctaccaaatcattgggccagctacagatccaaatcaaagacctccagatgcaactggacgatagcacacagttgaatagcgacctgaaggagcaggtcgccgttgctgagcgcagaaattcactgctgcaaagcgaactagaggaccttaggtccctgcaggagcaaactgagaggggccgtcgcttgtcagaggaagaactcttggaagctacggaacgcatcaatctgttctatactcagaacaccagcctcctttctcagaaaaagaagttggaggcagacgtggctcgcatgcagaaagaggcagaagaagtggtccaggagtgccagaatgccgaagaaaaagcgaagaaggctgccattgaagccgctaacctcagcgaggaactgaagaaaaaacaagacacaatagcgcacctcgaaagaactcgtgagaatatggaacagaccattaccgacctgcagaaacgcctagctgaggcagaacagatggcactgatgggctctaggaaacagattcagaagctcgaatctcgagtgcgagagctggagggcgagttggagggagagatcaggcggagcgctgaagcccaaagaggcgctcgtcggttggagaggtgtatcaaagaattgacctatcaagcagaggaagacaagaagaatctgagcaggatgcagacccagatggacaaactgcaactgaaggttcagaattataaacagcaggtcgaagtggccgaaacccaagccaatcaatacctgtccaagtacaagaaacagcagcacgagctgaacgaggtaaaggaacgagccgaagtagctgaatcccaggtcaataagctgaaaattaaggccagagagttcgggaaaaaagtgcaggaggagtat

SEQ ID NO: 183569 - DNA, 5841 bp, Artificial Sequence
  derived and/or modified sequence
atggtggagagctgcctgctgaccttcagagccttcttctggtggatcgccctgatcaagatggacctgagcgacctgggcgaggccgccgccttcctgagaagaagcgaggccgagctgctgctgctgcaggccaccgccctggacggcaagaagaagtgctggatccccgacggcgagaacgcctacatcgaggccgaggtgaagggcagcgaggacgacggcaccgtgatcgtggagaccgccgacggcgagagcctgagcatcaaggaggacaagatccagcagatgaacccccccgagttcgagatgatcgaggacatggccatgctgacccacctgaacgaggccagcgtgctgcacaccctgaagagaagatacggccagtggatgatctacacctacagcggcctgttctgcgtgaccatcaacccctacaagtggctgcccgtgtaccagaaggaggtgatggccgcctacaagggcaagagaagaagcgaggcccccccccacatcttcgccgtggccaacaacgccttccaggacatgctgcacaacagagagaaccagagcatcctgttcaccggcgagagcggcgccggcaagaccgtgaacagcaagcacatcatccagtacttcgccaccatcgccgccatgatcgagagcagaaagaagcagggcgccctggaggaccagatcatgcaggccaacaccatcctggaggccttcggcaacgccaagaccctgagaaacgacaacagcagcagattcggcaagttcatcagaatgcacttcggcgccagaggcatgctgagcagcgtggacatcgacatctacctgctggagaagagcagagtgatcttccagcaggccggcgagagaaactaccacatcttctaccagatcctgagcggccagaaggagctgcacgacctgctgctggtgagcgccaaccccagcgacttccacttctgcagctgcggcgccgtgaccgtggagagcctggacgacgccgaggagctgctggccaccgagcaggccatggacatcctgggcttcctgcccgacgagaagtacggctgctacaagctgaccggcgccatcatgcacttcggcaacatgaagttcaagcagaagcccagagaggagcagctggaggccgacggcaccgagaacgccgacaaggccgccttcctgatgggcatcaacagcagcgagctggtgaagtgcctgatccaccccagaatcaaggtgggcaacgagtacgtgaccagaggccagaccatcgagcaggtgacctgcgccgtgggcgccctgagcaagagcatgtacgagagaatgttcaagtggctggtggccagaatcaacagagccctggacgccaagctgagcagacagttcttcatcggcatcctggacatcaccggcttcgagatcctggagtacaacagcctggagcagctgtgcatcaacttcaccaacgagaagctgcagcagttcttcaactggcacatgttcgtgctggagcaggaggagtacaagaaggagagcatcgagtgggtgagcatcggcttcggcctggacctgcaggcctgcatcgacctgatcgagaagcccatgggcatcctgagcatcctggaggaggagtgcatgttccccaaggccaccgacctgaccttcaagaccaagctgttcgacaaccacttcggcaagagcgtgcacctgcagaagcccaagcccgacaagaagaagttcgaggcccacttcgagctggtgcactacgccggcgtggtgccctacaacatcagcggctggctggagaagaacaaggacctgctgaacgagaccgtggtggccgtgttccagaagagcagcaacagactgctggccagcctgttcgagaactacatgagcaccgacagcgccatccccttcggcgagaagaagagaaagaagggcgccagcttccagaccgtggccagcctgcacaaggagaacctgaacaagctgatgaccaacctgaagagcaccgccccccacttcgtgagatgcatcaaccccaacgtgaacaagatccccggcatcctggacccctacctggtgctgcagcagctgagatgcaacggcgtgctggagggcaccagaatctgcagagagggcttccccaacagactgcagtacgccgacttcaagcagagatactgcatcctgaaccccagaaccttccccaagagcaagttcgtgagcagcagaaaggccgccgaggagctgctgggcagcctggagatcgaccacacccagtacagattcggcatcaccaaggtgttcttcaaggccggcttcctgggccagctggaggccatcagagacgagagactgagcaaggtgttcaccctgttccaggccagagcccagggcaagctgatgagaatcaagttccagaagatcctggaggagagagacgccctgatcctgatccagtggaacatcagagccttcatggccgtgaagaactggccctggatgagactgttcttcaagatcaagcccctggtgaagagcagcgaggtgggcgaggaggtggccggcctgaaggaggagtgcgcccagctgcagaaggccctggagaagagcgagttccagagagaggagctgaaggccaagcaggtgagcctgacccaggagaagaacgacctgatcctgcagctgcaggccgagcaggagaccctggccaacgtggaggagcagtgcgagtggctgatcaagagcaagatccagctggaggccagagtgaaggagctgagcgagagagtggaggaggaggaggagatcaacagcgagctgaccgccagaggcagaaagctggaggacgagtgcttcgagctgaagaaggagatcgacgacctggagaccatgctggtgaagagcgagaaggagaagagaaccaccgagcacaaggtgaagaacctgaccgaggaggtggagttcctgaacgaggacatcagcaagctgaacagagccgccaaggtggtgcaggaggcccaccagcagaccctggacgacctgcacatggaggaggagaagctgagcagcctgagcaaggccaacctgaagctggagcagcaggtggacgagctggagggcgccctggagcaggagagaaaggccagaatgaactgcgagagagagctgcacaagctggagggcaacctgaagctgaacagagagagcatggagaacctggagagcagccagagacacctggccgaggagctgagaaagaaggagctggagctgagccagatgaacagcaaggtggagaacgagaagggcctggtggcccagctgcagaagaccgtgaaggagctgcagacccagatcaaggacctgaaggagaagctggaggccgagagaaccaccagagccaagatggagagagagagagccgacctgacccaggacctggccgacctgaacgagagactggaggaggtgggcggcagcagcctggcccagctggagatcaccaagaagcaggagaccaagttccagaagctgcacagagacatggaggaggccaccctgcacttcgagaccaccagcgccagcctgaagaagagacacgccgacagcctggccgagctggagggccaggtggagaacctgcagcaggtgaagcagaagctggagaaggacaagagcgacctgcagctggaggtggacgacctgctgaccagagtggagcagatgaccagagccaaggccaacgccgagaagctgtgcaccctgtacgaggagagactgcacgaggccaccgccaagctggacaaggtgacccagctggccaacgacctggccgcccagaagaccaagctgtggagcgagagcggcgagttcctgagaagactggaggagaaggaggccctgatcaaccagctgagcagagagaagagcaacttcaccagacagatcgaggacctgagaggccagctggagaaggagaccaagagccagagcgccctggcccacgccctgcagaaggcccagagagactgcgacctgctgagagagcagtacgaggaggagcaggaggtgaaggccgagctgcacagaaccctgagcaaggtgaacgccgagatggtgcagtggagaatgaagtacgagaacaacgtgatccagagaaccgaggacctggaggacgccaagaaggagctggccatcagactgcaggaggccgccgaggccatgggcgtggccaacgccagaaacgccagcctggagagagccagacaccagctgcagctggagctgggcgacgccctgagcgacctgggcaaggtgagaagcgccgccgccagactggaccagaagcagctgcagagcggcaaggccctggccgactggaagcagaagcacgaggagagccaggccctgctggacgccagccagaaggaggtgcaggccctgagcaccgagctgctgaagctgaagaacacctacgaggagagcatcgtgggccaggagaccctgagaagagagaacaagaacctgcaggaggagatcagcaacctgaccaaccaggtgagagagggcaccaagaacctgaccgagatggagaaggtgaagaagctgatcgaggaggagaagaccgaggtgcaggtgaccctggaggagaccgagggcgccctggagagaaacgagagcaagatcctgcacttccagctggagctgctggaggccaaggccgagctggagagaaagctgagcgagaaggacgaggagatcgagaacttcagaagaaagcagcagtgcaccatcgacagcctgcagagcagcctggacagcgaggccaagagcagaatcgaggtgaccagactgaagaagaagatggaggaggacctgaacgagatggagctgcagctgagctgcgccaacagacaggtgagcgaggccaccaagagcctgggccagctgcagatccagatcaaggacctgcagatgcagctggacgacagcacccagctgaacagcgacctgaaggagcaggtggccgtggccgagagaagaaacagcctgctgcagagcgagctggaggacctgagaagcctgcaggagcagaccgagagaggcagaagactgagcgaggaggagctgctggaggccaccgagagaatcaacctgttctacacccagaacaccagcctgctgagccagaagaagaagctggaggccgacgtggccagaatgcagaaggaggccgaggaggtggtgcaggagtgccagaacgccgaggagaaggccaagaaggccgccatcgaggccgccaacctgagcgaggagctgaagaagaagcaggacaccatcgcccacctggagagaaccagagagaacatggagcagaccatcaccgacctgcagaagagactggccgaggccgagcagatggccctgatgggcagcagaaagcagatccagaagctggagagcagagtgagagagctggagggcgagctggagggcgagatcagaagaagcgccgaggcccagagaggcgccagaagactggagagatgcatcaaggagctgacctaccaggccgaggaggacaagaagaacctgagcagaatgcagacccagatggacaagctgcagctgaaggtgcagaactacaagcagcaggtggaggtggccgagacccaggccaaccagtacctgagcaagtacaagaagcagcagcacgagctgaacgaggtgaaggagagagccgaggtggccgagagccaggtgaacaagctgaagatcaaggccagagagttcggcaagaaggtgcaggaggagtag

SEQ ID NO: 183570 - protein, 1292 aa, Artificial Sequence
  derived and/or modified sequence
MDASYDGTEVTVVMEEIEEAYCYTSPGPPKKKKKYKIHGEKTKKPRSAYLLYYYDIYLKVQQELPHLPQSEINKKISESWRLLSVAERSYYLEKAKLEKEGLDPNSKLSALTAVVPDIPGFRKILPRSDYIIIPKSSLQEDRSCPQLELCVAQNQMSPKGPPLVSNTAPETVPSHAGMAEQCLAVEALAEEVGALTQSGAVQEIATSEILSQDVLLEDASLEVGESHQPYQTSLVIEETLVNGSPDLPTGSLAVPHPQVGESVSVVTVMRDSSESSSSAPATQFIMLPLPAYSVVENPTSIKLTTTYTRRGHGTCTSPGCSFTYVTRHKPPKCPTCGNFLGGKWIPKEKPAKVKVELASGVSSKGSVVKRNQQPVTTEQNSSKENASKLTLENSEAVSQLLNVAPPREVGEESEWEEVIISDAHVLVKEAPGNCGTAVTKTPVVKSGVQPEVTLGTTDNDSPGADVPTPSEGTSTSSPLPAPKKPTGADLLTPGSRAPELKGRARGKPSLLAAARPMRAILPAPVNVGRGSSMGLPRARQAFSLSDKTPSVRTCGLKPSTLKQLGQPIQQPSGPGEVKLPSGPSNRTSQVKVVEVKPDMFPPYKYSCTVTLDLGLATSRGRGKCKNPSCSYVYTNRHKPRICPSCGVNLAKDRTEKTTKAIEVSSPLPDVLNATEPLSTAQREIQRQSTLQLLRKVLQIPENESELAEVFALIHELNSSRLILSNVSEETVTIEQTSWSNYYESPSTQCLLCSSPLFKGGQNSLAGPQECWLLTASRLQTVTAQVKMCLNPHCLALHSFIDIYTGLFNVGNKLLVSLDLLFAIRNQIKLGEDPRVSINVVLKSVQEQTEKTLTSEELSQLQELLCNGYWAFECLTVRDYNDMICGICGVAPKVEMAQRSEENVLALKSVEFTWPEFLGSNEVNVEDFWATMETEVIEQVAFPASIPITKFDASVIAPFFPPLMRGAVVVNTEKDKNLDVQPVPGSGSALVRLLQEGTCKLDEIGSYSEEKLQHLLRQCGIPFGAEDSKDQLCFSLLALYESVQNGARAIRPPRHFTGGKIYKVCPHQVVCGSKYLVRGESARDHVDLLASSRHWPPVYVVDMATSVALCADLCYPELTNQMWGRNQGCFSSPTEPPVSVSCPELLDQHYTVDMTETEHSIQHPVTKTATRRIVHAGLQPNPGDPSAGHHSLALCPELAPYATILASIVDSKPNGVRQRPIAFDNATHYYLYNRLMDFLTSREIVNRQIHDIVQSCQPGEVVIRDTLYRLGVAQIKTETEEEGEEEEVAAVAE

SEQ ID NO: 183571 - DNA, 3879 bp, Artificial Sequence
  derived and/or modified sequence
atggacgctagctacgacggaaccgaagttaccgtcgtcatggaagaaatagaagaagcatattgttatacctcacctgggccgcccaaaaaaaaaaaaaagtacaagatccacggtgagaagactaaaaagccaaggtcagcctatctcctctactactatgatatctatctcaaagtgcagcaggaactgccacacctcccccaaagcgaaatcaataagaagattagcgagagctggcgactgctgagtgttgccgaacgctcctactaccttgagaaagcaaagctagagaaagagggactggatcccaatagcaagcttagcgcactcacggccgtcgtccccgacattccaggatttagaaaaatcctacccagatctgattatataatcatccccaaatcttccctgcaggaggatcgctcatgcccccaactagaactctgtgttgcccagaatcagatgagtccgaagggcccacctctggtgtctaatacggccccagagacggttcctagtcacgcggggatggcagagcagtgccttgcagtagaagcattagctgaagaggtcggagccttaacacagtccggagcggtccaggaaatcgctaccagtgaaattctgagccaggatgtcttgctggaagacgcaagcctggaggttggcgagtcccaccagccctaccagacttctctggtcattgaagagacccttgtaaatggttcgccggatctgccaaccggcagcttggccgttccgcatccacaggtgggggagagtgtcagcgtcgtcaccgtgatgagagactcctccgaatcaagttccagcgcccctgctacccaatttataatgctaccactgccggcatattcggttgtcgaaaaccctacatccattaaactcacaaccacttatacaaggcgcggacacggtacctgtacctcccctggttgtagttttacttacgtgacacgtcacaaaccccccaagtgcccaacatgtggtaatttcctgggcggcaagtggatccccaaggagaaacccgcgaaagtgaaggtagaactggcctcaggcgtaagtagtaagggatccgttgttaaaagaaatcaacagccagtgaccactgagcagaacagctccaaggaaaacgcctcaaagttaaccctggaaaatagcgaggccgtgtcacagctgctcaatgtagctcccccaagagaagttggcgaagaatcagaatgggaagaggtcattatttccgatgcacacgtcctggtcaaagaagcccctggaaattgcggcactgctgttaccaaaacccccgtagttaagtcaggagtacaacccgaggtcacactcgggactacagataacgacagccctggtgctgatgtgcccactccctctgaaggcacatctacatcttccccacttcctgccccaaagaagcccaccggcgcagacttgctgacccccgggtctcgagctcccgaacttaaaggccgggcccgcggcaaacccagcttattagcagcggcgcgtcccatgcgggcgattttgccagctcccgtgaatgtggggaggggatcgagcatgggactgcctcgggcacggcaagctttctctctatccgacaagactccgtccgtgaggacttgtggcctaaaaccctcaacgttaaagcagctcggacaacccatccagcaaccatccgggccgggtgaggtgaagctgccgtccggcccctctaatagaacaagtcaggtcaaggtggtggaggtgaagcctgatatgttccctccgtacaagtactcttgtactgtgactttggacctcggcctggcaacctctcggggccgagggaaatgcaaaaatccgtcctgcagttatgtgtacacaaataggcataaacctaggatttgcccttcatgtggggtgaacctggccaaggaccgcacggaaaagaccactaaggctattgaggtttcatctcctttgccggacgtcctcaatgccaccgagccactctcgacagcccagcgggagatccagcgtcaatctactctgcaactcctgcgaaaagtgttgcaaataccggagaacgaatctgaactggctgaggtcttcgccctcatacatgaactgaactcatccaggttaattttgagtaatgtatcagaggagaccgtcaccatcgaacagacctcctggagcaactattatgagagcccctccacccagtgtctgctgtgctcaagtcctctgttcaagggaggacagaacagtctggctgggcctcaggagtgttggttgttaacagcctccaggcttcagaccgtaactgctcaggtgaaaatgtgtcttaacccccactgcttagccttgcatagttttatagatatttatacggggttattcaacgtgggaaataagctgttagtcagcctggatctcctgttcgcaatacgcaatcagatcaaattgggagaggatcctagggtaagcatcaatgtggtattaaagtccgtccaggaacaaactgaaaagacactcacctcagaggaactgtcccagctgcaggagttgctgtgcaatggctactgggcttttgaatgtttgacggtgcgcgattataatgacatgatctgtggcatttgtggagtggcccccaaggtcgagatggcgcagagatctgaagaaaatgtgctggcccttaaaagcgtggagtttacgtggcccgagttcctggggagtaacgaggttaacgtcgaggatttctgggccactatggagaccgaggtgattgagcaggtagccttccctgcttccatcccaattactaaattcgatgcctccgtgattgccccctttttcccccccctcatgcgaggagccgtggttgtgaacactgagaaagacaagaatctggacgtccagccagtgcctggatccggctcggcattagttcgactgttacaggaaggaacctgcaagcttgacgagatcggctcttactccgaagaaaaactgcaacacctgctgagacagtgcggcatcccctttggggcagaagatagtaaagaccagctctgtttttccctgctggccttgtacgagtcagtacagaacggagcccgcgccataaggcctccacggcactttaccggtggaaagatatataaggtttgtccccaccaggtggtgtgtgggtcaaaatatttggtccggggggaaagtgcccgtgaccatgtggacctgctggcgtcctctagacactggcccccagtctacgtagttgatatggccacctctgtggccctttgtgcggacctgtgctaccccgaactcactaatcagatgtggggtagaaaccagggatgtttcagtagcccaaccgaacctcccgtgagcgtgtcttgtcccgagctgcttgaccagcattatacagtcgacatgaccgaaactgagcattctatccaacatcccgtaactaaaaccgccacccggcgaatcgtacacgcgggcctgcagcccaaccctggagatccatccgctgggcatcactctctagccctgtgccctgaacttgcaccctatgcaacaatcttggcctctatcgtcgactccaaacccaatggggtcaggcagagacccattgcctttgacaacgctacgcactactatctgtacaaccggttgatggacttcctcacgtccagagaaatcgtcaatagacagatccacgatatagtccaatcttgtcaaccaggagaagtggtgattcgcgacaccctttatcggttgggcgtggctcaaattaaaacagagacagaggaggaaggagaagaggaggaggttgcagcagtggccgaatag

SEQ ID NO: 183572 - DNA, 3879 bp, Artificial Sequence
  derived and/or modified sequence
atggatgccagctatgatggaacagaggtgacagtggtgatggaggagattgaggaggcctactgctacaccagccctggcccccccaagaagaagaagaagtacaagatccacggggagaagaccaagaagcccaggtctgcctacctgctgtactactatgacatctacctgaaggtgcagcaggagctgccccacctgccccagagcgagatcaacaagaagatcagcgagagctggaggctgctgtctgtggccgagaggagctactacctggagaaggccaagctggagaaggagggcctggaccccaacagcaagctgagcgccctgacagctgtggtgcctgacatccctggcttcaggaagatcctgcccaggagtgactacatcatcatccccaagagcagcctgcaggaggacaggagctgcccccagctggagctgtgtgtggcccagaaccagatgagccccaagggcccccccctggtgagcaacacagcccctgagaccgtgcccagccacgccggcatggccgagcagtgcctggccgtggaggccctggccgaggaggtgggcgccctgacccagagcggggctgtgcaggagatcgccaccagcgagatcctgagccaggatgtgctgctggaggatgccagcctggaggtgggggagagccaccagccctaccagaccagcctggtgattgaggagaccctggtgaatggcagcccagacctgcccaccggcagcctggccgtgccccacccccaggtgggggagagcgtgtctgtggtgacagtgatgagggacagcagcgagagcagcagcagcgccccagccacccagttcatcatgctgcccctgcctgcctacagcgtggtggagaaccccaccagcatcaagctgaccaccacctacacccggcggggccacggcacctgcaccagccctggctgcagcttcacctacgtgaccaggcacaagccacccaagtgccccacctgtggcaacttcctgggcggcaagtggatccccaaggagaagccagccaaggtgaaggtggagctggccagcggcgtgagcagcaagggctctgtggtgaagaggaaccagcagcctgtgaccacagagcagaacagcagcaaagaaaatgccagcaagctgaccctggagaacagcgaggccgtgtcccagctgctgaatgtggccccaccccgggaggtgggggaggagagcgagtgggaggaggtgatcatcagtgatgcccacgtgctggtgaaggaggcccctggcaactgtggcacagctgtgaccaagacccctgtggtgaagagcggcgtgcagcctgaggtgaccctgggcaccacagacaatgacagccctggagcagatgtgcccacccccagcgagggcaccagcaccagcagccccctgcctgcccccaagaagcccaccggggctgacctgctgaccccaggcagccgggcccctgagctgaagggccgggcccggggcaagcccagcctgctggccgccgcccggcccatgagggccatcctgcctgcccctgtgaatgtgggccggggcagctccatgggcctgccccgggcccggcaggccttcagcctgagtgacaagacccccagcgtgaggacctgtggcctgaagcccagcaccctgaagcagctgggccagcccatccagcagcccagcggccctggagaggtgaagctgcccagcggccccagcaacagaaccagccaggtgaaggtggtggaggtgaagccagacatgtttcctccctacaagtacagctgcaccgtgaccctggacctgggcctggccaccagccggggccggggcaagtgcaagaaccccagctgcagctatgtgtacaccaacagacacaagccccgcatctgccccagctgtggggtgaacctggccaaggacagaacagagaagaccaccaaggccatcgaggtgagcagccccctgcctgatgtgctgaatgccacagagcccctgagcacagcccagcgggagatccagaggcagagcaccctgcagctgctgaggaaggtgctgcagatcccagaaaatgaaagtgagctggccgaggtgtttgccctgatccacgagctgaacagcagccgcctcatcctgagcaatgtgtctgaggagaccgtgaccatcgagcagacctcctggagcaactactatgagagccccagcacccagtgcctgctgtgcagcagccccctcttcaagggcggccagaacagcctggccggcccccaggagtgctggctgctgacagccagccggctgcagacagtgacagcccaggtgaagatgtgcctgaacccccactgcctggccctgcacagcttcatcgacatctacacaggcctcttcaacgtgggcaacaagctgctggtgtccctggacctgctgtttgccatccggaaccagatcaagctgggggaggacccccgggtgtccatcaacgtggtgctgaagtctgtgcaggagcagacagagaagaccctgaccagcgaggagctgagccagctgcaggagctgctgtgcaatggctactgggcctttgagtgcctgactgtgcgggactacaatgacatgatctgtggcatctgtggggtggcccccaaggtggagatggcccagaggagtgaagaaaatgtgctggccctgaagtctgtggagttcacctggccagagttcctgggcagcaatgaggtgaatgtggaggacttctgggccaccatggagacagaggtgattgagcaggtggccttccctgccagcatccccatcaccaagtttgatgcctctgtgattgcccccttcttcccccccctgatgagaggagctgtggtggtgaacacagagaaggacaagaacctggatgtgcagcctgtgcccggcagcggcagcgccctggtgcggctgctgcaggagggcacctgcaagctggatgaaattggcagctacagcgaggagaagctgcagcacctgctgcggcagtgtggcatcccctttggagctgaggacagcaaggaccagctgtgcttcagcctgctggccctgtatgaatctgtgcagaatggagcccgggccatccggcccccaagacacttcaccggcggcaagatctacaaggtgtgcccccaccaggtggtgtgtggcagcaagtacctggtgcggggggagagcgcccgggaccacgtggacctgctggccagcagccgccactggccccctgtgtatgtggtggacatggccacctctgtggccctgtgtgccgacctgtgctacccagagctgaccaaccagatgtggggcaggaaccagggctgcttcagcagccccacagagccccctgtgtctgtgtcctgcccagagctgctggaccagcactacacagtggacatgacagaaacagagcacagcatccagcaccctgtgaccaagacagccacccggcgcatcgtgcatgctggcctgcagcccaaccctggggaccccagcgctggccaccacagcctggccctgtgcccagagctggccccctatgccaccatcctggccagcatcgtggacagcaagcccaatggagtgcggcagaggcccatcgcctttgacaatgccacccactactacctgtacaaccggctgatggacttcctgaccagccgggagatcgtgaaccggcagatccatgacatcgtgcagagctgccagcctggagaggtggtgatccgggacaccctgtaccgcctgggcgtggcccagatcaagacagaaacagaggaggagggggaggaggaggaggtggccgctgtggccgagtag

SEQ ID NO: 183573 - DNA, 3879 bp, Artificial Sequence
  derived and/or modified sequence
atggacgccagctacgacggcaccgaggtgaccgtggtgatggaggaaatagaagaagcatattgttacacgtcccccggcccgcctaaaaagaagaaaaagtacaaaatacacggggagaaaaccaaaaaacccagaagcgcttacctcctgtactactatgatatctatttgaaagtgcagcaagaactgccccacctccctcagtcagagatcaataaaaaaatttctgagtcctggcgcctgctgtccgtggcagagcggagctattatctggagaaggcgaaactagaaaaagaaggactggacccgaacagcaagcttagtgcgctcacggctgtggtgcccgatattcctggtttccggaagatcttgcctcgatccgattacattatcatccctaaatccagcctgcaggaggacaggtcgtgcccccagctggagctgtgtgtggcccagaatcagatgtcaccaaagggacctccgttggtgagcaacacagctcctgagactgttccatcgcacgccgggatggccgaacagtgcctcgcggtggaggccctcgccgaggaggtgggagccctgactcagagcggagctgtccaggaaatcgcgaccagtgaaattctgagtcaggacgtgctcctagaagatgcttctctggaagtgggtgaatcacaccagccctatcaaactagtctagtaatcgaagagaccctggtaaacgggagtccggacctccccacaggaagcctagctgtcccacatccgcaagtgggggaatcagtttccgttgtgactgtgatgagggattctagtgagagttcatcctcagcacccgctacccagtttatcatgcttcccctgcctgcatatagcgtcgttgaaaatccaacatctatcaagctgacgactacgtatacaagacgggggcatggaacctgcactagtcccggttgtagcttcacgtacgttacgcggcacaaacctccaaaatgcccgacatgcgggaactttctgggagggaagtggatcccgaaagagaagcctgcaaaagttaaagtggaactggcctcgggcgtttcttcgaaggggagtgtggtcaaacgaaatcagcagcctgtcaccacggagcagaactcaagcaaggagaatgcttccaagcttacgcttgagaattcagaggcagtctcccaactccttaatgtcgccccgccgagagaggtgggcgaagaatcagaatgggaggaggtcataatctctgatgcccacgtactagtgaaggaagcccccggcaactgtgggactgccgtcacaaagacccctgtagttaaatcgggggtacagccagaagtgaccttgggaactacagacaacgattcacctggtgccgatgtgcctacaccatctgaaggcaccagcacttcttcacctctaccagcccctaagaagcccactggagccgatctcctgacccctggatcgagagctccagaactgaagggccgtgcccgtggtaagccatcactgctcgccgccgcccgccctatgagagccattctcccagcacctgttaacgtaggcagaggtagtagcatgggcttacctcgggccagacaagcatttagcctgtccgacaaaacaccttccgtgagaacatgtggtcttaaaccatccactttaaaacaactcgggcagccaatccagcaaccgtccggtccgggagaggttaagctaccatccggacctagtaatagaacttctcaggtgaaagtggtggaggtgaaaccggatatgttcccaccatacaagtatagctgcaccgtaaccttggacttgggactggctacctctcgtggaagaggaaaatgcaagaatccctcctgctcctacgtttacacgaacaggcacaaaccccgtatatgtccaagctgcggagtgaacctcgcaaaagatcgcacagaaaagactaccaaggccattgaggtgtcatcacctctgcccgatgtgttgaacgccactgagcccctgtccaccgcacagcgtgagatccagcggcagtccaccctgcagcttctcaggaaggtcctgcagatcccggaaaacgagagcgaactggcagaggtgttcgctttgattcacgagttgaactcctcccggctgatcctgtccaatgtgtccgaggaaacggtcacaattgaacagacctcctggtctaactattacgagagcccatccactcagtgcctgctttgcagttcgccccttttcaagggcgggcagaatagcctggctgggccacaggagtgctggctgcttaccgctagccgattgcaaaccgttaccgcgcaggttaaaatgtgcctgaatccacattgtctggcactgcactcattcattgacatatacactggacttttcaatgtcggtaacaagctacttgtgtcattagacctactgtttgcgattcggaaccaaatcaagctgggagaagacccgcgtgtaagtatcaatgtcgtgcttaaatctgtccaggagcagaccgaaaagacactgactagcgaggaattgagtcaactgcaggaactgctttgcaatggctattgggctttcgagtgtttgacagtgagggattacaatgatatgatctgcggaatttgtggggtggcccctaaggtcgagatggcccaacgatccgaagaaaatgtgctcgcacttaagtcagtggaattcacttggcccgagtttctgggctccaacgaggttaatgtggaagacttttgggctaccatggagactgaagttattgagcaggtggcattcccagcttcaatccccatcaccaagtttgatgcttccgttattgctccattctttccgcctcttatgaggggcgccgtggtggttaacaccgagaaagacaagaacctggatgtccagcccgtgccagggagcgggtcggctctggtcagactcctgcaggaggggacttgcaagctcgacgagatcggctcgtacagcgaagaaaagctgcagcatctgctacgccaatgcggaatccctttcggcgccgaagatagcaaggatcagttatgtttctcactgctggccttgtacgagtctgtgcagaacggagcccgggccatccggccaccgcggcattttacgggtgggaagatttataaagtctgcccacaccaggtggtctgtggatcaaagtacctcgtgagaggagaatccgcaagagatcatgtggatctgctggcttcgagccggcattggcctcccgtgtatgttgtcgatatggctacctctgtggctttgtgcgccgacctctgttacccagagctgacaaatcagatgtggggccggaatcagggctgtttctcatccccgaccgagcccccagtgtccgtttcctgtccagagctgctcgaccaacactacaccgtggacatgaccgagaccgagcatagtattcaacaccctgtaacaaagaccgccactcgccgcatagtgcatgccggcctgcaacctaacccaggcgacccttccgcagggcaccattcacttgcgctctgcccagagcttgccccatatgccaccatcttggcatccatcgttgattcaaagcccaacggggtgaggcagcgacccattgcttttgataacgctactcactattatttgtataaccggctgatggattttttaaccagccgcgaaatagtcaatcggcagatacatgatatcgttcagagctgtcaaccgggagaggtagttattcgggacacactgtatcggctgggtgtagcccaaattaagaccgagaccgaagaggagggggaggaagaagaggtcgccgccgtggcagaatag

SEQ ID NO: 183574 - DNA, 3879 bp, Artificial Sequence
  derived and/or modified sequence
atggacgcgagctatgacgggactgaggtgacagttgttatggaggaaattgaagaagcttactgttatacttccccgggacccccaaagaagaagaaaaaatataaaatccacggggaaaaaactaagaagccaaggagcgcctacctcctttattactatgatatttaccttaaagttcaacaggagctccctcacctgccccagagtgaaatcaacaaaaaaattagtgagagttggagactattgagcgttgcggagcggagttactatttagagaaagctaagcttgaaaaagaggggctggaccctaatagtaagctgtctgctctcaccgctgtggtgccagacatccctggattccgcaagatcctccctcggtctgactatatcatcattccgaagagtagcttgcaagaggaccgctcctgcccgcagctggaactgtgtgtggcgcagaatcaaatgtcccccaaaggacctcccctggtttccaatacagcgccagagacggtcccttcccacgccggtatggctgaacagtgtctagccgttgaagctctcgcagaggaggtaggagcactcacacagagcggagcggtgcaggaaattgctacctccgaaatcctcagtcaggacgttttgctcgaggacgcatccttagaggtgggagaaagccatcagccctatcaaacaagcttggtcatcgaggaaaccctggttaatggttcacccgaccttcccacgggctccctggcagtccctcaccctcaagtcggggagtccgtgagcgtcgtgacagtgatgagagattcatcagagtcttcaagctctgctccggctactcagtttattatgctgccccttcccgcttatagtgtggtagagaaccccacttccatcaaactgacgaccacatatacgcggagaggtcacggaacttgtacaagtcccggatgcagtttcacttatgtcaccaggcacaagccccctaagtgtcccacatgcggaaattttctcggcggaaaatggattcccaaagagaagcctgcaaaagtgaaagtagagctcgcaagcggtgttagctcaaaggggagcgtagtgaaaagaaatcaacaacctgttacaacagaacagaattcatctaaagagaatgcctcaaagctgactctcgaaaactcggaagccgtgtcacagctcctcaacgtggctcctcctagagaggttggggaggaaagtgagtgggaggaagttattattagcgacgctcatgttcttgtcaaggaggcccctgggaattgtgggaccgcagtgacaaagacgccagtggttaaaagcggtgtgcagccagaggtgaccctggggaccaccgacaacgatagccccggagccgacgttccaaccccatctgaagggacgtcaacttcgtcccccctgccagcacctaagaagcctaccggcgctgatctgctgacacctgggagcagggctccagagctgaaaggcagggccaggggtaagccatccttgctggctgccgctcggccaatgagagccatcctgccagcacctgtgaatgtgggcagaggcagctctatgggattgcctcgggcacgccaagcattctcattaagcgacaaaaccccttccgtgcggacatgtgggttgaagcccagtactttgaagcagcttgggcagcccatacagcaacctagcggtccaggtgaagttaagttaccctctggcccttctaacaggacttcccaggttaaggttgtggaggttaaacctgacatgttcccgccttataagtactcctgcaccgtgaccctcgatctcggcttggctacttccaggggtagaggcaagtgcaagaatccctcctgttcatatgtctacacaaatcgccataagcctagaatttgcccaagctgcggggtcaacctggctaaggaccggacagaaaagactacaaaggccatcgaagtatcatcacctctcccagacgtgctcaacgcgactgaacctctcagtacagctcagagagaaatccagaggcaatccaccctgcagctcctccggaaggtgctgcaaatcccagaaaacgaatccgaactagctgaagtctttgctctcatccacgaactcaattcttcccgattaattctttcaaatgtctccgaggaaactgtgaccattgagcagacttcctggagtaactattacgaatctccatccactcagtgcctgctgtgtagctcaccattattcaaggggggacagaatagtcttgccggtccacaggaatgctggttactgaccgcctcacgattgcagacagtgactgcacaggtgaagatgtgccttaatccccactgccttgccctgcactcttttattgatatatacacagggctcttcaatgtgggcaacaagctgctggttagcttggaccttttgtttgcaatccgaaaccagatcaagctcggagaggaccccagggtcagtattaacgtggttctgaagtccgtgcaggaacaaaccgagaagactctaacttctgaggagttatcccagctgcaggagctgttgtgtaatggttattgggcatttgagtgcctgacagtccgagattataatgatatgatctgcggcatttgtggcgtcgcccctaaagttgaaatggcccaacgctccgaagagaatgtcctcgccctgaagagtgtggaatttacctggcctgagtttcttggcagtaacgaggtgaatgtggaagatttttgggctacaatggagaccgaggtgattgaacaggtggctttccctgcctctataccaatcacgaaattcgacgccagtgttatcgctcccttcttcccaccactgatgaggggggcagtggtcgtgaatactgaaaaggacaagaatctggatgttcagcccgtaccgggttcaggctccgcccttgtgcgcctgctgcaagagggaacatgtaaactagacgagatcggtagctacagcgaagagaaattacaacacctgctgcggcagtgcggaattccctttggagccgaggactcaaaggaccagctctgtttctctctgcttgccttatacgaatccgtgcagaatggtgcacgggcaatccgaccaccacgccacttcaccggcggaaagatctacaaggtgtgcccccaccaagtggtgtgtggatcaaaatatctggttagaggagaaagcgccagagatcacgtcgacctcctggcctcctcaagacattggcctcctgtctacgtggtagatatggcaacttcagtcgctctctgtgccgacctgtgttacccggaactgacaaatcaaatgtgggggagaaaccagggttgcttttctagtcccacagaaccgcctgtatctgtctcctgccctgagttgctggatcagcattacaccgtagacatgactgaaacagagcacagcatacagcaccccgtaaccaaaacggcaacccgtcgcatagtgcatgctgggcttcagcctaatccaggagacccttcagccggtcatcattctctggccctgtgtcctgagctcgccccttacgccaccatcctcgctagcattgtggatagcaaacctaatggagtgaggcaacggcctatcgcatttgataatgccacgcactactacctatacaaccgtctgatggactttcttacgagtcgcgagattgtgaataggcaaatccacgacattgtgcagtcctgccagcctggggaggtggtgatcagggataccttgtataggcttggcgtggcacagattaagacggagacggaggaggaaggggaagaggaggaagtggctgcagtggctgagtag

SEQ ID NO: 183575 - DNA, 3879 bp, Artificial Sequence
  derived and/or modified sequence
atggacgccagctacgacggcaccgaggtgaccgtggtgatggaggagatcgaggaggcctactgctacaccagccccggcccccccaagaagaagaagaagtacaagatccacggcgagaagaccaagaagcccagaagcgcctacctgctgtactactacgacatctacctgaaggtgcagcaggagctgccccacctgccccagagcgagatcaacaagaagatcagcgagagctggagactgctgagcgtggccgagagaagctactacctggagaaggccaagctggagaaggagggcctggaccccaacagcaagctgagcgccctgaccgccgtggtgcccgacatccccggcttcagaaagatcctgcccagaagcgactacatcatcatccccaagagcagcctgcaggaggacagaagctgcccccagctggagctgtgcgtggcccagaaccagatgagccccaagggcccccccctggtgagcaacaccgcccccgagaccgtgcccagccacgccggcatggccgagcagtgcctggccgtggaggccctggccgaggaggtgggcgccctgacccagagcggcgccgtgcaggagatcgccaccagcgagatcctgagccaggacgtgctgctggaggacgccagcctggaggtgggcgagagccaccagccctaccagaccagcctggtgatcgaggagaccctggtgaacggcagccccgacctgcccaccggcagcctggccgtgccccacccccaggtgggcgagagcgtgagcgtggtgaccgtgatgagagacagcagcgagagcagcagcagcgcccccgccacccagttcatcatgctgcccctgcccgcctacagcgtggtggagaaccccaccagcatcaagctgaccaccacctacaccagaagaggccacggcacctgcaccagccccggctgcagcttcacctacgtgaccagacacaagccccccaagtgccccacctgcggcaacttcctgggcggcaagtggatccccaaggagaagcccgccaaggtgaaggtggagctggccagcggcgtgagcagcaagggcagcgtggtgaagagaaaccagcagcccgtgaccaccgagcagaacagcagcaaggagaacgccagcaagctgaccctggagaacagcgaggccgtgagccagctgctgaacgtggccccccccagagaggtgggcgaggagagcgagtgggaggaggtgatcatcagcgacgcccacgtgctggtgaaggaggcccccggcaactgcggcaccgccgtgaccaagacccccgtggtgaagagcggcgtgcagcccgaggtgaccctgggcaccaccgacaacgacagccccggcgccgacgtgcccacccccagcgagggcaccagcaccagcagccccctgcccgcccccaagaagcccaccggcgccgacctgctgacccccggcagcagagcccccgagctgaagggcagagccagaggcaagcccagcctgctggccgccgccagacccatgagagccatcctgcccgcccccgtgaacgtgggcagaggcagcagcatgggcctgcccagagccagacaggccttcagcctgagcgacaagacccccagcgtgagaacctgcggcctgaagcccagcaccctgaagcagctgggccagcccatccagcagcccagcggccccggcgaggtgaagctgcccagcggccccagcaacagaaccagccaggtgaaggtggtggaggtgaagcccgacatgttccccccctacaagtacagctgcaccgtgaccctggacctgggcctggccaccagcagaggcagaggcaagtgcaagaaccccagctgcagctacgtgtacaccaacagacacaagcccagaatctgccccagctgcggcgtgaacctggccaaggacagaaccgagaagaccaccaaggccatcgaggtgagcagccccctgcccgacgtgctgaacgccaccgagcccctgagcaccgcccagagagagatccagagacagagcaccctgcagctgctgagaaaggtgctgcagatccccgagaacgagagcgagctggccgaggtgttcgccctgatccacgagctgaacagcagcagactgatcctgagcaacgtgagcgaggagaccgtgaccatcgagcagaccagctggagcaactactacgagagccccagcacccagtgcctgctgtgcagcagccccctgttcaagggcggccagaacagcctggccggcccccaggagtgctggctgctgaccgccagcagactgcagaccgtgaccgcccaggtgaagatgtgcctgaacccccactgcctggccctgcacagcttcatcgacatctacaccggcctgttcaacgtgggcaacaagctgctggtgagcctggacctgctgttcgccatcagaaaccagatcaagctgggcgaggaccccagagtgagcatcaacgtggtgctgaagagcgtgcaggagcagaccgagaagaccctgaccagcgaggagctgagccagctgcaggagctgctgtgcaacggctactgggccttcgagtgcctgaccgtgagagactacaacgacatgatctgcggcatctgcggcgtggcccccaaggtggagatggcccagagaagcgaggagaacgtgctggccctgaagagcgtggagttcacctggcccgagttcctgggcagcaacgaggtgaacgtggaggacttctgggccaccatggagaccgaggtgatcgagcaggtggccttccccgccagcatccccatcaccaagttcgacgccagcgtgatcgcccccttcttcccccccctgatgagaggcgccgtggtggtgaacaccgagaaggacaagaacctggacgtgcagcccgtgcccggcagcggcagcgccctggtgagactgctgcaggagggcacctgcaagctggacgagatcggcagctacagcgaggagaagctgcagcacctgctgagacagtgcggcatccccttcggcgccgaggacagcaaggaccagctgtgcttcagcctgctggccctgtacgagagcgtgcagaacggcgccagagccatcagaccccccagacacttcaccggcggcaagatctacaaggtgtgcccccaccaggtggtgtgcggcagcaagtacctggtgagaggcgagagcgccagagaccacgtggacctgctggccagcagcagacactggccccccgtgtacgtggtggacatggccaccagcgtggccctgtgcgccgacctgtgctaccccgagctgaccaaccagatgtggggcagaaaccagggctgcttcagcagccccaccgagccccccgtgagcgtgagctgccccgagctgctggaccagcactacaccgtggacatgaccgagaccgagcacagcatccagcaccccgtgaccaagaccgccaccagaagaatcgtgcacgccggcctgcagcccaaccccggcgaccccagcgccggccaccacagcctggccctgtgccccgagctggccccctacgccaccatcctggccagcatcgtggacagcaagcccaacggcgtgagacagagacccatcgccttcgacaacgccacccactactacctgtacaacagactgatggacttcctgaccagcagagagatcgtgaacagacagatccacgacatcgtgcagagctgccagcccggcgaggtggtgatcagagacaccctgtacagactgggcgtggcccagatcaagaccgagaccgaggaggagggcgaggaggaggaggtggccgccgtggccgagtag

SEQ ID NO: 183576 - DNA, 4974 bp, Artificial Sequence
  derived and/or modified sequence
gccgggacgggtctccctggcgatccgtggtgtgccgctactgccggtgcagccgccaaaccggtgcctcggtgacgaccgtgtccctgccgtcttcctcgagctccccggggcttgacccccggggccctcggcaggcatcggtgaggagcctgcggagcgaacctgtgctcctattcttgcccttcaggaccccatatcgcgactccgaggaggggaagcgagaggggctgtcgcgactccgcgccgtgtgtcgccgggcggggccgcggggccggggctccttcagcccccgggatgcgcgcgcgagccctcgcctccacttccttgttgctgctgtcacgactggagccgcctctcgccgacagcggggagcgcgagtgcgccagccatccccctcgtccagccgccgggccaagcgcctccgggaatgtgagcggcgcagcttgcacgctcctccggccatggacgcatcatatgatggtactgaggtaactgtcgtgatggaggaaattgaggaagcctattgttacacctctcctgggccacccaagaagaagaaaaagtataaaatacatggagaaaagacaaagaaacccaggtctgcttaccttctgtactattacgacatctacctgaaagtgcagcaggagctcccccacctccctcagtctgagatcaataagaagattagtgagagttggaggcttctcagcgtggccgagaggagttactacttggagaaagccaaactagagaaggaaggtttggatcctaactctaagctctctgcactgactgctgtggttccggacatcccaggtttccgcaagatcctcccacgctcagattatatcatcatccccaagagcagcctgcaggaggaccggagctgccctcagctagagctatgtgtggctcagaaccagatgtccccgaaaggacctcctcttgtgtccaacactgccccggagacagtgcccagccatgcaggcatggcagagcagtgcctggctgtggaggccctggctgaggaggtgggagcccttacccagtcaggtgctgtacaggagattgccacctcagagatcctcagccaggatgtgctcctagaggacgcttccctagaagtaggggagagccaccaaccttaccagacaagcctggtaattgaagagaccttggtgaatggctcaccagacctccccactggaagcctggctgtgccccacccccaggttggggagagtgtatcagtggtaacagtcatgagggattccagtgagagtagctcctctgcaccagccacacagttcatcatgttgcctctgcctgcctactcggttgtggagaaccccacctccatcaaactgaccactacatatacccgccggggccatgggacatgcaccagcccagggtgctcctttacatatgtcaccaggcacaagccacctaagtgccctacctgtggtaacttcctaggagggaagtggatcccaaaggaaaagccagccaaagtaaaagtggaattggcttctggcgtctcttccaaaggctctgtggtgaaaagaaatcagcaacctgtcaccactgagcaaaattcctctaaggaaaatgcctccaaactgactctggagaattcggaagctgtaagccagctcctgaacgtagctcctcccagagaagtaggtgaggagagtgagtgggaggaagtgatcatctccgatgcccatgttttggttaaggaagctcccgggaattgtggtacagcagtcactaagacgccagtcgtcaaaagtggtgtgcagcctgaggtcactctggggacaactgacaatgacagtcctggagcagacgtaccaacaccatccgaggggacaagtacctccagtccactccctgctcctaaaaaacctacaggagctgacctgcttacccctgggtccagagctccagagcttaaaggcagagcacggggcaagccctcattactggctgcagcaagacccatgagagcaattttgccagccccagttaacgtggggcgaggcagcagcatgggactgcccagggccaggcaggccttttccctgagtgataagactccctctgtgaggacttgtggtctgaagccaagcacactgaagcagctgggccagcccattcaacagccatctggccctggtgaggtgaagctaccaagtggcccatccaacaggacttctcaggtgaaagttgtggaggtcaagcccgatatgtttcctccatataagtacagctgcactgtcacattggatttgggcctggctacatcaagaggccggggaaagtgcaagaatccctcttgtagctatgtctacaccaacaggcacaaacctcgaatttgtcccagctgtggtgttaaccttgccaaagaccggactgagaaaaccaccaaggctatcgaggtgagctcaccactcccagatgtactgaatgccacagagcccctgagcacagcccagagggagatccagcgccagtccacactgcagctgctgcgcaaagtcctgcagattcctgagaatgagtcagagctggctgaggtcttcgccttgattcatgaactcaacagctctcgacttatcttgtccaacgtgagtgaggagacagtcaccatcgagcaaacctcttggtcgaattattatgagtctccgtccacgcagtgccttctctgtagcagcccattattcaaagggggacaaaactccctggctgggccccaggagtgctggctgctgacagccagccgtctgcagacagtgactgcccaggtgaagatgtgtctgaacccccattgtctggccctgcacagcttcatagacatctacacaggtctctttaatgtggggaacaagctgctggtaagcctggacttgctttttgcaatcagaaatcagatcaagctcggagaggaccccagagtgtccatcaatgttgttctgaagtcggtgcaggagcagacagagaagactctgacctcggaggagctgagccagctgcaggagctgctgtgcaatggctattgggcctttgagtgcctcactgtccgagactacaatgacatgatctgtggcatctgtggtgtggcccccaaagtggaaatggctcagaggagtgaagagaatgtgctagcactgaagagcgtggagttcacctggcctgaattcctgggctctaatgaggtaaatgtggaggacttttgggccacgatggagacagaggtgattgagcaggtggcatttcctgccagcatccctatcaccaaatttgatgcgtctgttattgcccccttcttcccaccactcatgagaggagctgtggtcgtcaacactgagaaagacaaaaacctggatgtgcagccagtacctggcagtggcagtgccttggtgaggctgctccaggagggcacctgcaagcttgatgagattggctcctacagtgaagagaagctgcagcacctgctaaggcagtgtggaatcccctttggggcagaagactccaaggaccagctctgcttctccttgttggccctctacgaatctgtacagaatggagctagagctatacggcccccacgtcacttcacaggtggtaaaatctacaaggtgtgcccccatcaggtggtctgcggctccaagtatcttgtgcgaggtgagagtgcccgtgaccatgtggacctgcttgcctcttcccgccactggccgcctgtctatgtggtagatatggccacgtcagtggccctgtgtgctgacctctgctacccagagctgactaaccagatgtgggggaggaaccagggctgtttctctagccccacagagccacctgtgagtgtgtcctgcccagagctcttggaccagcattatactgtggacatgacagaaactgagcactctatccagcacccagtcaccaagactgccacgcggcgcatcgtccatgcaggcctacagcccaatcctggtgaccccagtgctgggcaccactccttggccctgtgccctgaattggcaccttacgcaaccatcctggcctccatcgtggacagcaaaccaaacggtgtccgccagcggcccattgccttcgacaatgccactcactattacctctacaaccgcctcatggacttcctcaccagccgcgaaattgtcaatcgtcagatccatgacattgtacagagctgccagcctggtgaggtggtcattcgtgacaccctctaccgccttggggttgctcagatcaagacagagacagaggaggagggtgaggaagaggaggtggccgcagtggcagaataagccaggctgttgtacagggactacaccatctctcaagccatagtaaggcccttgcctgaggcagagctatccaggggacctgcagaagtggtctcctgtggggagggcctctgactgctgggactgaccaaagagcttccattccctgagcatggtgggacccagggtcctcagttctcaaccctccaggggtcaggagtggtaccaggaaacctcttctggccccgagagagcacttgggggacacggtatgtttaatggaggggaggctgagggaaaggctcgtagctggtgggttccgtggggcctgcggtgtgggtcagggtggaggtcctgggtgggctaaggcgtgagccccagcactaggtgggaaggctgctgaggtctctcccacccctgaggagccctggtttcagccccctcagtctgatgaattgcttagcctgttgcctttgactaggggcctgggtggcctcattaactctaggggtccctttgggctcttgattctccctgaaggagggatgcatttctctcttgctcttcctgtacccacatttgggggaagctgaggagggaggaacagtcagccacagctctcttccagcactgtcctctccaccccaagctt

SEQ ID NO: 183577 - protein, 1080 aa, Artificial Sequence
  derived and/or modified sequence
MKGTRAIGSVPERSPAGVDLSLTGLPPPVSRRPGSAATTKPIVRSVSVVTGSEQKRKVLEATGPGGSQAINNLRRSNSTTQVSQPRSGSPRPTEPTDFLMLFEGSPSGKKRPASLSTAPSEKGATWNVLDDQPRGFTLPSNARSSSALDSPAGPRRKECTVALAPNFTANNRSNKGAVGNCVTTMVHNRYTPSERAPPLKSSNQTAPSLNNIIKAATCEGSESSGFGKLPKNVSSATHSARNNTGGSTGLPRRKEVTEEEAERFIHQVNQATVTIQRWYRHQVQRRGAGAARLEHLLQAKREEQRQRSGEGTLLDLHQQKEAARRKAREEKARQARRAAIQELQQKRALRAQKASTAERGPPENPRETRVPGMRQPAQELSPTPGGTAHQALKANNTGGGLPAAGPGDRCLPTSDSSPEPQQPPEDRTQDVLAQDAAGDNLEMMAPSRGSAKSRGPLEELLHTLQLLEKEPDVLPRPRTHHRGRYAWASEEDDASSLTADNLEKFGKLSAFPEPPEDGTLLSEAKLQSIMSFLDEMEKSGQDQLDSQQEGWVPEAGPGPLELGSEVSTSVMRLKLEVEEKKQAMLLLQRALAQQRDLTARRVKETEKALSRQLQRQREHYEATIQRHLAFIDQLIEDKKVLSEKCEAVVAELKQEDQRCTERVAQAQAQHELEIKKLKELMSATEKARREKWISEKTKKIKEVTVRGLEPEIQKLIARHKQEVRRLKSLHEAELLQSDERASQRCLRQAEELREQLEREKEALGQQERERARQRFQQHLEQEQWALQQQRQRLYSEVAEERERLGQQAARQRAELEELRQQLEESSSALTRALRAEFEKGREEQERRHQMELNTLKQQLELERQAWEAGRTRKEEAWLLNREQELREEIRKGRDKEIELVIHRLEADMALAKEESEKAAESRIKRLRDKYEAELSELEQSERKLQERCSELKGQLGEAEGENLRLQGLVRQKERALEDAQAVNEQLSSERSNLAQVIRQEFEDRLAASEEETRQAKAELATLQARQQLELEEVHRRVKTALARKEEAVSSLRTQHEAAVKRADHLEELLEQHRRPTPSTK

SEQ ID NO: 183578 - DNA, 3243 bp, Artificial Sequence
  derived and/or modified sequence
atgaaggggacacgagccatcggaagcgtgcccgagaggagcccagcaggggtagatctgagcctcacaggcctgcccccccccgtctccagacgccccgggtccgcagcgaccaccaagcccattgtgcgctctgtctcggtggtcactggttccgaacaaaaaaggaaggtgctcgaagctaccggcccaggtgggagccaggctattaacaacctgcgaaggtccaactccaccacacaggtaagccaaccaaggtcaggctctccacgccctactgagccaacagactttctgatgctctttgagggctccccttccggcaagaaaaggcctgcgtctcttagtacagccccaagcgaaaagggggcaacctggaacgtgcttgacgatcagcccagggggttcacgttgccctcaaacgctcggagttcctcagcgttagactcacctgctggaccccgaaggaaagagtgcacggtcgcactcgctccaaactttacagctaataataggagtaacaagggcgcggtgggcaactgtgttacaactatggtgcacaaccgctatacgccttccgaacgtgctcccccattgaagagtagcaaccagacggcaccttcccttaacaatataataaaagccgcaacatgcgaggggtccgagagctcgggctttggtaagctaccaaagaacgtgtcttcagccacccacagcgctagaaacaacacaggtggaagtaccggcctgcctcggagaaaggaagttactgaagaggaagctgaaagatttatccaccaggtcaatcaggccactgtgacaatccagcgatggtataggcatcaagttcaaaggaggggcgccggcgccgcaaggctggagcacctactgcaagcaaaacgagaggagcagcgccagaggagtggcgaaggcacccttctggacttacaccagcagaaagaggcggctcgccgtaaggcacgcgaggagaaagcaagacaggcgcggagagcggcaattcaggaattgcaacaaaagagggccctccgggcccaaaaggcttccaccgctgagagagggccccccgaaaatccgagagagacacgcgtgcctggtatgcgtcagccagcccaggagctatccccgacacctggcggaaccgcccaccaggcactgaaagctaacaacaccggcggggggcttcccgccgccgggcctggggatcgctgtctgcctaccagtgatagctcacccgaaccacaacagccacccgaagatagaacccaggacgtgctggcacaggacgccgccggcgataatttggagatgatggccccctcccggggctccgcaaagtccaggggcccacttgaggagctacttcacacgctgcagctcctggaaaaagagcctgatgtgctgcctagacctcgcacacaccaccggggtcgatatgcctgggcaagcgaggaggatgacgcatccagcctcactgccgataatcttgagaaattcggaaaactcagtgcattcccagagccccccgaggatggtaccttgctatccgaggcaaaactgcagagcataatgagcttcttagacgaaatggagaagtctggtcaggatcagctcgactcacagcaggaaggttgggttcccgaggccggaccaggcccgcttgagctgggatctgaggtgtccactagtgtcatgaggttaaagctggaagtcgaggagaaaaagcaggccatgctgcttctgcagcgtgccctggctcagcagagggacctcacggcccgcagggtgaaagagacagagaaggcacttagtcgtcaattacagcggcagcgggaacactatgaggctactatccagcgtcacttggcattcattgaccagttgattgaggacaaaaaagtgctgtccgagaaatgcgaagccgttgtcgccgagctgaaacaagaagatcaacgctgcactgagcgcgtagctcaagctcaggctcagcacgaactggagattaaaaagctgaaagagcttatgtccgcgaccgaaaaagcccgccgtgaaaaatggatctccgagaaaacgaagaagatcaaagaagttaccgttcgggggttggagcccgagatacaaaagctgatcgcaaggcacaaacaggaggtcaggcgccttaaaagtctgcacgaggcagaactgcttcaaagtgatgaaagggcttctcagcggtgtctgaggcaggctgaagaattgagggaacagctagaacgggaaaaagaggctttgggacagcaggagcgagagcgcgcccggcaacgcttccaacagcatcttgagcaagaacagtgggcgttgcagcagcaaagacagcgcctatatagcgaggtggccgaagagagggaacgcctgggacagcaggccgcacgccagagagcggagttggaagagctcagacagcaactggaggagtctagctccgccttgacaagagccctgcgggccgagttcgagaagggtcgtgaagaacaggagcgccgtcatcaaatggaacttaacacactgaaacagcagcttgaactggaaaggcaagcgtgggaggccggtaggacccgaaaagaagaagcctggctgctcaatagggaacaggagctgagggaggagattagaaaaggcagagacaaggagatcgaacttgttattcatagactggaagctgatatggcccttgctaaagaggagtctgagaaggcggccgagtctcgcatcaaacgtctcagggataagtatgaggcggaactctctgaactggagcagtcagagcggaaactccaggaaaggtgctccgagctcaaggggcaactgggagaggcggaaggcgagaacctgaggcttcaaggactggtccggcagaaagagcgggcgctggaggacgctcaggctgtgaatgagcaactctcatctgagcggtcaaacctggcccaggtaatcaggcaggaattcgaagacagactggcagcatctgaggaggagacaaggcaggcaaaagccgagctagcaaccctgcaagctcgtcaacagctagaattggaggaggtgcacagacgagtgaaaactgctctggctcgcaaggaagaagcagtcagctctttgcgcactcagcatgaggccgccgtgaagcgggcagaccatttggaggaactactggaacagcaccgtcggcccactccaagtactaagtag

SEQ ID NO: 183579 - DNA, 3243 bp, Artificial Sequence
  derived and/or modified sequence
atgaagggcacccgggccatcggctctgtgcctgagaggagccctgctggggtggacctgagcctgaccggcctgcccccacctgtgtccagaagacctggcagcgctgccaccaccaagcccatcgtgcgctctgtgtctgtggtgacaggcagcgagcagaagaggaaggtgctggaggccaccggccctgggggcagccaggccatcaacaacctgcggcgcagcaacagcaccacccaggtgtcccagcccaggagcggcagcccccggcccacagagcccacagacttcctgatgctgtttgagggcagccccagcggcaagaagaggcctgccagcctgagcacagcccccagcgagaagggggccacctggaatgtgctggatgaccagccccggggcttcaccctgcccagcaatgcccggagcagcagcgccctggacagccctgctggccccaggaggaaggagtgcaccgtggccctggcccccaacttcaccgccaacaacagaagcaacaagggagctgtgggcaactgtgtgaccaccatggtgcacaaccgctacaccccatctgagcgggccccacccctgaagagcagcaaccagacagcccccagcctgaacaacatcatcaaggccgccacctgtgagggcagcgagagcagcggctttgggaagctgcccaagaatgtgtcctctgccacccacagcgccaggaacaacacaggaggcagcacaggcctgcccaggaggaaggaggtgacagaggaggaggccgagcgcttcatccaccaggtgaaccaggccaccgtgaccatccagcgctggtaccgccaccaggtgcagaggagaggagctggggccgcccggctggagcacctgctgcaggccaagcgggaggagcagaggcagaggtctggagagggcaccctgctggacctgcaccagcagaaggaggccgcccggaggaaggcccgggaggagaaggcccggcaggcccggcgggccgccatccaggagctgcagcagaagagggccctgcgggcccagaaggccagcacagctgagcggggccccccagagaacccccgggagaccagggtgcccggcatgaggcagcctgcccaggagctgagccccacccctgggggcacagcccaccaggccctgaaggccaacaacacaggaggcggcctgcctgctgctggccctggggaccgctgcctgcccaccagtgacagcagccctgagccccagcagcccccagaggacaggacccaggatgtgctggcccaggatgctgctggggacaacctggagatgatggcccccagccggggcagcgccaagagccggggccccctggaggagctgctgcacaccctgcagctgctggagaaggagccagatgtgctgccccggcccaggacccaccaccggggccgctatgcctgggcctctgaagaagatgatgccagcagcctgacagctgacaacctggagaagtttgggaagctgagcgccttccctgagcccccagaagatggcaccctgctgtctgaggccaagctgcagagcatcatgtccttcctggatgagatggagaagagcggccaggaccagctggacagccagcaggagggctgggtgcctgaggccggccctggccccctggagctgggcagcgaggtgtccacctctgtgatgaggctgaagctggaggtggaggagaagaagcaggccatgctgctgctgcagagggccctggcccagcagagggacctgacagcccggcgggtgaaggagacagagaaggccctgagccggcagctgcagaggcagcgggagcactatgaggccaccatccagaggcacctggccttcatcgaccagctgattgaggacaagaaggtgctgtctgagaagtgtgaggccgtggtggccgagctgaagcaggaggaccagcgctgcacagagcgggtggcccaggcccaggcccagcacgagctggagatcaagaagctgaaggagctgatgtctgccacagagaaggcccggcgggagaagtggatcagcgagaagaccaagaagatcaaggaggtgacagtgcggggcctggagcctgagatccagaagctgattgcccggcacaagcaggaggtgcggcggctgaagagcctgcacgaggccgagctgctgcagagtgatgagcgggccagccagcgctgcctgcggcaggccgaggagctgcgggagcagctggagcgggagaaggaggccctgggccagcaggagcgggagcgggcccggcagcgcttccagcagcacctggagcaggagcagtgggccctgcagcagcagaggcagaggctgtacagcgaggtggccgaggagcgggagcggctgggccagcaggccgcccggcagagagctgagctggaggagctgcggcagcagctggaggagagcagcagcgccctgacccgggccctgcgggcagagtttgagaagggccgggaggagcaggagcggcggcaccagatggagctgaacaccctgaagcagcagctggagctggagcggcaggcctgggaggccggccgcaccaggaaggaggaggcctggctgctgaaccgggagcaggagctgcgggaggagatcaggaagggccgggacaaggagattgagctggtgatccaccggctggaggccgacatggccctggccaaggaggagagcgagaaggctgctgagagccgcatcaagaggctgcgggacaagtatgaggccgagctgtctgagctggagcagagcgagaggaagctgcaggagcgctgcagcgagctgaagggccagctgggggaggccgagggggagaacctgcggctgcagggcctggtgcggcagaaggagcgggccctggaggatgcccaggccgtgaatgagcagctgagcagcgagaggagcaacctggcccaggtgatccggcaggagtttgaggaccggctggccgccagcgaggaggagacccggcaggccaaggccgagctggccaccctgcaggcccggcagcagctggagctggaggaggtgcacagaagagtgaagacagccctggccaggaaggaggaggccgtgagcagcctgcggacccagcatgaagctgctgtgaagagagctgaccacctggaggagctgctggagcagcacagaagacccacccccagcaccaagtag

SEQ ID NO: 183580 - DNA, 3243 bp, Artificial Sequence
  derived and/or modified sequence
atgaagggcacccgggccatcggcagcgtgcccgagcggagccccgcaggcgtcgatctgtcactgaccgggcttccacccccggtgagcaggcggcccggttccgcggccactactaagccaattgtgcgaagcgtgagcgtggtgacagggtctgagcagaaacgtaaggtcctggaggcaacaggacctggaggctcccaggccatcaacaacttgcgaaggtctaatagcacgacccaggtgagtcagccaagatcaggctcaccaaggcccacggagccaacagacttcctgatgctcttcgagggttctccctcaggtaagaaacggccggcttccttgagcaccgccccttccgaaaagggtgccacctggaatgtactcgacgatcaacctcggggattcacactgccctccaacgcccggtccagctccgctctggactcgcccgcggggccgagaagaaaggaatgtaccgtggcattggctcccaattttaccgcaaataataggtccaataaaggggcagtgggcaattgtgtcaccaccatggtgcacaaccgctacactccatctgagagggcgcctcctctgaagagcagcaatcagaccgctcccagccttaataatatcattaaagcggccacttgtgaggggagtgagtccagcggatttggcaaactgcccaagaatgtttcctcggctacccatagcgccaggaacaacacaggcgggagcactggcctgcccaggaggaaagaagtaacagaagaggaagcggagaggtttattcatcaggtaaatcaggccaccgttactatccagcgatggtacagacaccaagtacagcgtagaggagcgggcgcagctagactggagcatctactgcaagccaagagagaggagcaacgacagaggagcggcgaaggaacactattagacctgcaccagcaaaaagaggccgctcgcagaaaagccagggaagagaaggcaaggcaggcccggagagccgctatccaggagctccagcagaagagggcactgcgcgctcagaaggcgagtacagctgagcgtgggccacctgaaaatcctcgcgagacacgcgtgcccgggatgcggcagccagcacaggagctcagtccaactcccggcggaacagctcatcaggctttaaaggcaaacaataccggcggtggcctgccagccgccggccctggggaccgctgccttcccacgtcagactccagccccgaaccccagcagccacccgaagatcgcacccaggacgtgctggcccaggacgcagctggcgacaacttggagatgatggctcctagccgtggctccgccaagtccaggggcccccttgaggagctgctccacacactacaactgcttgaaaaagaacccgatgttctgcccagaccccgaactcatcaccgcggccgttatgcttgggcttctgaggaggacgatgccagctctttgacagcggataacctggagaaattcggtaagctgagtgcgttccccgagccacctgaggacggaaccctgctgagcgaggctaagctgcagtcaatcatgagttttctggacgaaatggagaagtcgggacaggaccagctggatagccagcaggagggatgggtgcccgaggcagggcctggccctctggaactcggaagtgaagtgagcacttccgtgatgcgcctaaaactcgaggtggaagagaagaaacaagccatgttgcttctccagcgcgcgttggctcagcagcgggatttgaccgcacggagagtgaaggagaccgagaaagccctgtcgcgacagcttcagagacagcgggagcattacgaagccacaatacagcggcacctggcctttatcgatcagctcattgaagataaaaaggttctaagcgagaaatgcgaggctgtggtggcagaattgaagcaggaggaccagaggtgcacagagagggttgctcaggcccaggctcagcacgaactcgaaattaaaaaactcaaagagttgatgtctgcaaccgagaaggcccgaagggagaagtggatctccgagaaaaccaaaaaaattaaggaagtaaccgtcagaggcctcgagccggaaattcagaaattaattgctagacataaacaggaagtgcggagactgaagagccttcacgaggctgagctcctgcagagcgacgaacgtgccagccagcgttgcctccggcaggctgaggagctaagagaacagcttgaaagagagaaggaggctctgggccagcaagagagggagcgtgcaagacagcggtttcagcagcaccttgagcaggaacagtgggccttgcagcagcagagacaacggctctattccgaggtggctgaggagagggagcgactgggtcagcaggctgccaggcagagagcagagttagaggagctgcggcaacaattggaggaaagttctagcgcgctcacccgtgcactgcgggccgagttcgagaaaggacgtgaggaacaagagcggcgacaccagatggagctaaacaccctgaagcaacagctggagcttgaaagacaggcatgggaagccgggcgaactaggaaggaagaagcgtggctcttaaatcgggaacaggaactgagggaagagattaggaaggggagggacaaagaaatcgagctcgtcattcacagattggaagccgacatggcactggctaaggaagaaagcgagaaagctgccgaatctcgcatcaaaagattgcgagataagtatgaagcagaactctcggagctcgaacagagcgagcggaagcttcaagagcggtgctccgaacttaagggccagctgggcgaagcagaaggcgaaaacctccgtcttcagggtctcgtccgtcagaaggaaagggccttggaggatgctcaggctgttaacgagcagctctcctccgaacgaagcaacctggcccaggtcattcggcaggaattcgaagaccggctggcggctagcgaggaggaaacgcggcaggcaaaagccgaactggccaccttgcaggcaagacagcaacttgaattggaggaggttcataggcgggttaaaaccgctttggcccggaaggaggaggcagtatcgtctctgagaacccagcatgaggccgccgttaagcgtgccgatcatcttgaggaactgctggaacaacacagacggccgacaccttccacaaaatag

SEQ ID NO: 183581 - DNA, 3243 bp, Artificial Sequence
  derived and/or modified sequence
atgaaagggacaagggcgattggaagtgtccctgaaaggagtcctgccggagttgatctctccctcactggattaccacctccagtgagtagaagaccaggctcagccgcaaccacaaaacctattgtccgcagcgtctccgttgtcacaggtagcgagcagaagagaaaggtcctggaggctaccggccctggaggatcccaggcaattaacaatctgagacggtctaattcaacaactcaagtctctcaacctcggtccggctcaccgcgacctactgaacctaccgattttcttatgctgtttgagggatcaccatcagggaagaagcggccagccagcctgagcaccgccccatcggagaaaggagccacctggaatgtgttagacgaccaacccaggggctttacattaccctcgaacgccagatcttcctctgccctcgattcaccggctggccctcgcaggaaggaatgtacagtggccctcgccccaaactttaccgcgaataatcgctcgaacaaaggggctgttgggaattgcgtcactactatggtgcataatagatacaccccaagcgaacgtgcaccccctctcaagtcttccaatcagactgctccctccttaaataatattatcaaagctgccacttgcgaggggagcgagagcagtggctttggaaaactgcccaagaatgtatcttcagccacacatagtgcccgtaataatacagggggatcaacaggtctgcccagacggaaggaggtgaccgaagaggaagcggaaaggttcatccatcaagtgaaccaagcgactgtaactattcagagatggtatcgacaccaggtgcagaggcgtggggcaggggctgcaagactggaacacctactgcaagctaagagagaagagcaaaggcagagaagtggggagggaacgctactcgatttgcaccagcagaaggaagctgcgcgtaggaaagcgagggaggagaaagctcgccaggcgcgtcgcgcagcaatacaagaattgcagcagaagcgcgcactccgggctcagaaagccagtacagcggaacgcggtccacctgagaaccccagggagactagggtccctggcatgcgccagcccgcacaggagctctccccaaccccaggaggcacagcgcaccaggcattgaaggccaacaatacgggtgggggtttgccagctgcaggccctggggatagatgcctgccaacctccgacagtagtcccgaaccacaacaaccacctgaagaccgaacccaggatgtcttggcacaagacgctgccggtgataatctggaaatgatggccccttcgaggggatccgccaagtcacggggaccgctggaagaactactccatacactacaactgttggaaaaggaaccggacgtattacccagaccacgcacgcatcaccgcggtcggtacgcctgggcatcagaggaagacgatgcctctagccttaccgccgacaacctcgagaaattcggcaagctttctgccttccctgaaccccctgaggatgggaccctcctttccgaggcgaagctgcaatccattatgtcttttctggacgagatggagaagagcggacaggatcagctagatagccaacaggagggctgggttcctgaagcagggcctggcccacttgagctgggatccgaagtttcaacatccgtcatgcggctgaaactagaagtggaggagaagaaacaggctatgcttctgcttcagagagcattggctcaacaaagggatcttactgccagacgcgtgaaagaaacagaaaaggctctctctcggcagctgcagagacagcgtgaacattacgaggctaccatacaacgacatttggcgttcattgaccagctgattgaagataagaaagtactttccgaaaagtgtgaggccgtcgtggcagaattgaagcaggaggaccagcgctgcacggaacgggtggcccaggctcaggcccagcacgagctggaaattaaaaagcttaaggaactcatgagtgctaccgagaaggctcggagagagaaatggatcagcgaaaagaccaagaaaattaaagaagttactgttagggggctggagcccgagatccagaagctgattgcaagacacaagcaagaagtcagaagactgaagagtctccacgaagccgagcttctgcagagcgacgaaagagccagtcagcgctgcctgcggcaggcggaggagctgagagagcagctcgaaagggagaaggaggcacttggacagcaggagagagaaagagctagacagcggttccagcagcatctggagcaggagcaatgggctctgcaacagcagagacagagactatatagcgaggtcgccgaagagagggaaaggcttggccagcaggctgcgcgacagcgcgctgagctggaagagctgcgccagcaattggaagaatcaagtagcgccctcacccgggcactgcgcgctgagttcgagaaaggcagggaggagcaggagaggcggcaccaaatggaactgaacacgctgaagcagcagctggaactggagcggcaagcctgggaagccggaaggaccaggaaggaagaggcctggctgctgaacagagagcaagaactgagggaagagattagaaaaggcagagataaggagatcgaactggttatccacaggctggaagcagacatggccttggccaaggaagagtcagagaaggctgcagaatctcgcattaagaggctacgggataagtacgaagctgagctgagcgagctcgagcagagtgaaaggaagttgcaagaacggtgttctgagctgaaaggacagctgggggaagcagaaggcgagaatctgcggttgcaaggcctggtcagacagaaagaaagggcgttggaggatgcccaggccgtcaatgaacagcttagcagcgagcgatccaatctggcccaggtcattcgacaggaatttgaagaccgcctcgccgcatctgaggaggaaacacggcaggcaaaggcggagctcgccacattacaggctcgccaacaactcgagctagaggaagttcaccgtcgggtgaagaccgctcttgcacggaaagaggaagcggtgtcatcccttcggacacagcatgaggcagccgtgaagcgggctgaccacttagaagagcttctagagcaacatcggagacctactcctagtacgaagtag

SEQ ID NO: 183582 - DNA, 3619 bp, Artificial Sequence
  derived and/or modified sequence
ctcaccccggccgtccggccgcttcattgtcaccgggcctcggggcagtgttgggggtggcggggcgccaggtcgccgacccgaggtttgggcgcgactggttccgcatcccctccccgccggccgaatctgcaggccccgcgcgccaggcaggcttcgcggctgcgcccccggcccgcgcaggacctgccttgtccaccatgaaaggcacccgggccatcggcagcgtcccggagcgcagcccagcaggtgtggacctgagtctgacaggtctccctccgcctgtgtcccggcgtcctggcagtgccgccaccaccaagcccatcgtccgctctgtctccgtggtcacaggcagcgagcagaagaggaaggtgctggaggccacagggcctgggggctcccaggccatcaacaaccttagaagatccaacagcaccacgcaggtcagccagcctcggagcggctcccccaggccaacggagcccacagacttcctgatgctcttcgagggcagccccagtgggaaaaagaggcctgccagcctgagcacagcccccagcgagaagggagccacctggaacgtcctggatgaccagccccggggcttcaccttgccatccaatgcccggagttccagtgcccttgactcaccagcgggcccgcggaggaaagaatgcaccgtggccctggcccccaacttcactgctaacaacaggagcaacaagggagcagtgggcaactgcgtcaccaccatggtgcacaaccgctacaccccctcggagagggcgcctccgctcaagagctccaaccagactgccccctccctcaacaacatcatcaaggcagccacctgtgagggcagtgagagcagcggctttgggaagctgccgaagaatgtctccagtgccacccactcagcccggaacaatactgggggcagcacgggcttgcccaggcggaaggaggtgacggaggaggaggctgagaggtttatccaccaggtgaaccaggccactgtcaccatccagcgctggtaccggcaccaggtgcagcggcgcggagcaggagctgcccgcctggagcacttgcttcaggccaagcgggaggagcagcggcagcggtcaggcgaggggaccctcttggacctgcaccagcagaaagaggcagccaggaggaaggcccgggaggagaaggcacgccaagccaggcgagcagccattcaggagctgcaacagaaacgagccctgagagcccagaaggcgagcactgccgagcgtgggccacctgagaatcccagggagaccagagtgccaggaatgcggcagcctgctcaggagctgtcccccacaccaggcggcactgcccaccaggccctcaaggccaacaatactggtggtggcctccctgctgcaggccccggagaccgctgcctgcccacctccgactcatccccagaaccacagcagcctccagaggacaggacgcaggacgttcttgcccaggatgcagctggggacaacctggagatgatggccccgagcagggggagcgccaagtccagggggccactggaggagctgctgcacacactgcagctgctggagaaggagccggacgtgctgccccgccccaggacccatcacaggggcagatacgcctgggccagcgaggaggatgacgccagctctctgacagctgacaacttggagaaatttggaaaactcagtgcgttccccgaacctcctgaggatgggacgctgctatcggaggccaagctacaaagcatcatgagcttcttggacgagatggagaagtctgggcaggaccagctggactcccagcaggaggggtgggtgccggaggcggggccggggcccctggagctggggtccgaggtgagcacgtctgtgatgcggctgaagctggaggtggaggagaagaagcaggccatgctgctgctgcagagagcgctggcgcagcagcgagacctcacggcccggcgggtcaaggagacagagaaggcgctgagccggcagctgcagcggcagagggagcactacgaggccaccatccagcggcacttggccttcattgaccagctgattgaggacaagaaggtcctgagtgaaaagtgcgaggctgtggtggccgagctgaagcaggaggaccagagatgcaccgagcgtgtggcccaggcacaggcgcagcacgagctggagattaaaaaactcaaagaattaatgagcgccaccgagaaagcccgccgggagaagtggatcagtgagaaaaccaagaagatcaaggaggtcactgtccgaggtctggagcccgagatccagaagctgattgcaaggcacaagcaggaagtgcggaggctcaagagcctgcacgaggcggagctgctgcagtcggatgagcgggcctcgcagcgctgcctgcgccaggccgaggagctgcgggagcagctggagcgggagaaggaggcgctgggccagcaggagcgcgaacgtgctcggcagcggttccagcagcacctggagcaggagcagtgggcgctgcagcagcaacggcagcggctgtacagtgaggtggctgaggagagggagcggctgggccagcaggcagccaggcagcgggcggagctggaagagctgaggcagcagctggaggagagcagctctgcactgacccgagccctgagggctgagtttgagaagggcagggaggagcaggagcgccggcaccagatggagctgaataccctgaagcagcagctggagctggagaggcaggcgtgggaggccggccgcaccaggaaggaggaggcgtggctgctgaaccgggaacaggagctgagggaagaaatccggaaaggccgggacaaggagattgagctggtcattcaccggctggaggccgacatggcgctggccaaggaggagagtgagaaggctgccgagagccgcatcaagcgcttacgggacaagtacgaggccgagctctccgagctggagcagtcggagcggaagcttcaggagcggtgctcggagctgaagggccagcttggggaggccgagggcgagaatctgcgtctgcagggccttgtgcggcagaaggagcgggcgctggaggatgcgcaggcggtgaacgagcagctttctagcgagcgcagcaacctggcccaggtgatccgccaggagttcgaggaccggctggcagcctctgaggaggagacgcggcaggccaaggccgagctggccacgctgcaggcccgccagcagctggagctggaggaggtgcaccggagggtgaagacagccctcgcgaggaaggaggaggccgtgagcagcctccggacacaacatgaggctgcggtgaagcgggccgaccacctggaggagctgctggagcagcacaggaggcccacgccaagtaccaagtgaccagggatgccgggaacactgtcgaagaacggaaggcagaggacagaggctggacgtgggcccagaggcccacagggacgcccacctgccccccacagaggctggtggttgagatgcccacggctaagcacctgtggctgcattttaacagtaaaggaggccgttgttttcagcgc

SEQ ID NO: 183583 - DNA, 3243 bp, Artificial Sequence
  derived and/or modified sequence
atgaagggcaccagagccatcggcagcgtgcccgagagaagccccgccggcgtggacctgagcctgaccggcctgcccccccccgtgagcagaagacccggcagcgccgccaccaccaagcccatcgtgagaagcgtgagcgtggtgaccggcagcgagcagaagagaaaggtgctggaggccaccggccccggcggcagccaggccatcaacaacctgagaagaagcaacagcaccacccaggtgagccagcccagaagcggcagccccagacccaccgagcccaccgacttcctgatgctgttcgagggcagccccagcggcaagaagagacccgccagcctgagcaccgcccccagcgagaagggcgccacctggaacgtgctggacgaccagcccagaggcttcaccctgcccagcaacgccagaagcagcagcgccctggacagccccgccggccccagaagaaaggagtgcaccgtggccctggcccccaacttcaccgccaacaacagaagcaacaagggcgccgtgggcaactgcgtgaccaccatggtgcacaacagatacacccccagcgagagagccccccccctgaagagcagcaaccagaccgcccccagcctgaacaacatcatcaaggccgccacctgcgagggcagcgagagcagcggcttcggcaagctgcccaagaacgtgagcagcgccacccacagcgccagaaacaacaccggcggcagcaccggcctgcccagaagaaaggaggtgaccgaggaggaggccgagagattcatccaccaggtgaaccaggccaccgtgaccatccagagatggtacagacaccaggtgcagagaagaggcgccggcgccgccagactggagcacctgctgcaggccaagagagaggagcagagacagagaagcggcgagggcaccctgctggacctgcaccagcagaaggaggccgccagaagaaaggccagagaggagaaggccagacaggccagaagagccgccatccaggagctgcagcagaagagagccctgagagcccagaaggccagcaccgccgagagaggcccccccgagaaccccagagagaccagagtgcccggcatgagacagcccgcccaggagctgagccccacccccggcggcaccgcccaccaggccctgaaggccaacaacaccggcggcggcctgcccgccgccggccccggcgacagatgcctgcccaccagcgacagcagccccgagccccagcagccccccgaggacagaacccaggacgtgctggcccaggacgccgccggcgacaacctggagatgatggcccccagcagaggcagcgccaagagcagaggccccctggaggagctgctgcacaccctgcagctgctggagaaggagcccgacgtgctgcccagacccagaacccaccacagaggcagatacgcctgggccagcgaggaggacgacgccagcagcctgaccgccgacaacctggagaagttcggcaagctgagcgccttccccgagccccccgaggacggcaccctgctgagcgaggccaagctgcagagcatcatgagcttcctggacgagatggagaagagcggccaggaccagctggacagccagcaggagggctgggtgcccgaggccggccccggccccctggagctgggcagcgaggtgagcaccagcgtgatgagactgaagctggaggtggaggagaagaagcaggccatgctgctgctgcagagagccctggcccagcagagagacctgaccgccagaagagtgaaggagaccgagaaggccctgagcagacagctgcagagacagagagagcactacgaggccaccatccagagacacctggccttcatcgaccagctgatcgaggacaagaaggtgctgagcgagaagtgcgaggccgtggtggccgagctgaagcaggaggaccagagatgcaccgagagagtggcccaggcccaggcccagcacgagctggagatcaagaagctgaaggagctgatgagcgccaccgagaaggccagaagagagaagtggatcagcgagaagaccaagaagatcaaggaggtgaccgtgagaggcctggagcccgagatccagaagctgatcgccagacacaagcaggaggtgagaagactgaagagcctgcacgaggccgagctgctgcagagcgacgagagagccagccagagatgcctgagacaggccgaggagctgagagagcagctggagagagagaaggaggccctgggccagcaggagagagagagagccagacagagattccagcagcacctggagcaggagcagtgggccctgcagcagcagagacagagactgtacagcgaggtggccgaggagagagagagactgggccagcaggccgccagacagagagccgagctggaggagctgagacagcagctggaggagagcagcagcgccctgaccagagccctgagagccgagttcgagaagggcagagaggagcaggagagaagacaccagatggagctgaacaccctgaagcagcagctggagctggagagacaggcctgggaggccggcagaaccagaaaggaggaggcctggctgctgaacagagagcaggagctgagagaggagatcagaaagggcagagacaaggagatcgagctggtgatccacagactggaggccgacatggccctggccaaggaggagagcgagaaggccgccgagagcagaatcaagagactgagagacaagtacgaggccgagctgagcgagctggagcagagcgagagaaagctgcaggagagatgcagcgagctgaagggccagctgggcgaggccgagggcgagaacctgagactgcagggcctggtgagacagaaggagagagccctggaggacgcccaggccgtgaacgagcagctgagcagcgagagaagcaacctggcccaggtgatcagacaggagttcgaggacagactggccgccagcgaggaggagaccagacaggccaaggccgagctggccaccctgcaggccagacagcagctggagctggaggaggtgcacagaagagtgaagaccgccctggccagaaaggaggaggccgtgagcagcctgagaacccagcacgaggccgccgtgaagagagccgaccacctggaggagctgctggagcagcacagaagacccacccccagcaccaagtag

SEQ ID NO: 183584 - protein, 1654 aa, Artificial Sequence
  derived and/or modified sequence
MSLDFGSVALPVQNEDEEYDEEDYEREKELQQLLTDLPHDMLDDDLSSPELQYSDCSEDGTDGQPHHPEQLEMSWNEQMLPKSQSVNGYNEIQSLYAGEKCGNVWEENRSKTEDRHPVYHPEEGGDEGGSGYSPPSKCEQTDLYHLPENFRPYTNGQKQEFNNQATNVIKFSDPQWNHFQGPSCQGLEPYNKVTYKPYQSSAQNNGSPAQEITGSDTFEGLQQQFLGANENSAENMQIIQLQVLNKAKERQLENLIEKLNESERQIRYLNHQLVIIKDEKDGLTLSLRESQKLFQNGKEREIQLEAQIKALETQIQALKVNEEQMIKKSRTTEMALESLKQQLVDLHHSESLQRAREQHESIVMGLTKKYEEQVLSLQKNLDATVTALKEQEDICSRLKDHVKQLERNQEAIKLEKTEIINKLTRSLEESQKQCAHLLQSGSVQEVAQLQFQLQQAQKAHAMSANMNKALQEELTELKDEISLYESAAKLGIHPSDSEGELNIELTESYVDLGIKKVNWKKSKVTSIVQEEDPNEELSKDEFILKLKAEVQRLLGSNSMKRHLVSQLQNDLKDCHKKIEDLHQVKKDEKSIEVETKTDTSEKPKNQLWPESSTSDVVRDDILLLKNEIQVLQQQNQELKETEGKLRNTNQDLCNQMRQMVQDFDHDKQEAVDRCERTYQQHHEAMKTQIRESLLAKHALEKQQLFEAYERTHLQLRSELDKLNKEVTAVQECYLEVCREKDNLELTLRKTTEKEQQTQEKIKEKLIQQLEKEWQSKLDQTIKAMKKKTLDCGSQTDQVTTSDVISKKEMAIMIEEQKCTIQQNLEQEKDIAIKGAMKKLEIELELKHCENITKQVEIAVQNAHQRWLGELPELAEYQALVKAEQKKWEEQHEVSVNKRISFAVSEAKEKWKSELENMRKNILPGKELEEKIHSLQKELELKNEEVPVVIRAELAKARSEWNKEKQEEIHRIQEQNEQDYRQFLDDHRNKINEVLAAAKEDFMKQKTELLLQKETELQTCLDQSRREWTMQEAKRIQLEIYQYEEDILTVLGVLLSDTQKEHISDSEDKQLLEIMSTCSSKWMSVQYFEKLKGCIQKAFQDTLPLLVENADPEWKKRNMAELSKDSASQGTGQGDPGPAAGHHAQPLALQATEAEAEENNKVVEELIEENNDMKNKLEELQTLCKTPPRSLSAGAIENACLPCSGGALEELRGQYIKAVKKIKCDMLRYIQESKERAAEMVKAEVLRERQETARKMRKYYLICLQQILQDDGKEGAEKKIMNAASKLATMAKLLETPISSKSQSKTTQSALPLTSEMLIAVKKSKRNDVNQKIPCCIESKSNSVNTITRTLCEQAPKRRAACNLQRLLENSEHQSIKHVGSKETHLEFQFGDGSCKHLNSLPRNVSPEFVPCEGEGGFGLHKKKDLLSDNGSESLPHSAAYPFLGTLGNKPSPRCTPGPSESGCMHITFRDSNERLGLKVYKCNPLMESENAASEKSQGLDVQEPPVKDGGDLSDCLGWPSSSATLSFDSREASFVHGRPQGTLEIPSESVKSKQFSPSGYLSDTEESNMICQTMKCQRYQTPYLSEETTYLEPGKISVNCGHPSRHKADRLKSDFKKLSSTLPSSVCQQPSRKLIVPLSSQQDSGFDSPFVNLD

SEQ ID NO: 183585 - DNA, 4965 bp, Artificial Sequence
  derived and/or modified sequence
atgtccttggacttcggctctgtcgcactcccagtgcagaacgaagacgaggaatacgatgaagaagactatgaacgtgaaaaagagctccagcaactgttaactgaccttcctcacgatatgctggacgatgacctcagctctcctgaactccagtattctgattgcagcgaagacgggactgatggacagccccaccatcccgagcaactcgaaatgtcctggaacgaacaaatgctgccgaagtcgcaaagcgtgaatggatataacgaaattcagagcctctacgcgggcgagaagtgcggtaacgtgtgggaagaaaacaggtctaagaccgaagacagacatcccgtgtaccatcctgaggaaggtggagatgagggagggtctgggtattcccccccaagcaagtgtgagcagaccgacctgtatcatctccctgaaaactttaggccctatactaatggacagaaacaggagtttaacaaccaagcgacaaacgtaatcaaatttagcgaccctcaatggaaccacttccagggaccttcttgtcaaggcctggagccttacaacaaagttacatacaaaccttatcagtctagcgcacaaaataatggctctcctgctcaggaaatcactgggtcagatactttcgagggccttcagcaacaattcttgggggccaatgagaattccgctgagaacatgcagataatccaattacaggttctgaacaaggctaaagagcgacagttggaaaatttgattgagaaacttaacgaatctgaacgccaaattcgctacctcaaccaccagctggtcataataaaggacgaaaaagacgggttgacactctctcttcgggagtcacagaagctgttccagaacggcaaagaacgtgaaatccagctggaggcccagataaaagcgctggaaacacaaattcaggctctgaaagtgaacgaagagcagatgatcaagaaaagccgcacaactgagatggctctggagagcttaaaacaacaactcgttgatttacaccacagcgaatctcttcagagggcaagggagcagcatgagtcaattgtcatgggattgactaagaagtatgaagagcaggtgttatctctacagaaaaatctagacgcgaccgtgacagctctaaaggagcaggaggatatttgttctcgacttaaggatcacgttaagcagctggagcgaaaccaagaagcaataaagttggaaaagactgaaataatcaataagctgacccgctccttggaagaaagtcagaaacagtgtgcacatcttctgcaatccggcagtgtccaggaggtggcccagctgcagtttcaactgcagcaagcacagaaggctcatgccatgagcgctaacatgaataaggctctccaggaagagttgacagaattaaaggatgagattagtctgtatgagtcggccgcgaaactcgggatacaccctagcgactcagagggagagctgaacattgaattaacggagtcgtacgtggacctgggcatcaagaaggttaattggaaaaagtcaaaggtcactagtatagttcaggaagaggaccccaacgaagagttgtcaaaagacgaatttatccttaaacttaaggcagaggtccagcgcctcctgggctctaatagtatgaagcgccacctggtttctcagctccagaacgatcttaaggattgccataagaagatcgaagacctacaccaggtaaaaaaggacgagaaatcaatagaagtcgaaacaaagactgatactagcgagaagccaaagaaccagctgtggcctgaatcatcaaccagcgacgtggttcgggatgacatcctattgctaaagaatgagattcaggtgctgcagcagcaaaatcaggagttgaaagagacagaagggaagctccggaataccaaccaagacctctgtaaccagatgagacaaatggtccaggatttcgaccatgataaacaggaagccgtggatcgatgtgagcgtacctatcagcagcatcatgaggccatgaaaacacaaattcgcgagtctctgctggctaaacacgctctcgagaagcagcagctgttcgaggcctacgaacgcacacacctgcagttacgcagcgagctagacaaacttaacaaggaagtcactgcagtgcaggagtgctatctggaagtgtgtagggagaaagacaacctcgagctaacattgagaaaaaccaccgaaaaagagcagcagacgcaggaaaagatcaaggagaaactgatacagcagctagagaaggaatggcagtctaaactggaccagactatcaaagccatgaaaaaaaagacattagactgcggcagccaaacggaccaagtcactacatccgatgtcatctctaagaaggagatggccatcatgatcgaagagcaaaaatgtacgattcagcagaacctggagcaggaaaaagacattgccattaagggagcaatgaagaagctcgaaatcgagttagagttgaaacattgcgagaacattacgaaacaggtggaaatcgctgtgcagaacgcccaccagaggtggttgggcgaattaccagaactagccgagtatcaagctttggtgaaagccgaacagaagaagtgggaggagcagcatgaggtgagcgtaaataaacgcatcagcttcgccgtctccgaagcaaaggagaagtggaagtccgaacttgagaacatgaggaagaacattttgcccggcaaggagctggaagaaaaaatccattcccttcagaaggaactggagttgaaaaatgaggaagtgccggtggtgattcgagccgagcttgctaaagccaggagcgagtggaataaggagaagcaggaagaaattcaccgcatccaggaacagaacgagcaagactatagacagttccttgacgaccataggaataaaatcaacgaggtcctcgctgcagcaaaggaggactttatgaagcagaagacagagctgctgctccagaaagagaccgagctgcagacctgtcttgatcagtctcgtcgggagtggacgatgcaggaggcgaagcggattcagttagagatttatcagtacgaggaggacattctgacggtactgggggtgcttctgtctgacactcagaaagaacacatcagcgacagcgaagataagcagttactggaaattatgtcgacttgcagctccaaatggatgtccgtgcaatattttgagaagctgaaaggctgcatccaaaaggcctttcaagatacgctgccactgctggtggagaatgccgacccagaatggaagaaacgcaatatggccgaactgagcaaggattctgcaagccagggcactggacagggagatccagggcctgctgcagggcaccacgctcagcccctggctcttcaggctaccgaggccgaagcagaggagaacaataaagtggtcgaagaactaatcgaggaaaacaatgatatgaaaaataagctagaagagctacagacgctgtgcaaaaccccgccaaggtcactgagcgccggagccatcgagaatgcgtgccttccatgctcaggcggcgcactggaggaacttcgaggccagtacatcaaagctgtaaagaagattaagtgcgacatgctccggtacatccaagagagcaaggaacgcgcggccgaaatggttaaggccgaggtcctgcgcgagcgtcaagaaacggcacgaaagatgagaaagtattatctaatatgtctgcagcagatcctgcaggacgatggaaaagaaggcgctgagaagaagataatgaacgcagcctccaagctcgccaccatggctaagctgctggagacacccatcagctctaaaagccaaagtaagacgacccagagtgcactccctctgacaagtgaaatgctaattgctgtcaagaagtctaagcgcaacgatgtcaatcagaaaatcccttgttgtattgagtccaaatctaattctgtgaacactatcactaggacactgtgcgaacaggcacctaagcgaagggcagcgtgcaatctccagcgcctgctggagaactccgaacaccaatcaattaagcatgtcggatctaaagagacccatctcgagttccagttcggagacggatcatgtaaacacctgaattctttgccacgcaacgtgtctccagagttcgtgccttgcgagggcgagggcgggtttggcctccataagaagaaagacctgctctctgataacggcagtgagtctttgccacattctgctgcctatccctttctcggcaccctcgggaataaacccagtcccaggtgtacccctgggccgagcgagtccggctgtatgcacataacctttcgagactcgaacgagcggctgggactgaaagtgtacaagtgtaaccccctcatggagtctgaaaacgcggctagtgagaagagtcagggactggacgtgcaggaacctcctgtgaaggacgggggagatctctctgactgcctgggttggccgtcttcctcagccacactgtcctttgatagccgcgaggcaagctttgtgcacggccgccctcagggaactctagagattccatcggaatccgtgaagtcaaagcagttttcaccatccggatacctaagcgatactgaagaatctaatatgatctgccagacaatgaagtgccagaggtatcagacaccttatttgtcagaggagacaacttatctcgaaccgggaaaaatctccgtgaattgcgggcatcctagcaggcacaaagccgatagactcaagagcgatttcaaaaagctctcctctacgcttccgtccagtgtttgccagcaaccttcacgcaagctgatagttcccttgtcctctcagcaggacagcggctttgactccccatttgtcaacctggattag

SEQ ID NO: 183586 - DNA, 4965 bp, Artificial Sequence
  derived and/or modified sequence
atgagcctggactttggatctgtggccctgcctgtgcagaatgaagatgaggagtatgatgaggaggactatgaaagagagaaggagctgcagcagctgctgacagacctgccccatgacatgctggatgatgacctgagcagccctgagctgcagtacagcgactgcagtgaagatggaacagatggccagccccaccaccctgagcagctggagatgtcctggaatgagcagatgctgcccaagagccagagcgtgaatggctacaatgagatccagagcctgtatgctggggagaagtgtggaaatgtgtgggaggagaacagaagcaagacagaagatagacaccctgtgtaccaccctgaggagggcggagatgagggcggcagcggctacagcccccccagcaaatgtgagcagacagacctgtaccacctgcctgagaacttccggccctacaccaacggccagaagcaggagttcaacaaccaggccaccaacgtcatcaagttcagtgacccccagtggaaccacttccagggccccagctgccagggcctggagccctacaacaaggtgacctacaagccctaccagagcagcgcccagaacaacggcagccctgcccaggagatcactggaagtgacacctttgagggcctgcagcagcagttcctgggcgccaatgaaaacagcgctgagaacatgcagatcatccagctgcaggtgctgaacaaggccaaggagcggcagctggagaacctgattgagaagctgaatgaaagtgagcggcagatccgctacctgaaccaccagctggtgatcatcaaggatgagaaggatggcctgaccctgagcctgcgggagagccagaagctgttccagaatggcaaggagcgggagatccagctggaggcccagatcaaggccctggagacccagatccaggccctgaaggtgaatgaggagcagatgatcaagaagagcaggaccacagagatggccctggagagcctgaagcagcagctggtggacctgcaccacagcgagagcctgcagagggcccgggagcagcacgagagcatcgtgatgggcctgaccaagaagtatgaggagcaggtgctgagcctgcagaagaacctggatgccaccgtgacagccctgaaggagcaggaggacatctgcagccggctgaaggaccacgtgaagcagctggagaggaaccaggaggccatcaagctggagaagacagagatcatcaacaagctgaccaggagcctggaggagagccagaagcagtgtgcccacctgctgcagagcggctctgtgcaggaggtggcccagctgcagttccagctgcagcaggcccagaaggcccacgccatgtctgccaacatgaacaaggccctgcaggaggagctgacagagctgaaggatgagatcagcctgtatgagagcgctgccaagctgggcatccaccccagcgacagcgagggggagctgaacatcgagctgacagagagctatgtggacctgggcatcaagaaggtgaactggaagaagagcaaggtgaccagcatcgtgcaggaggaggaccccaatgaggagctgagcaaggatgagttcatcctgaagctgaaggccgaggtgcagaggctgctgggcagcaacagcatgaagaggcacctggtgtcccagctgcagaatgacctgaaggactgccacaagaagattgaggacctgcaccaggtgaagaaggatgagaagagcattgaggtggagaccaagacagacaccagcgagaagcccaagaaccagctgtggccagagagcagcaccagtgatgtggtgagagatgacatcctgctgctgaagaatgagatccaggtgctgcagcagcagaaccaggagctgaaggagacagagggcaagctgaggaacaccaaccaggacctgtgcaaccagatgaggcagatggtgcaggactttgaccatgacaagcaggaggccgtggacagatgtgagaggacctaccagcagcaccacgaggccatgaagacccagatccgggagagcctgctggccaagcacgccctggagaagcagcagctgtttgaggcctatgaaagaacccacctgcagctgcggtctgagctggacaagctgaacaaggaggtgacagctgtgcaggagtgctacctggaggtgtgccgggagaaggacaacctggagctgaccctgaggaagaccacagagaaggagcagcagacccaggagaagatcaaggagaagctgatccagcagctggagaaggagtggcagagcaagctggaccagaccatcaaggccatgaagaagaagaccctggactgtggcagccagacagaccaggtgaccaccagtgatgtgatcagcaagaaggagatggccatcatgattgaggagcagaagtgcaccatccagcagaacctggagcaggagaaggacatcgccatcaagggggccatgaagaagctggagattgagctggagctgaagcactgtgagaacatcaccaagcaggtggagattgctgtgcagaatgcccaccagcgctggctgggggagctgcctgagctggccgagtaccaggccctggtgaaggccgagcagaagaagtgggaggagcagcacgaggtgtctgtgaacaagaggatcagctttgctgtgtctgaggccaaggagaagtggaagtctgagctggagaacatgaggaagaacatcctgcccgggaaggagctggaggagaagatccacagcctgcagaaggagctggagctgaagaatgaggaggtgcctgtggtgatccgggcagagctggccaaggcccggtctgagtggaacaaggagaagcaggaggagatccaccgcatccaggagcagaatgagcaggactaccggcagttcctggatgaccacaggaacaagatcaatgaggtgctggccgccgccaaggaggacttcatgaagcagaagacagagctgctgctgcagaaggagacagagctgcagacctgcctggaccagagccggcgggagtggaccatgcaggaggccaagaggatccagctggagatctaccagtatgaggaggacatcctgactgtgctgggcgtgctgctgagtgacacccagaaggagcacatcagtgacagcgaggacaagcagctgctggagatcatgagcacctgcagcagcaagtggatgtctgtgcagtactttgagaagctgaagggctgcatccagaaggccttccaggacaccctgcccctgctggtggagaatgctgaccctgagtggaagaagaggaacatggccgagctgagcaaggacagcgccagccagggcaccggccagggcgaccccggccctgctgctggccaccacgcccagcccctggccctgcaggccacagaagctgaggccgaggagaacaacaaggtggtggaggagctgattgaggagaacaatgacatgaagaacaagctggaggagctgcagaccctgtgcaagaccccacccaggagcctgtctgctggggccattgaaaatgcctgcctgccctgcagcggcggggccctggaggagctgcggggccagtacatcaaggctgtgaagaagatcaagtgtgacatgctgcgctacatccaggagagcaaggagagagctgctgagatggtgaaggccgaggtgctgcgggagcggcaggagacagccaggaagatgaggaagtactacctgatctgcctgcagcagatcctgcaggatgatggcaaggagggcgctgagaagaagatcatgaatgctgccagcaagctggccaccatggccaagctgctggagacccccatcagcagcaagagccagagcaagaccacccagagcgccctgcccctgaccagcgagatgctgattgctgtgaagaagagcaagagaaatgatgtgaaccagaagatcccctgctgcatcgagagcaagagcaacagcgtgaacaccatcaccaggaccctgtgtgagcaggcccccaagagaagagctgcctgcaacctgcagaggctgctggagaacagcgagcaccagagcatcaagcacgtgggcagcaaggagacccacctggagttccagtttggagatggcagctgcaagcacctgaacagcctgcccagaaatgtgtccccagagtttgtgccctgtgagggggagggcggcttcggcctgcacaagaagaaggacctgctgagtgacaatggaagtgagagcctgccccacagcgctgcctaccccttcctgggcaccctgggcaacaagcccagcccccgctgcaccccaggccccagcgagagcggctgcatgcacatcaccttccgggacagcaatgaaaggctgggcctgaaggtgtacaagtgcaaccccctgatggagagtgaaaatgctgccagcgagaagagccagggcctggatgtgcaggagccccctgtgaaggatggaggagacctgagtgactgcctgggctggcccagcagcagcgccaccctgagctttgacagccgggaggccagctttgtgcacggccggccccagggcaccctggagatccccagcgagagcgtgaagagcaagcagttcagccccagcggctacctgagtgacacagaggagagcaacatgatctgccagaccatgaagtgccagcgctaccagaccccctacctgtctgaggagaccacctacctggagcccgggaagatctctgtgaactgtggccaccccagccgccacaaggctgaccggctgaagagtgacttcaagaagctgagcagcaccctgcccagctctgtgtgccagcagcccagcaggaagctgattgtgcccctgagcagccagcaggacagcggctttgacagcccctttgtgaacctggactag

SEQ ID NO: 183587 - DNA, 4965 bp, Artificial Sequence
  derived and/or modified sequence
atgagcctggacttcggcagcgtggccctgcccgtgcagaacgaggacgaggagtacgacgaagaggattacgagagagagaaggaactccagcagttacttactgatttaccccatgatatgttggatgatgatctgtcaagccccgaactccagtactctgactgttccgaagacgggacggacggacagccacaccaccctgaacagctcgagatgtcctggaacgagcagatgctgcccaaaagccagtccgtgaatggctataacgagatccagtccctgtatgctggagaaaagtgtggaaacgtgtgggaagagaatcgctccaagaccgaggaccgccatccagtctatcacccggaggaggggggcgatgaggggggctccggttactctccgccaagtaagtgtgagcagactgatttataccatctccctgagaactttaggccatacacgaatggccaaaaacaggaattcaataaccaggcaacgaacgtgattaaattttccgatccacagtggaatcattttcagggcccaagctgccaggggctggagccttataacaaagtaacctataaaccgtaccaatcgtcagcccagaacaatggatcgcccgctcaggagatcactggttctgacaccttcgaaggtcttcaacagcagtttctcggggcgaacgagaattccgccgagaatatgcagatcatccagcttcaggtgctcaataaagcgaaagagcgacagcttgagaatctaatcgaaaaactcaatgagagcgagcgacagatccggtacctgaatcaccaactggtcatcataaaagacgaaaaagatggcttaaccctctcgctgcgcgaatctcagaagctcttccagaatggtaaagagagggagatccagttggaggcacagattaaagcgctagagacacagatccaagccttaaaggtgaatgaggagcagatgatcaaaaaaagtcgcaccactgagatggcgctggagtctctgaaacagcagttagtggacttgcaccatagtgagagccttcagcgggcaagagagcagcatgagtctattgtcatggggcttaccaagaagtacgaggagcaggttctgtcactgcaaaaaaacctggatgcaacagtgactgcactcaaggagcaggaagatatctgttctagacttaaggaccacgttaagcagcttgaaaggaatcaagaggccatcaaactggaaaagacagagattatcaataaactgaccagatccctggaggaatcacagaagcagtgcgcacacctcttacaaagcggttctgtccaggaggtagcccagctgcagttccaacttcaacaggctcagaaagcgcatgctatgtcggccaacatgaacaaagcactgcaggaggagttgactgagctgaaggacgaaattagcttatacgagtcagctgctaaactgggcatccatcctagcgactcagaaggagaacttaacatcgaactgacagaatcctatgtcgacttgggcatcaagaaggttaattggaagaagagcaaagtcacaagcatagtccaagaggaagacccaaacgaagaactgagcaaggacgaattcatattaaagctgaaagcagaagtgcaaagactcttggggtcaaatagtatgaaaagacatctcgtctctcagctccaaaatgatcttaaggactgccacaagaaaattgaagacctacatcaagtgaaaaaagatgagaagagtatcgaggttgaaacaaagaccgacacttcggagaaacctaagaatcagctgtggccagaaagtagtacttccgacgtcgttcgcgatgacatcctcctgctaaagaacgagatacaggtgctgcagcagcagaaccaggaactaaaggagaccgaaggcaagctcagaaacactaaccaggacctctgcaatcagatgaggcagatggtgcaagacttcgatcatgataagcaggaagctgtggataggtgtgagaggacgtatcagcagcatcatgaggccatgaagacacaaatccgggaatcattgttggctaagcacgctctggaaaagcaacagctgttcgaagcctacgagagaacccacctccagttgcgtagtgagctcgacaagctaaacaaagaggttacagctgtgcaggaatgctacctagaggtgtgcagggaaaaggataacttggagctcacgcttaggaagaccactgagaaggaacagcaaacccaggaaaaaatcaaggagaagctgattcagcagttggagaaggaatggcaatcaaagctcgatcaaacaattaaagcaatgaagaaaaaaacgctagactgtggaagccagactgatcaggtcactacctccgacgtcatcagcaagaaggagatggccattatgatcgaagaacagaaatgtaccatccagcaaaacttagagcaagaaaaagatatcgccattaaaggtgccatgaagaagctggaaatcgagttggagctgaaacattgcgagaacatcaccaaacaggtggagatcgctgttcagaacgctcaccagcgatggctgggagagttgcctgaactggctgagtatcaagccttggtgaaagcagagcagaaaaaatgggaggaacagcacgaagtgagtgtcaataaacgaatatccttcgcagtgtcagaagccaaggaaaagtggaaatccgagctagaaaatatgaggaagaatatcctgcccggtaaagagctggaggagaagatccactcacttcagaaagaattagagctgaaaaatgaggaagtgcccgtggtgatccgcgctgagctggctaaagcccgctccgagtggaataaggagaagcaagaagaaatccacagaatccaggagcagaatgaacaggactatcggcagttcttagacgatcaccgcaataaaatcaatgaagtcctcgccgccgcaaaagaagattttatgaaacagaagaccgagctgctactgcagaaagaaacggaactgcagacttgtctagaccagtctagacgggaatggaccatgcaggaagccaagagaattcagttagaaatttatcagtatgaggaggatatcctaaccgtcttaggagttcttctctccgacacccagaaggaacatattagcgactctgaagacaaacagttgctcgagatcatgagcacgtgtagttctaaatggatgagcgtgcagtacttcgaaaaacttaaagggtgtatccaaaaagcctttcaggatactcttcccctgttggttgagaatgctgaccctgaatggaagaagagaaatatggctgaactgtcaaaggattccgcctctcaggggacagggcaaggggatcctggccctgcggctggccatcacgcccagcctctggcgctccaggcaaccgaagccgaggccgaggaaaacaataaagtcgttgaggagttaattgaggagaataacgatatgaagaataaattggaggaactacaaaccttatgtaaaactcctccacgctccctttctgcgggcgccatcgaaaacgcctgtctcccgtgtagcgggggtgctctggaagaattgcggggtcaatacatcaaagccgtgaaaaaaatcaaatgcgacatgttgaggtatatccaggagagcaaggagagggctgctgaaatggtcaaagccgaggtccttagggaaaggcaggaaactgcacggaagatgaggaagtactaccttatctgccttcaacagattctgcaggatgacggtaaagagggggccgaaaagaaaattatgaacgccgcctcgaagctagccaccatggcaaagctgttagaaacgcccatctctagcaagtcgcagagcaaaacgacacagtcggcccttccactgacctcagagatgttgatcgcagtaaagaagtcaaagcgcaacgacgttaatcaaaagattccttgctgtatagagtcaaagtccaatagcgtcaatactatcacccgtaccctctgcgagcaggcgcccaagcggcgggctgcatgtaatctgcaacggctattagaaaactccgagcaccagtctattaagcacgttggtagcaaggagacccacctagagttccagttcggagacgggtcatgtaagcatctcaatagcttgcctagaaatgtgtcacccgaattcgttccttgcgaaggtgagggtggatttgggctgcataagaagaaggacctgctttctgataacggcagcgagagcctcccacatagcgcagcttacccattccttggtacactgggaaacaagccaagtccacgatgtaccccagggccgtccgaatccggttgcatgcacatcacgttcagggactccaatgagcgcctgggcctcaaagtttacaagtgcaaccctcttatggaatctgagaatgccgcaagcgaaaaatcccagggcctggacgtccaggagccaccggtaaaagatggaggcgacttgagtgattgcctaggatggccgtctagctccgctaccctttcgtttgactcaagagaagcctcatttgtgcacggacggcctcaagggacattggaaatcccttctgagagcgttaaaagtaaacagttctcaccgagcggttatctgtccgatacggaggagtcaaacatgatctgccaaaccatgaagtgtcagcgctatcagactccctacttgagcgaggaaaccacctatctcgagccaggcaagataagcgtaaactgtgggcacccttccagacacaaagctgatagacttaaatccgacttcaaaaaactgagctccacgttgccatcgagtgtctgccagcaacctagtcggaaactgattgtccccctgtcctcacaacaggactctggtttcgactccccattcgtgaacttggactag

SEQ ID NO: 183588 - DNA, 4965 bp, Artificial Sequence
  derived and/or modified sequence
atgtctctggacttcggttccgtcgctctaccagtgcagaacgaggatgaagaatatgatgaggaagattacgaacgggagaaagaactccagcagctcctgaccgatctgcctcatgatatgctggacgacgacttgtccagccccgagcttcagtatagcgattgcagcgaggacggcacggacgggcaaccccaccatccggagcagttagaaatgagttggaatgaacagatgctgcccaagtctcaatccgtgaacggctacaacgaaatacagagcctctatgctggagagaaatgcggcaatgtatgggaagagaacagaagtaagacagaagaccgacatccggtgtatcaccccgaggaaggaggcgatgagggaggatcaggttactctcccccatcaaagtgcgaacagactgacctgtatcaccttcccgagaacttccggccttatacaaacggccagaaacaggaatttaacaaccaggccactaacgtcatcaagttctcggacccccaatggaatcattttcagggcccatcatgccagggacttgagccttacaataaggtcacctataagccctaccaatctagcgcccagaacaatgggagtccggctcaagaaatcaccggctcagatacttttgaggggctccagcagcaatttctgggcgctaatgagaactctgcagaaaatatgcagataatccaactgcaggtcctgaataaggcaaaagagcgacagctggagaaccttatcgaaaagctgaacgaaagcgagaggcagattagatatctgaatcaccagctagtgatcattaaagatgagaaggacggattaaccctgtcattgcgggagagtcaaaaattgttccagaatggaaaagagcgagagattcagttggaagctcagattaaggcacttgagacacagatccaagccttaaaggtgaatgaagagcagatgatcaagaaatcacgcacaacggaaatggccttggagagcctgaaacaacaactggtcgaccttcatcactccgagtcgttgcagcgtgcccgtgagcaacacgaaagtatcgtgatgggcctcacaaagaagtatgaggaacaagtcctttccctgcagaaaaatctggacgctacagtgacagcgctgaaagaacaggaagacatctgctctcggctgaaggaccatgttaaacagcttgagcgaaaccaagaggcaatcaaactagagaaaacggagattattaacaaactcacaaggagcctggaagagtcccaaaagcagtgcgcccatctcttgcagagtggaagcgtgcaggaggttgcccagttgcagtttcaactacaacaagctcaaaaggcccatgcaatgagtgccaatatgaacaaggcgctccaggaggagttgactgagctgaaggacgagattagtttgtatgagtctgctgcaaagctcgggattcacccatctgactccgaaggcgagctcaatatcgagctgaccgagtcctacgtggacctcggtataaagaaggtcaactggaaaaagtcaaaggtcacatccattgtgcaagaagaggacccaaacgaagagctatcaaaggatgaattcattctcaagctcaaggccgaggtgcaaagactcctgggatcaaattctatgaaacgccatctggtgagtcagcttcaaaatgatttgaaggattgccacaagaagatcgaagacttacaccaggtgaagaaggatgagaagtcaatcgaagtcgagaccaagacggatacttcagagaaacccaagaaccaactctggccggaaagctctacgtcagacgtcgtgagagatgatattctactgcttaagaatgagattcaggtgttacagcagcagaaccaggagctaaaagaaactgagggaaagctccgcaacactaatcaggatctgtgtaaccagatgcggcaaatggtgcaggacttcgaccacgacaagcaggaggcggtcgaccggtgtgagagaacataccagcaacaccacgaggccatgaaaacgcagatcagggagagtctgcttgccaagcacgcgcttgaaaaacagcaactgttcgaggcatacgaaaggacacacctccagctgaggagcgagctcgataagctgaataaggaagtaactgccgtacaggaatgctatctggaggtctgtagagagaaggacaacctagagctgaccctgcgaaagactacagaaaaagaacagcagacgcaggagaaaataaaggagaagctcattcaacaactggagaaggaatggcagtcaaaacttgatcaaaccatcaaagccatgaagaagaagaccctggattgcggatcacagactgatcaggttactacttcagacgtgattagcaagaaggagatggccatcatgatcgaagagcagaaatgcaccattcagcagaatctggagcaagagaaggacattgctatcaaaggggctatgaaaaagctggagatcgagctggaactgaaacactgcgagaacatcaccaaacaagtggagattgcagtgcagaatgcccatcagcggtggctgggcgagttgcctgaactcgccgaatatcaggctctggttaaagcggagcaaaagaagtgggaggagcagcacgaggtgagcgtgaacaagcggatcagctttgcagtgtccgaagcgaaggagaaatggaaaagcgagttggaaaacatgagaaagaatatactgcctggaaaggagctcgaagaaaaaatccactctttacagaaagaattagaactcaagaatgaggaagtacccgttgtgataagagctgagctcgctaaagcacggtctgagtggaacaaggaaaagcaagaagagattcacaggatccaggagcaaaatgaacaagattatcgccagttcctggatgatcaccggaataaaatcaacgaggtgctggctgctgccaaagaagactttatgaaacagaaaactgagctgctgctccagaaagagaccgagctacagacctgcctggaccaaagcagacgggagtggacaatgcaggaagccaagcggatccagctggaaatctaccagtatgaagaagatatattaacagtgctcggcgtcctgctcagtgacacacagaaagaacacatctccgattctgaagataagcagttgctggagattatgagcacatgctcatccaagtggatgtcagtgcaatactttgagaaactgaaaggatgcatccagaaggcatttcaggacacgcttcccctgctcgtcgagaatgcagatccagaatggaaaaaaaggaacatggccgagctcagcaaggatagtgcttctcagggcacgggtcagggagatccagggccagcagccggacatcacgctcagccactggcgctgcaggccactgaagctgaggccgaagaaaacaataaagttgttgaggaacttatcgaggagaataacgacatgaagaacaaactggaggagttgcagacattatgcaagacccccccacgttccctgtccgccggagcaatcgagaacgcttgtcttccatgcagcgggggagctctcgaagagttgaggggccaatacattaaggcagtcaaaaaaataaagtgtgacatgttaagatacattcaagaatctaaggaacgcgcagccgagatggtgaaagctgaggtgctgcgtgagcgacaggaaaccgccaggaaaatgcgtaagtattacctgatttgtctccagcagattctgcaagacgacggcaaggagggggctgagaaaaagattatgaacgcagccagcaaactggccaccatggcgaaactgctggaaaccccaatttcctctaagagccaatcaaaaacaacacaatctgccttgcctctgacctcagagatgcttatcgccgtgaagaaatctaaacgaaacgacgtgaatcagaagatcccctgttgcatcgaatctaagagcaactcggtgaacacgattaccaggacgctgtgcgaacaggccccaaaacggcgagcagcctgcaacctgcagcgcctgctggagaattcagaacaccagagtataaagcacgtgggttcaaaagaaacacatttggagtttcagttcggcgatgggagctgtaaacatctgaactcccttcccagaaacgtgtctccagagttcgtgccttgtgagggggaggggggattcggactccataaaaaaaaggatcttttatccgataatggtagtgagtcgctgccccatagcgccgcatatcccttcttgggcacactgggcaataaaccaagtcctcgctgcacacccggtcctagcgagagcggctgtatgcacattacttttcgtgattctaacgagcgcctgggattaaaggtgtacaagtgtaatccactcatggaaagtgagaacgccgctagtgagaaaagtcaaggcttagacgtgcaggaaccgcctgtcaaggatggaggagatttatcagattgcttggggtggccatcatcatctgccactctttcgtttgactctcgtgaggcgtcttttgtgcacggccgtccccaggggaccctggaaatcccatctgagtcagtgaaaagcaaacagttcagccccagcgggtacctgtccgatacggaagaaagcaatatgatttgccagacgatgaaatgtcagcggtatcaaactccttatctgtcagaggagacaacctatctggaacctgggaaaatatcggtgaactgcggccatccctcccgccacaaagccgatcggctgaaatctgatttcaagaagttatcctccactctgcctagttcagtgtgccagcagcctagtcggaagctgatcgtgcctttgtcgtcacagcaggattcggggttcgactccccatttgtgaacctggactag

SEQ ID NO: 183589 - DNA, 5097 bp, Artificial Sequence
  derived and/or modified sequence
tcgcggtaacagcctccgtggcctccggaggaccatgtcattagactttggcagtgtggcactaccagtgcaaaatgaagatgaagagtatgacgaagaggactatgaaagagagaaagagttgcagcagttactcacagaccttccccatgacatgctggatgacgacctctcctctccagagctccagtattcggactgcagcgaggatggcacagacggacaaccacatcatcctgagcaattggagatgagctggaatgagcaaatgctgcccaaatctcaaagtgtaaatggctataatgaaattcagagtttatatgctggagaaaaatgtggtaatgtctgggaagaaaatagaagtaaaactgaagaccgacatcctgtgtaccatcctgaagaaggtggagatgaaggtggaagtggttatagtcctccaagtaaatgtgaacagactgatttatatcaccttcctgaaaactttaggccatataccaatggtcagaagcaggaatttaataaccaagcaaccaatgtaattaaattttcagatcctcaatggaaccattttcagggtcccagttgtcaaggtttggaaccgtataataaagtgacatataaaccttatcagtcttctgcccagaataatggctcaccagcccaggagataacaggaagtgacacattcgaaggcctgcaacaacaatttttaggagctaatgagaactctgcagaaaatatgcagattattcaacttcaggttcttaacaaagcaaaagagagacaactggagaacttaattgaaaagttaaatgaaagtgaacgtcaaattcgatatctgaatcaccagcttgtaataataaaagatgaaaaggatggtttgactctcagccttcgagaatcacagaaactctttcagaatggaaaagaaagagagatacagcttgaagctcaaataaaagcactggagactcagatacaagcattaaaagtcaatgaagaacagatgatcaagaagtccagaacaactgaaatggctctggaaagcttgaagcagcagctggtggaccttcatcattctgaatcacttcaacgagctagagaacagcatgagagcattgttatgggcctcacaaagaagtacgaagagcaagtattgtccttacaaaagaatttggatgccacagtcaccgcacttaaagaacaggaagacatttgctctcgtctgaaagatcacgtgaaacaactggaaaggaatcaagaagcaatcaagttagaaaagactgagatcattaataagttgacaagaagtctagaggagagtcaaaagcagtgtgcccacttgttgcagtccgggtcagtacaagaggtggctcagctacagttccagctgcagcaagcacagaaggcacatgctatgagtgcaaacatgaacaaggctttgcaagaagaattaacagaactaaaagatgaaatttctctctatgaatctgctgcaaaactaggaatacatccaagtgactcagaaggagaattaaatatagaactcactgaatcgtatgtggatttgggtattaaaaaggtcaactggaaaaaatccaaagttaccagcattgtacaagaagaagacccaaatgaagagctttcaaaagatgagttcattctgaagttaaaggcagaagtacagcgtttgctgggtagcaactcaatgaagcgtcatctggtgtctcagttacaaaatgacctcaaagactgtcataagaaaattgaagatctccaccaagtgaagaaggatgaaaaaagcattgaggttgagactaaaacagatacctcagaaaaaccaaagaatcaattatggcctgagtcttctacttctgatgttgtcagagatgatattctgctgcttaaaaatgaaattcaagttttacaacaacaaaatcaggaacttaaagaaactgaaggaaaactgagaaatacaaatcaagacttatgtaatcaaatgagacaaatggtacaagattttgaccatgacaaacaagaagctgtggataggtgtgaaaggacttatcagcagcaccatgaagccatgaaaactcaaatacgtgaaagcctattagcaaagcatgctttggagaagcagcagctctttgaggcttatgagagaactcatttgcaactgaggtctgagttggataagttgaataaggaggtgactgctgtgcaggaatgttacctagaagtgtgcagagagaaggataatctagaattgactctcaggaagaccactgaaaaggagcaacagactcaggagaagatcaaagaaaaactcattcaacagcttgaaaaggagtggcagtctaagctggatcaaactataaaggcaatgaaaaagaagaccttagattgtggcagccaaactgaccaagtaaccaccagtgatgttatttccaagaaagagatggcaattatgatagaagagcagaagtgcacaatccagcaaaacttagaacaagagaaggacatagccatcaagggggctatgaagaaactcgaaattgaattggaactcaaacattgtgaaaatattaccaaacaggtagaaatagctgtgcaaaatgctcatcagcgatggctgggagaactaccagagctggcagagtatcaagcacttgtgaaggcagaacagaaaaagtgggaagaacagcatgaggtctctgtgaacaaaaggatatcatttgctgtttctgaagctaaagagaaatggaagagtgagcttgaaaatatgaggaaaaatatacttcctggaaaggaattggaagagaagattcattctcttcagaaggaacttgagttaaagaacgaagaagtccctgtggtcatcagggctgagttagctaaggctcggagtgaatggaacaaagaaaagcaagaagaaatccacagaatccaagaacaaaatgagcaagattaccggcaatttttagatgatcaccgaaataaaattaatgaggtgcttgcggcagctaaagaagactttatgaaacaaaaaactgaactacttcttcagaaggagacagaattacaaacttgtctagaccagagtcgtagagaatggactatgcaggaagccaagcggatccaactggaaatctatcagtatgaggaagacatcctgactgtacttggggttcttttaagtgatacccaaaaggagcacatcagtgattctgaggacaagcagcttttggaaatcatgtcgacttgttcttcaaaatggatgtctgtgcaatattttgaaaaactaaagggctgcatacagaaagcatttcaagatacacttcctctgcttgtagaaaacgctgacccagaatggaaaaagagaaatatggccgagctctctaaggattctgccagccagggcactggccaaggagaccctggacctgctgctggacaccatgctcagcccttggccttacaagcaacagaagcagaagctgaagagaataataaagttgttgaagaattaatagaagaaaacaacgacatgaagaataaattggaagaattgcaaacactttgtaaaacaccaccaaggtcattgtcagcaggggccattgaaaatgcttgcctgccatgcagtgggggagccttggaagaacttcgtgggcagtacattaaagctgtaaaaaaaattaaatgtgacatgcttcgttatattcaggagagtaaggaacgagctgcagaaatggtaaaagcagaggtactgcgagaacgtcaagaaaccgcccgaaagatgcgcaaatattatttgatttgcctccaacagattttgcaggatgatggaaaagaaggggctgagaaaaagattatgaatgctgctagcaaacttgctacaatggcaaaattactggaaacacctatttctagtaagtcccaaagcaaaactacacagtcagcactgcccctaacttcagagatgctgattgcagttaaaaaatcaaaaagaaatgatgtgaatcagaaaataccatgttgtattgaaagcaaatcaaatagtgtaaacaccatcaccagaactctgtgcgaacaagctcccaagaggagggcagcttgtaacttacaaaggctgttagagaactcagagcatcagagcataaagcatgtgggatccaaagagacacatttggaattccagtttggggatggtagttgcaagcacctaaacagtttgccaaggaatgtttctcctgagtttgttccttgtgaaggtgaaggaggctttggtttgcacaagaagaaagacctactcagtgataatggttctgaatcacttccgcattcagctgcatacccctttcttggaaccttaggaaataaaccctcacctagatgtacccctggtccttctgaatcaggatgcatgcatataacctttcgcgattctaatgaaagacttggtttaaaagtatataaatgcaatccactaatggaaagtgaaaatgctgcatctgagaaaagtcaaggtttggatgttcaggaacctccagtaaaagatggaggggaccttagtgactgcttgggctggccttccagcagtgcaaccttatcctttgacagtcgtgaagcatcatttgtacatggtaggccacaaggaactttggaaataccaagtgaatctgttaaatccaaacagttttcaccatccggttatctttcagatacagaggaaagtaatatgatttgtcaaacaatgaaatgtcagcgttatcaaactccatacctgtcagaagaaaccacgtatttggagccaggaaagatcagtgtgaattgtggacacccatctcgtcataaggctgatagattaaagtcagatttcaaaaaactgagcagtacattaccatcttcagtgtgtcagcagccttcaagaaaattaattgttccgctatctagccaacaagatagtggctttgatagcccatttgttaatctagactaattatggtacagtatttaagaagaatcattaatatattaacaaaaatggaagggaagacctcatactgaaaaaaattgtgagccctgcctcttttgaga

SEQ ID NO: 183590 - DNA, 4965 bp, Artificial Sequence
  derived and/or modified sequence
atgagcctggacttcggcagcgtggccctgcccgtgcagaacgaggacgaggagtacgacgaggaggactacgagagagagaaggagctgcagcagctgctgaccgacctgccccacgacatgctggacgacgacctgagcagccccgagctgcagtacagcgactgcagcgaggacggcaccgacggccagccccaccaccccgagcagctggagatgagctggaacgagcagatgctgcccaagagccagagcgtgaacggctacaacgagatccagagcctgtacgccggcgagaagtgcggcaacgtgtgggaggagaacagaagcaagaccgaggacagacaccccgtgtaccaccccgaggagggcggcgacgagggcggcagcggctacagcccccccagcaagtgcgagcagaccgacctgtaccacctgcccgagaacttcagaccctacaccaacggccagaagcaggagttcaacaaccaggccaccaacgtgatcaagttcagcgacccccagtggaaccacttccagggccccagctgccagggcctggagccctacaacaaggtgacctacaagccctaccagagcagcgcccagaacaacggcagccccgcccaggagatcaccggcagcgacaccttcgagggcctgcagcagcagttcctgggcgccaacgagaacagcgccgagaacatgcagatcatccagctgcaggtgctgaacaaggccaaggagagacagctggagaacctgatcgagaagctgaacgagagcgagagacagatcagatacctgaaccaccagctggtgatcatcaaggacgagaaggacggcctgaccctgagcctgagagagagccagaagctgttccagaacggcaaggagagagagatccagctggaggcccagatcaaggccctggagacccagatccaggccctgaaggtgaacgaggagcagatgatcaagaagagcagaaccaccgagatggccctggagagcctgaagcagcagctggtggacctgcaccacagcgagagcctgcagagagccagagagcagcacgagagcatcgtgatgggcctgaccaagaagtacgaggagcaggtgctgagcctgcagaagaacctggacgccaccgtgaccgccctgaaggagcaggaggacatctgcagcagactgaaggaccacgtgaagcagctggagagaaaccaggaggccatcaagctggagaagaccgagatcatcaacaagctgaccagaagcctggaggagagccagaagcagtgcgcccacctgctgcagagcggcagcgtgcaggaggtggcccagctgcagttccagctgcagcaggcccagaaggcccacgccatgagcgccaacatgaacaaggccctgcaggaggagctgaccgagctgaaggacgagatcagcctgtacgagagcgccgccaagctgggcatccaccccagcgacagcgagggcgagctgaacatcgagctgaccgagagctacgtggacctgggcatcaagaaggtgaactggaagaagagcaaggtgaccagcatcgtgcaggaggaggaccccaacgaggagctgagcaaggacgagttcatcctgaagctgaaggccgaggtgcagagactgctgggcagcaacagcatgaagagacacctggtgagccagctgcagaacgacctgaaggactgccacaagaagatcgaggacctgcaccaggtgaagaaggacgagaagagcatcgaggtggagaccaagaccgacaccagcgagaagcccaagaaccagctgtggcccgagagcagcaccagcgacgtggtgagagacgacatcctgctgctgaagaacgagatccaggtgctgcagcagcagaaccaggagctgaaggagaccgagggcaagctgagaaacaccaaccaggacctgtgcaaccagatgagacagatggtgcaggacttcgaccacgacaagcaggaggccgtggacagatgcgagagaacctaccagcagcaccacgaggccatgaagacccagatcagagagagcctgctggccaagcacgccctggagaagcagcagctgttcgaggcctacgagagaacccacctgcagctgagaagcgagctggacaagctgaacaaggaggtgaccgccgtgcaggagtgctacctggaggtgtgcagagagaaggacaacctggagctgaccctgagaaagaccaccgagaaggagcagcagacccaggagaagatcaaggagaagctgatccagcagctggagaaggagtggcagagcaagctggaccagaccatcaaggccatgaagaagaagaccctggactgcggcagccagaccgaccaggtgaccaccagcgacgtgatcagcaagaaggagatggccatcatgatcgaggagcagaagtgcaccatccagcagaacctggagcaggagaaggacatcgccatcaagggcgccatgaagaagctggagatcgagctggagctgaagcactgcgagaacatcaccaagcaggtggagatcgccgtgcagaacgcccaccagagatggctgggcgagctgcccgagctggccgagtaccaggccctggtgaaggccgagcagaagaagtgggaggagcagcacgaggtgagcgtgaacaagagaatcagcttcgccgtgagcgaggccaaggagaagtggaagagcgagctggagaacatgagaaagaacatcctgcccggcaaggagctggaggagaagatccacagcctgcagaaggagctggagctgaagaacgaggaggtgcccgtggtgatcagagccgagctggccaaggccagaagcgagtggaacaaggagaagcaggaggagatccacagaatccaggagcagaacgagcaggactacagacagttcctggacgaccacagaaacaagatcaacgaggtgctggccgccgccaaggaggacttcatgaagcagaagaccgagctgctgctgcagaaggagaccgagctgcagacctgcctggaccagagcagaagagagtggaccatgcaggaggccaagagaatccagctggagatctaccagtacgaggaggacatcctgaccgtgctgggcgtgctgctgagcgacacccagaaggagcacatcagcgacagcgaggacaagcagctgctggagatcatgagcacctgcagcagcaagtggatgagcgtgcagtacttcgagaagctgaagggctgcatccagaaggccttccaggacaccctgcccctgctggtggagaacgccgaccccgagtggaagaagagaaacatggccgagctgagcaaggacagcgccagccagggcaccggccagggcgaccccggccccgccgccggccaccacgcccagcccctggccctgcaggccaccgaggccgaggccgaggagaacaacaaggtggtggaggagctgatcgaggagaacaacgacatgaagaacaagctggaggagctgcagaccctgtgcaagaccccccccagaagcctgagcgccggcgccatcgagaacgcctgcctgccctgcagcggcggcgccctggaggagctgagaggccagtacatcaaggccgtgaagaagatcaagtgcgacatgctgagatacatccaggagagcaaggagagagccgccgagatggtgaaggccgaggtgctgagagagagacaggagaccgccagaaagatgagaaagtactacctgatctgcctgcagcagatcctgcaggacgacggcaaggagggcgccgagaagaagatcatgaacgccgccagcaagctggccaccatggccaagctgctggagacccccatcagcagcaagagccagagcaagaccacccagagcgccctgcccctgaccagcgagatgctgatcgccgtgaagaagagcaagagaaacgacgtgaaccagaagatcccctgctgcatcgagagcaagagcaacagcgtgaacaccatcaccagaaccctgtgcgagcaggcccccaagagaagagccgcctgcaacctgcagagactgctggagaacagcgagcaccagagcatcaagcacgtgggcagcaaggagacccacctggagttccagttcggcgacggcagctgcaagcacctgaacagcctgcccagaaacgtgagccccgagttcgtgccctgcgagggcgagggcggcttcggcctgcacaagaagaaggacctgctgagcgacaacggcagcgagagcctgccccacagcgccgcctaccccttcctgggcaccctgggcaacaagcccagccccagatgcacccccggccccagcgagagcggctgcatgcacatcaccttcagagacagcaacgagagactgggcctgaaggtgtacaagtgcaaccccctgatggagagcgagaacgccgccagcgagaagagccagggcctggacgtgcaggagccccccgtgaaggacggcggcgacctgagcgactgcctgggctggcccagcagcagcgccaccctgagcttcgacagcagagaggccagcttcgtgcacggcagaccccagggcaccctggagatccccagcgagagcgtgaagagcaagcagttcagccccagcggctacctgagcgacaccgaggagagcaacatgatctgccagaccatgaagtgccagagataccagaccccctacctgagcgaggagaccacctacctggagcccggcaagatcagcgtgaactgcggccaccccagcagacacaaggccgacagactgaagagcgacttcaagaagctgagcagcaccctgcccagcagcgtgtgccagcagcccagcagaaagctgatcgtgcccctgagcagccagcaggacagcggcttcgacagccccttcgtgaacctggactag

SEQ ID NO: 183591 - protein, 1083 aa, Artificial Sequence
  derived and/or modified sequence
MACPALGLEALQPLQPEPPPEPAFSEAQKWIEQVTGRSFGDKDFRTGLENGILLCELLNAIKPGLVKKINRLPTPIAGLDNIILFLRGCKELGLKESQLFDPSDLQDTSNRVTVKSLDYSRKLKNVLVTIYWLGKAANSCTSYSGTTLNLKEFEGLLAQMRKDTDDIESPKRSIRDSGYIDCWDSERSDSLSPPRHGRDDSFDSLDSFGSRSRQTPSPDVVLRGSSDGRGSDSESDLPHRKLPDVKKDDMSARRTSHGEPKSAVPFNQYLPNKSNQTAYVPAPLRKKKAEREEYRKSWSTATSPLGGERPFRYGPRTPVSDDAESTSMFDMRCEEEAAVQPHSRARQEQLQLINNQLREEDDKWQDDLARWKSRRRSVSQDLIKKEEERKKMEKLLAGEDGTSERRKSIKTYREIVQEKERRERELHEAYKNARSQEEAEGILQQYIERFTISEAVLERLEMPKILERSHSTEPNLSSFLNDPNPMKYLRQQSLPPPKFTATVETTIARASVLDTSMSAGSGSPSKTVTPKAVPMLTPKPYSQPKNSQDVLKTFKVDGKVSVNGETVHREEEKERECPTVAPAHSLTKSQMFEGVARVHGSPLELKQDNGSIEINIKKPNSVPQELAATTEKTEPNSQEDKNDGGKSRKGNIELASSEPQHFTTTVTRCSPTVAFVEFPSSPQLKNDVSEEKDQKKPENEMSGKVELVLSQKVVKPKSPEPEATLTFPFLDKMPEANQLHLPNLNSQVDSPSSEKSPVMTPQFKFWAWDPEEERRRQEKWQQEQERLLQERYQKEQDKLKEEWEKAQKEVEEEERRYYEEERKIIEDTVVPFTVSSSSADQLSTSSSMTEGSGTMNKIDLGNCQDEKQDRRWKKSFQGDDSDLLLKTRESDRLEEKGSLTEGALAHSGNPVSKGVHEDHQLDTEAGAPHCGTNPQLAQDPSQNQQTSNPTHSSEDVKPKTLPLDKSINHQIESPSERRKKSPREHFQAGPFSPCSPTPPGQSPNRSISGKKLCSSCGLPLGKGAAMIIETLNLYFHIQCFRCGICKGQLGDAVSGTDVRIRNGLLNCNDCYMRSRSAGQPTTL

SEQ ID NO: 183592 - DNA, 3252 bp, Artificial Sequence
  derived and/or modified sequence
atggcctgccccgccctgggcctggaggccctgcagcccctgcagcccgagcccccccccgagcccgccttcagcgaggcccagaagtggatcgagcaggtgaccggcagaagcttcggcgacaaggacttcagaaccggcctggagaacggcatcctgctgtgcgagctgctgaacgccatcaagcccggcctggtgaagaagatcaacagactgcccacccccatcgccggcctggacaacatcatcctgttcctgagaggctgcaaggagctgggcctgaaggagagccagctgttcgaccccagcgacctgcaggacaccagcaacagagtgaccgtgaagagcctggactacagcagaaagctgaagaacgtgctggtgaccatctactggctgggcaaggccgccaacagctgcaccagctacagcggcaccaccctgaacctgaaggagttcgagggcctgctggcccagatgagaaaggacaccgacgacatcgagagccccaagagaagcatcagagacagcggctacatcgactgctgggacagcgagagaagcgacagcctgagcccccccagacacggcagagacgacagcttcgacagcctggacagcttcggcagcagaagcagacagacccccagccccgacgtggtgctgagaggcagcagcgacggcagaggcagcgacagcgagagcgacctgccccacagaaagctgcccgacgtgaagaaggacgacatgagcgccagaagaaccagccacggcgagcccaagagcgccgtgcccttcaaccagtacctgcccaacaagagcaaccagaccgcctacgtgcccgcccccctgagaaagaagaaggccgagagagaggagtacagaaagagctggagcaccgccaccagccccctgggcggcgagagacccttcagatacggccccagaacccccgtgagcgacgacgccgagagcaccagcatgttcgacatgagatgcgaggaggaggccgccgtgcagccccacagcagagccagacaggagcagctgcagctgatcaacaaccagctgagagaggaggacgacaagtggcaggacgacctggccagatggaagagcagaagaagaagcgtgagccaggacctgatcaagaaggaggaggagagaaagaagatggagaagctgctggccggcgaggacggcaccagcgagagaagaaagagcatcaagacctacagagagatcgtgcaggagaaggagagaagagagagagagctgcacgaggcctacaagaacgccagaagccaggaggaggccgagggcatcctgcagcagtacatcgagagattcaccatcagcgaggccgtgctggagagactggagatgcccaagatcctggagagaagccacagcaccgagcccaacctgagcagcttcctgaacgaccccaaccccatgaagtacctgagacagcagagcctgcccccccccaagttcaccgccaccgtggagaccaccatcgccagagccagcgtgctggacaccagcatgagcgccggcagcggcagccccagcaagaccgtgacccccaaggccgtgcccatgctgacccccaagccctacagccagcccaagaacagccaggacgtgctgaagaccttcaaggtggacggcaaggtgagcgtgaacggcgagaccgtgcacagagaggaggagaaggagagagagtgccccaccgtggcccccgcccacagcctgaccaagagccagatgttcgagggcgtggccagagtgcacggcagccccctggagctgaagcaggacaacggcagcatcgagatcaacatcaagaagcccaacagcgtgccccaggagctggccgccaccaccgagaagaccgagcccaacagccaggaggacaagaacgacggcggcaagagcagaaagggcaacatcgagctggccagcagcgagccccagcacttcaccaccaccgtgaccagatgcagccccaccgtggccttcgtggagttccccagcagcccccagctgaagaacgacgtgagcgaggagaaggaccagaagaagcccgagaacgagatgagcggcaaggtggagctggtgctgagccagaaggtggtgaagcccaagagccccgagcccgaggccaccctgaccttccccttcctggacaagatgcccgaggccaaccagctgcacctgcccaacctgaacagccaggtggacagccccagcagcgagaagagccccgtgatgaccccccagttcaagttctgggcctgggaccccgaggaggagagaagaagacaggagaagtggcagcaggagcaggagagactgctgcaggagagataccagaaggagcaggacaagctgaaggaggagtgggagaaggcccagaaggaggtggaggaggaggagagaagatactacgaggaggagagaaagatcatcgaggacaccgtggtgcccttcaccgtgagcagcagcagcgccgaccagctgagcaccagcagcagcatgaccgagggcagcggcaccatgaacaagatcgacctgggcaactgccaggacgagaagcaggacagaagatggaagaagagcttccagggcgacgacagcgacctgctgctgaagaccagagagagcgacagactggaggagaagggcagcctgaccgagggcgccctggcccacagcggcaaccccgtgagcaagggcgtgcacgaggaccaccagctggacaccgaggccggcgccccccactgcggcaccaacccccagctggcccaggaccccagccagaaccagcagaccagcaaccccacccacagcagcgaggacgtgaagcccaagaccctgcccctggacaagagcatcaaccaccagatcgagagccccagcgagagaagaaagaagagccccagagagcacttccaggccggccccttcagcccctgcagccccaccccccccggccagagccccaacagaagcatcagcggcaagaagctgtgcagcagctgcggcctgcccctgggcaagggcgccgccatgatcatcgagaccctgaacctgtacttccacatccagtgcttcagatgcggcatctgcaagggccagctgggcgacgccgtgagcggcaccgacgtgagaatcagaaacggcctgctgaactgcaacgactgctacatgagaagcagaagcgccggccagcccaccaccctgtag

SEQ ID NO: 183593 - DNA, 3252 bp, Artificial Sequence
  derived and/or modified sequence
atggcatgccccgcactgggcctggaggcgctccagccgctccagccagagcccccacctgagcccgctttcagcgaggcccagaaatggattgaacaagttaccgggcgctcattcggtgataaagactttaggactggtctggagaacggaatcctgctgtgtgagttactgaatgccattaaaccaggactggtaaagaagattaaccgcctgcccacaccaatcgcgggcctagacaatattatcctcttcctccgcggctgcaaggaacttggactgaaggaatcgcagctgttcgacccatctgatctgcaagatacatccaacagggtgactgtgaaaagcctcgattattctcgaaaactgaagaacgtgctggtcaccatttactggctgggaaaggcggcaaactcttgtacgagctattccgggaccactctgaacctgaaggagtttgagggactgctggctcagatgaggaaggataccgatgacatagagagccccaagcgatccatacgcgacagtggatatatcgattgttgggattcagagcggtctgacagtctaagtcccccgagacacggccgggacgacagcttcgactctctcgatagttttggctcacggtctagacaaacgccctcccctgacgtggttctccggggcagcagtgatggaagaggctccgacagtgagtctgacctcccacaccgaaaattaccagacgtaaaaaaggacgatatgagcgcccggcggacctcccatggggagcccaagagtgccgtccctttcaaccagtatctcccgaataaaagtaatcaaacagcctatgtgccggctcccttaagaaagaaaaaggcagaaagggaggagtaccgtaaatcttggtctaccgccacgtcaccgctgggcggagagcgcccctttaggtacggacctagaacacctgttagcgacgatgcagaaagcacttccatgtttgatatgcgatgtgaagaggaggccgctgtccagccccacagccgagcaaggcaggagcagctgcagttaatcaataaccagttgcgagaggaagacgataagtggcaggacgacctcgcccgatggaaaagccgtcgcagatccgtgagccaggatctgataaagaaggaagaagagcgaaaaaagatggaaaagctgctggccggagaggacgggacgtccgagcggcgcaagtccatcaagacctacagggagattgtccaggaaaaagaacgccgggaaagagagctacacgaagcctacaagaatgccaggagtcaggaagaggcagaagggattcttcaacagtacattgaaaggtttacaatctcagaggcagtgctggaacgccttgagatgccaaagatactggagcgctctcacagtaccgagccgaatctgagctcttttcttaacgaccctaatcctatgaaatacttaaggcagcagtccctgccacccccaaagttcactgcaacagtggaaacaacaatcgcccgcgccagtgtattagacacatcaatgtccgcgggctccggtagcccaagcaaaactgtgactcccaaagcggtgccaatgctgacccccaagccctacagtcagcctaagaactcgcaggatgtgctgaaaacattcaaagtggacggtaaggtctccgttaacggagaaaccgtacacagagaggaagagaaagagcgagagtgtcccaccgttgcaccagcgcattcattaacaaagagtcagatgtttgagggtgtggccagagtgcacggaagccctctggagctgaagcaggacaatgggagcatcgaaatcaatatcaagaaaccaaacagcgtgcctcaggaactagcagcaaccactgaaaagaccgagccgaattcccaggaggataagaacgacgggggcaagtctcgcaaggggaatatcgagttggcatcttcagagccacaacactttactacaaccgtaaccagatgttcacccacagtggccttcgtcgaatttcccagcagtcctcaactgaaaaacgacgttagcgaggagaaagatcagaaaaagcctgagaatgagatgtccggcaaagtcgagctcgttctcagccaaaaagtggtaaagcccaagtccccagagcctgaagctacgctcacatttccttttctggacaaaatgccggaagccaatcaactgcacttaccaaatctcaattcccaggtggattcaccttcctcagagaaatcgcccgttatgaccccgcagttcaaattttgggcatgggacccagaggaggaacgtcgcaggcaggagaagtggcagcaggaacaggagaggttgctgcaagaacggtaccagaaggagcaggataagctgaaggaagaatgggaaaaagcccagaaagaagtcgaggaggaagaacggcggtattatgaggaagagagaaaaatcatcgaagatactgtggttcctttcaccgttagctcctcatctgcagatcagctgtctacgagcagttccatgactgaggggagcggtacaatgaataagatagatttgggtaactgtcaggatgaaaaacaggacagacggtggaaaaagtcgtttcagggggatgattcagacctactgcttaaaactagagagagcgaccggcttgaggagaaagggtctttgacagaaggagcgctggcgcactcaggcaatcctgtgagtaagggagttcacgaagaccaccaactggataccgaggccggcgcccctcactgtggaactaacccccagctggctcaagacccatcccagaatcagcaaactagtaatccaacgcatagcagtgaggacgtcaaacccaaaactcttcctcttgataagtcgattaaccatcagattgaatctccctccgaacgaaggaagaagagccctagagagcacttccaggctggccccttcagcccctgttcacccactccccccggccaatccccaaatcgatccattagtggaaagaaattgtgttcttcctgtggactgccattagggaaaggagcagcaatgatcatagaaaccctgaatctctacttccatattcagtgttttagatgcgggatctgcaaaggccagctgggggatgccgtgagcggcaccgatgtgcgtattcggaatggacttctgaactgcaatgactgttacatgagaagccggtccgccggtcagcctacaacattgtag

SEQ ID NO: 183594 - DNA, 3252 bp, Artificial Sequence
  derived and/or modified sequence
atggcctgcccagccctgggcctggaggccctgcagcccctgcagcctgagcccccacctgagcccgccttcagcgaggcccagaagtggattgagcaggtgacaggccgcagctttggagacaaggacttcagaacaggcctggagaatggcatcctgctgtgtgagctgctgaatgccatcaagccaggcctggtgaagaagatcaaccggctgcccacccccatcgccggcctggacaacatcatcctcttcctgcggggctgcaaggagctgggcctgaaggagagccagctgtttgaccccagcgacctgcaggacaccagcaacagagtgacagtgaagagcctggactacagcaggaagctgaagaatgtgctggtgaccatctactggctgggcaaggccgccaacagctgcaccagctacagcggcaccaccctgaacctgaaggagtttgagggcctgctggcccagatgaggaaggacacagatgacatcgagagccccaagaggagcatccgggacagcggctacatcgactgctgggacagcgagaggagtgacagcctgagccccccaagacatggaagagatgacagctttgacagcctggacagctttggcagccgcagccggcagacccccagcccagatgtggtgctgcggggcagcagtgatggccggggcagtgacagcgagagtgacctgccccacaggaagctgcctgatgtgaagaaggatgacatgtctgcccggaggaccagccatggagagcccaagtctgctgtgcccttcaaccagtacctgcccaacaagagcaaccagacagcctacgtgcctgcccccctgaggaagaagaaggccgagcgggaggagtacaggaagtcctggagcacagccaccagccccctgggcggggagcggcccttccgctatggccccaggacccctgtgtctgatgatgctgagagcacctccatgtttgacatgagatgtgaggaggaggccgctgtgcagccccacagccgggcccggcaggagcagctgcagctgatcaacaaccagctgcgggaggaggatgacaagtggcaggatgacctggcccgctggaagagcagaagaagatctgtgtcccaggacctgatcaagaaggaggaggagaggaagaagatggagaagctgctggccggagaagatggcaccagcgagaggaggaagagcatcaagacctaccgggagatcgtgcaggagaaggagcggcgggagcgggagctgcacgaggcctacaagaatgcccggagccaggaggaggccgagggcatcctgcagcagtacatcgagcgcttcaccatcagcgaggccgtgctggagcggctggagatgcccaagatcctggagaggagccacagcacagagcccaacctgagcagcttcctgaatgaccccaaccccatgaagtacctgcggcagcagagcctgcccccacccaagttcaccgccaccgtggagaccaccatcgcccgggcctctgtgctggacacctccatgtctgctggcagcggcagccccagcaagacagtgacccccaaggctgtgcccatgctgacccccaagccctacagccagcccaagaacagccaggatgtgctgaagaccttcaaggtggatggcaaggtgtctgtgaatggagagaccgtgcaccgggaggaggagaaggagcgggagtgccccaccgtggccccagcccacagcctgaccaagagccagatgtttgagggcgtggcccgggtgcacggcagccccctggagctgaagcaggacaatggcagcattgagatcaacatcaagaagcccaacagcgtgccccaggagctggccgccaccacagagaagacagagcccaacagccaggaggacaagaatgatggcggcaagagcaggaaaggaaacatcgagctggccagcagcgagccccagcacttcaccaccaccgtgacccgctgcagccccaccgtggcctttgtggagttccccagcagcccccagctgaagaatgatgtgtctgaggagaaggaccagaagaagccagaaaatgagatgtctgggaaggtggagctggtgctgagccagaaggtggtgaagcccaagagccctgagcctgaggccaccctgaccttccccttcctggacaagatgcctgaggccaaccagctgcacctgcccaacctgaacagccaggtggacagccccagcagcgagaagagccctgtgatgaccccccagttcaagttctgggcctgggaccctgaggaggagcggcggcggcaggagaagtggcagcaggagcaggagcggctgctgcaggagcgctaccagaaggagcaggacaagctgaaggaggagtgggagaaggcccagaaggaggtggaggaggaggagcggcgctactatgaggaggagaggaagatcatcgaggacacagtggtgcccttcaccgtgagcagcagcagcgctgaccagctgagcaccagcagctccatgacagagggcagcggcaccatgaacaagattgacctgggcaactgccaggatgagaagcaggaccggcgctggaagaagagcttccagggagatgacagcgacctgctgctgaagacccgggagagtgaccggctggaggagaagggcagcctgacagagggcgccctggcccacagcggcaaccctgtgtccaaaggagtgcatgaggaccaccagctggacacagaagctggggccccccactgcggcaccaacccccagctggcccaggaccccagccagaaccagcagaccagcaaccccacccacagcagtgaagatgtgaagcccaagaccctgcccctggacaagagcatcaaccaccagatcgagagccccagcgagaggaggaagaagagcccccgggagcacttccaggccggccccttcagcccctgcagccccaccccacctggccagagccccaacagaagcatcagcggcaagaagctgtgcagcagctgtggcctgcccctgggcaagggggccgccatgatcatcgagaccctgaacctgtacttccacatccagtgcttccgctgtggcatctgcaagggccagctgggagatgctgtgtctggaacagatgtgcgcatcagaaatggcctgctgaactgcaatgactgctacatgaggagccgctctgctggccagcccaccaccctgtag

SEQ ID NO: 183595 - DNA, 6165 bp, Artificial Sequence
  derived and/or modified sequence
cgacggcggcggccgtcctcatcccggcgcttgagaggacgcggggctgcgcaaatggcttgtcccgctctcggtctggaagctcttcagcccctgcagcccgagccgccccccgagcccgccttctccgaggcgcagaagtggattgagcaagtaactggcagaagttttggtgataaagattttcggacaggtttagaaaatggaatcctcctctgcgagttgctgaatgctataaagccaggacttgttaaaaagatcaatagattgcctacccccattgcaggactggacaatattatcttattcttgagaggttgtaaagagctcggccttaaagaatctcaactttttgacccgagtgacctccaggatacatccaacagagtaacagtcaagagccttgattatagtaggaagctgaaaaatgtattagttaccatttactggctgggaaaagcagcaaacagctgcacatcctacagcggaacgacactaaacctgaaggagtttgaaggattgttggctcagatgcgaaaggacactgatgacattgaaagtcctaaacgcagtatccgagacagtggctacatcgactgctgggattccgagcgcagcgactccctctctcctcctcgccacggcagagatgattccttcgacagcctggattcctttggctctcgctctcggcagacgccttcaccagatgtagtcctcaggggaagcagcgatgggagaggaagcgactctgaatccgacttgcctcatcggaagctgccagatgtgaagaaggatgacatgtctgcacggcggacttcccatggtgagccgaaatcagcagtgccttttaaccagtacctcccgaacaaaagcaatcagacggcctacgtccccgcgcctctgagaaagaagaaagcagagagagaggaataccgcaagagctggagtaccgccacctccccgctgggtggggagaggcccttcagatacggtccgagaactcctgtgtctgatgacgcagagagcaccagcatgtttgacatgcggtgtgaggaggaggccgcggtgcagccgcacagcagggcccgccaggagcagctgcagctgataaataaccagctgagggaagaggacgacaaatggcaagatgacctggctcgttggaagagtcgtagaagaagtgtttctcaggacttaatcaagaaagaggaagaaaggaaaaaaatggagaagttactggctggagaagatgggacaagtgaacgaaggaaaagcatcaaaacctacagagaaattgttcaagaaaaagagcggagagagagagagctgcatgaagcatataagaacgctcggtcccaggaggaggcagaggggatccttcaacagtacattgagaggttcaccatcagtgaggctgttctcgaacgcttggagatgccaaaaattctggaaagaagccattcaacagagccaaatttatcctccttcctgaatgaccccaatcccatgaaatacctgcggcaacagtcactgcctccacccaaattcactgccactgttgaaaccaccattgctcgtgccagtgttctggataccagcatgtcagcaggcagtgggtctccaagcaaaactgtcactcccaaagcagtgcctatgctgacacccaagccttactcccagcccaaaaattctcaagatgttctgaagacctttaaggtagacgggaaagtcagtgtgaatggagagacggttcatagagaggaggagaaggaaagagagtgtcccacggtggcacctgcccactccttaaccaaatcccagatgtttgaaggtgtggccagagtgcacgggtctccactggagctgaaacaagacaacggtagcatcgagatcaacataaagaagccaaactctgttccccaagagctcgcagcaaccactgagaaaacggaaccgaatagtcaagaggacaagaatgatggtggaaaatcaagaaaagggaatatagaacttgcctcatcagaaccacagcattttacaacaactgtgactcgatgcagcccgaccgtggcctttgtggaatttccctccagcccccagctgaagaatgatgtgtcggaagaaaaagaccagaagaaaccagaaaatgaaatgagtggaaaggtggagttggtgctgtcacaaaaggtggtaaagccaaaatctccagaacccgaagcaacgctgacatttccatttctggacaaaatgcctgaagccaaccaactacatttgccaaatctcaattctcaagtggattctccaagcagtgagaagtcacctgttatgacacctcagtttaagttctgggcatgggacccagaagaggagcgcaggcgacaggaaaaatggcaacaggaacaggaacgtttgctccaggagagataccagaaggagcaggacaagctgaaagaagagtgggaaaaggcccaaaaggaggtggaagaggaagaacgcagatactatgaggaggagcgtaagataattgaagacactgtggttccatttactgtttcttcaagttccgctgaccagctgtctacctcttcctccatgactgaaggcagtgggacaatgaataagatagacctgggaaactgtcaagatgaaaaacaagacagaagatggaagaaatcattccagggagatgacagtgacttattgctgaagactagggaaagtgatcgactggaggagaagggcagcctaactgaaggggccttggctcattctgggaaccctgtatcaaaaggagtccatgaagaccatcagctggataccgaggctggggccccacactgtggaacaaacccacagcttgctcaggatccatcccagaatcagcagacatcaaatccaacgcacagttcagaagatgtgaagccaaaaaccctcccgctggataaaagcattaaccatcagatcgagtctcccagtgaaaggcggaagaaaagtccccgagagcacttccaggctgggcctttctctccctgttctcccacccctcccggtcagtcaccaaacaggtctataagtggaaagaagctgtgctcttcctgtgggcttcctttgggtaaaggagctgcaatgatcatcgagaccctcaatctctattttcacatccagtgtttcaggtgtggaatttgtaaaggccagcttggagatgcagtgagtgggacggatgttaggattcgaaatggtctcctgaactgtaatgattgctacatgcgatccagaagtgccgggcagcctacaacattgtgacacggctttcaagcttccggatcactcaccatttctttactgagagtgtcccctggcaactgcttaacaaaatcccaagctcaggggcttctcagcatttacctaatttctgaaaggctcttctgaaaggtggtatctgttctttcgtagcacagtgtttatgtttttcctgtttattgttttggttttttttttttttttgcatttgcacagtatacacaaaagaatatggggttgtaatgatcctgaatagctcaaaaaaggttttagcatggtcaaacaggcttatggtttaaaatgtgttattctcttctttgggaattagctaaatgatgcaataaacctgttttgttttagaatgtctaggaattaaacactttatgtttacagaattgagctgcagaaagtgcaagacatgccaatttgagacacacggtcttctaagactgaaggataaatttaatgcatttcagaaactaaacatcacagcaagctctatctctgagctataatttgtttttaatgcaaagacactagtttgataatatatactgtaatcctgaaacatttgtgttacttacctttggaggtagaaattataccaataaattattgcaccgttagtattagattctgtgtaccttggaagttatgtcattaatataggctggttcatcaaataaagcaaaaccttgcaatatcagctagatttacactccgggacgttgcccaaaggtaggaagaaagcagagggaaatatttcagtcatcatttccaaagtcattatcaaaatctgtgaggaagtttaatcttccaaagagtcaatgtcagacatcaggcctctgttgcctgcttctctcgaggcactagattaggagtcttcaataagagacttaacatgaggtatatggaagatgaggcaccgagataagttcatcattaggtgtgagcactgctcacccttgctggcaagttctccttaagggcctgaagcacaggtgtccaaagaaaagcgttaagtccatcttaatagaatctatgtggtatatgatgtggtcagcccctggtctgtgatcagcaagaacctacagcacagattatgccctgcccacttcaatgaatacctactctcctccattctccatcactttttttgctatcaagaactccggaccttgcccatggagaagtttagagaggaactcttgtggagagctggtttattttctgccctgtgcgacgagtttcagctggccaagaaaggagtcaagttattaaaaagcatcacaatgtagatctccaggctggttttttgttttttgttgttaagactggggaaagggggactatttattctgccttaaatcaatggcaaataagtcaagatgacattttgtgaatgtagactatggatacactcctaatagattgatgtagtcataaaagggggtcaagtagatgtttttctgttatgtaagcaataatttttccgtgtcttattgagtatggctagcgattatttattacatgctagatgggttctttgcatgtgggttccatataggtgcagaaatttcctcagccactggagggatttcgaccatatttgtcatttggatgagctgttattagattgaaatctacacatcatttcattaaaaattgtgccttagaaaacgcaaagctgttgcacatggcgataaattatggatgcagtacattgaagagagatgaagtcacttccaagtttccaagacttctcatggaggtgtttgctgttttacaggaaaaaataaaaataaaaaaagaaaaaaagaaaaaattaaaaagaaaaattgttttgaaaatgtacagatcaagtccaatattttgattatccacctgcatgttttattaaatattttgataatgtggatgtttacactttgcatgatattagcagagtaccactagtaatgcacaaacatgtacaatatggtcattcataaccgatttttatagaatactttttacatgtgcaactccatccgttatgtaaggattacatgaatattgcacattcccttctggtttcacaaacccatttatacatatttcttagtgaggctcattgtacatgtattgaagctagaatcgagtcaagaaaaataaagccccattctccaactgcaaaatgtgctttcccataatgaacactagtcaccagcacagaataatctccaacattttctaaattctaattgccaactgtttctatttatatttgatttatatttcatttggagtctgttacatggcagcttaggcagactagatcttgttttttccaatgcagcataatgagtatgatctatttcttttcaaataatctttgagatcccaggaaaaaaaaaatgctctgctccattgagctataatgtaaatgtgtttgtttaaaaaacaggtgaggcaagtgagtgatttattgttcctgaggaagtatatctgattttttttctcatactccaaaagctagtccctactctttaataaaaataatgggtaactttttgtttttcactagcgaacttccatgacatttcctttctatgtagtgtgattaatgcaatacatattatagttatctatacacagtgtaagatttaacaaactgaaatgatccacctcatatgtgagtccgtccaaaagatgttactgctctgggtgggccagtgttctatatcggttatactaactttcatttaaagtatttattctaaaatgcctctgagaaacagtaaaaaataaaaacaacaagttgtctaaaatgcaacagcttttatagtaaatgtacatttataaataaaatactcaaatcaa
